(19) United States
(12) Patent Application Publication
(10) Pub. No.: US 2023/0303666 A1
(43) Pub. Date: Sep. 28, 2023

(54) CELL-FREE ANTIBODY ENGINEERING PLATFORM AND NEUTRALIZING ANTIBODIES FOR SARS-COV-2

(71) Applicants: The Broad Institute, Inc., Cambridge, MA (US); Massachusetts Institute of Technology, Cambridge, MA (US)

(72) Inventors: Aviv Regev, Cambridge, MA (US); Xun Chen, Cambridge, MA (US)

(21) Appl. No.: 18/026,866

(22) PCT Filed: Sep. 24, 2021
(86) PCT No.: PCT/US21/51925

§ 371 Date: Mar. 17, 2023

Related U.S. Application Data
(60) Provisional application No. 63/083,073, filed on Sep. 24, 2020.
(60) Provisional application No. 63/221,663, filed on Jul. 14, 2021.

(51) Int. Cl. C07K 16/10; A61P 31/14; C12N 15/10

(52) U.S. Cl. CPC C07K 16/10; A61P 31/14; C12N 15/1093; C07K 2317/565; C07K 2317/569; C07K 2317/22; C07K 2317/24

(57) ABSTRACT

The present invention discloses antibodies capable of binding to and neutralizing SARS-CoV-2 and variants thereof. The invention also discloses a cell-free antibody engineering platform capable of identifying antibodies that bind to specific target molecules and virus-neutralizing antibodies.

### CROSS-REFERENCE TO RELATED APPLICATIONS

[0001] This application claims the benefit of U.S. Provisional Application Nos. 63/083,073, filed Sep. 24, 2020, and 63/221,663, filed Jul. 14, 2021. The entire contents of the above-identified applications are hereby fully incorporated herein by reference.

### STATEMENT REGARDING FEDERALLY SPONSORED RESEARCH

[0002] This invention was made with government support under Grant No. HG006193 awarded by the National Institutes of Health. The government has certain rights in the invention.

### REFERENCE TO AN ELECTRONIC SEQUENCE LISTING

[0003] The contents of the electronic sequence listing (“BROD-5260WP_ST25.txt”; Size is 4,302,794 bytes and it was created on Sep. 20, 2021) is herein incorporated by reference in its entirety.

### TECHNICAL FIELD

[0004] The subject matter disclosed herein is generally directed to an integrated platform for generating and engineering antibodies and its application in developing SARS-CoV-2 neutralizing antibodies.

### BACKGROUND

[0005] Antibodies and their functional domains play key roles in research, diagnostics and therapeutics. Antibodies are traditionally made by immunizing animals with the desired target as antigen, but such methods are time consuming, their outcome is often unpredictable, and their use is increasingly restricted in the European Union 1. Alternatively, antibodies can be generated and selected in vitro, where libraries of antibody-encoding DNA, either fully synthetic or derived from animals, are displayed in vitro followed by selection and recovery of those binding the intended target^{2,3}. However, the adoption of such in vitro methods is still more limited than that of animal-dependent antibody generation⁴, possibly due to throughput limitations and concerns over functional fitness and in vivo tolerance of antibodies generated in vitro 5. Recent advances in antibody library design and construction, in vitro display and selection methods, post-selection binder identification and maturation have helped increase the utility of in vitro antibody generation². For example, recently developed antibody library designs have been successfully used with in vitro display methods for engineering antibodies⁶⁻⁸.

[0006] For typical antibodies, antigen binding is co-determined by the variable domains of both its heavy chain (VH) and light chain (VL/VK), while camelids produce unconventional heavy-chain-only antibodies that bind to antigens solely based on the variable domain of their heavy chain, the VHH domain (also known as nanobodies). Nanobodies are increasingly used as functional antibody domains because of their small size (˜14 kD)⁹ and high stability (Tₘ, up to 90° C.)¹⁰. Nanobody libraries have been successfully screened for binders by phage and yeast display^{6,11,12}. However, the screening diversity of such cell-based systems has often been limited in practice by the efficiency of DNA library delivery into cells (e.g., transformation efficiency of E. coli is typically <10¹⁰). Conversely, cell-free approaches, such as ribosome display¹³, are not limited by cell transformation and culture constraints. Despite these potential advantages, ribosome display remains underutilized compared to cell-based display systems², possibly due to sub-optimal efficiency and fidelity of cell free reactions. Further optimization can open up this methodology for antibody screening and enable wider adoption of cell-free systems in antibody engineering.

[0007] Severe acute respiratory syndrome coronavirus 2 (SARS-CoV-2) is the virus causing the ongoing Coronavirus Disease 19 (COVID19) pandemic. Identifying neutralizing antibodies is important for the development of effective therapeutics.

[0008] Citation or identification of any document in this application is not an admission that such a document is available as prior art to the present invention.

### SUMMARY

[0009] In one aspect, the present invention provides for an antibody or antigen binding fragment comprising one or more complementarity-determining regions (CDRs) selected or derived from any cluster or CDRs in any of Tables 1-9 (SEQ ID NOS: 1-5872). In certain embodiments, the CDRs are selected or derived from the SR1, SR2, SR4, SR6, SR8, SR12, SR15, SR18, SR25, SR30 or SR38 cluster families. In certain embodiments, the antibody or antigen binding fragment comprises CDRs from SR6v15, SR6v7, SR38, SR6c3, SR4t13, or SR2c3. In certain embodiments, the antibody or antigen binding fragment is a heavy chain antibody or variable domain of the heavy chain (VHH). In certain embodiments, the heavy chain antibody or variable domain of the heavy chain (VHH) is SR38 and binds to a N501Y SARS-CoV-2 variant. In certain embodiments, the heavy chain antibody or variable domain of the heavy chain (VHH) is SR6v15. In certain embodiments, the heavy chain antibody or variable domain of the heavy chain (VHH) is a dimer of SR6v15. In certain embodiments, the heavy chain antibody or variable domain of the heavy chain (VHH) is SR6v7. In certain embodiments, the heavy chain antibody or VHH are derived from camelid heavy chain antibodies. In certain embodiments, one or more framework residues in camelid antibodies are humanized. In certain embodiments, the humanized residues are located in one or more positions selected from the group consisting of frame 2 position 4, frame 2 position 11, frame 2 position 12, frame 2 position 14, and frame 4 position 8. In certain embodiments, the antibody or antigen binding fragment is modified to alter binding affinity, stability, in vivo half-life, neutralizing activity and/or dimerization. In certain embodiments, the antibody or antigen binding fragment is a fusion protein. In certain embodiments, the antibody or antigen binding fragment is fused to another antibody or antibody fragment, Fc domain, antigen binding domain, glutathione S-transferase (GST), and/or serum albumin.

[0010] In another aspect, the present invention provides for a method of treating SARS-CoV-2 infection comprising administering to a subject in need thereof the antibody or antigen binding fragment of any embodiment herein. In certain embodiments, the subject is infected with a SARS-CoV-2 variant. In certain embodiments, SR38 is administered to the subject. In certain embodiments, the subject is infected with a SARS-CoV-2 variant containing the N501Y mutation. In certain embodiments, SR6v15 is administered to the subject. In certain embodiments, a dimer of SR6v15 is administered to the subject.

[0011] In another aspect, the present invention provides for a method of detecting SARS-CoV-2 comprising contacting a biological sample obtained from a subject with the antibody or antigen binding fragment of any embodiment herein. In certain embodiments, the antibody is SR38 and a N501Y variant is detected. In certain embodiments, the antibody is SR38 and a E484K variant is detected. In certain embodiments, the antibody is SR6v15.

[0012] In another aspect, the present invention provides for a method of generating a VHH library comprising a VHH template with a randomized CDR1, CDR2 and CDR3 comprising: a. providing a VHH template; b. providing a first set of primers capable of amplifying the VHH template from a first CDR sequence to the end of the template, wherein the set of primers comprise: i. a primer comprising a 5′ randomized sequence corresponding to all or part of the first CDR sequence and a 3′ sequence capable of hybridizing to a non-randomized sequence; and ii. a hairpin primer capable of hybridizing to one end of the template; c. providing a second set of primers capable of amplifying the VHH template from the sequence directly adjacent to where the first primer set amplified from to the other end of the template, wherein the set of primers comprise: i. a primer capable of hybridizing to the sequence directly adjacent to where the first primer set amplified from, optionally, wherein the primer starts within the first CDR sequence and comprises a 5′ randomized sequence corresponding to the remaining first CDR sequence and a 3′ sequence capable of hybridizing to a non-randomized sequence; and ii. a hairpin primer capable of hybridizing to the other end of the template; d. PCR amplifying the VHH template with the first and second sets of primers to generate two single-end blocked PCR products corresponding to the entire VHH template; e. ligating the two PCR products; f repeating steps (a) to (e) for the second CDR sequence, wherein the randomized VHH ligation product obtained in step (e) is used as the template, whereby a VHH template randomized for two CDRs is obtained; and g. repeating steps (a) to (e) for the third CDR sequence, wherein the randomized VHH ligation product obtained in step (f) is used as the template, whereby a VHH template randomized for all three CDRs is obtained. In certain embodiments, the primer sequences are 5′ NNB randomized, where N is a mixture of A, T, G, C bases, and B is a mixture of G, C, T bases. In certain embodiments, the primer sequences are 5′ randomized using NNN tri-nucleotide sequence, where N is a mixture of A, T, C, G nucleotides. In certain embodiments, step (d) is performed using a DNA polymerase without strand displacement activity or with weak strand displacement activity. In certain embodiments, step (d) is performed using an elongation temperature of 65° C. In certain embodiments, CDR2 is randomized first. In certain embodiments, CDR1 is randomized second. In certain embodiments, CDR3 is randomized last. In certain embodiments, CDR2 encodes for 4 or 5 amino acids. In certain embodiments, CDR1 encodes for 4 to 8 amino acids. In certain embodiments, CDR3 encodes for 4 to 30 amino acids. In certain embodiments, the VHH templates comprise a promoter sequence upstream of the VHH template. In certain embodiments, the promoter is a T7 promoter. In certain embodiments, the VHH templates comprise an epitope tag sequence downstream of and in frame with the VHH template. In certain embodiments, the epitope tag comprises one or more myc tags. In certain embodiments, the method further comprises displaying the CDR1 and/or CDR2 randomized library of step (e) or (f) with ribosome display; enriching library members using the epitope tag; and using the enriched DNAs for input in step (g). In certain embodiments, the VHH templates do not include a stop codon.

[0013] In another aspect, the present invention provides for a method of identifying CDRs for generating an antibody or binding fragment of an antibody specific to an antigen of interest comprising: a. providing a linear DNA library, wherein each sequence in the library encodes for an antibody framework comprising three CDRs and operably linked to a 5′ promoter sequence, and wherein at least one CDR is randomized; b. performing ribosome display on the linear DNA library, whereby mRNAs transcribed from the linear DNA library are translated to an antibody protein that is tethered to the ribosome ribonucleoprotein complex; c. binding the ribonucleoprotein complexes to an immobilized antigen of interest; d. performing reverse transcription PCR (RT-PCR) on mRNA extracted from ribonucleoprotein complexes bound to the immobilized antigen, whereby cDNA is generated; e. optionally, repeating steps (b) to (d) using the cDNA from the bound ribonucleoprotein complexes as the linear DNA input; f sequencing the cDNAs to obtain antibody sequences; and g. clustering the antibody sequences based on similarity of their CDRs to identify distinct antibody clusters containing CDRs specific to the antigen of interest. In certain embodiments, all three CDRs are randomized. In certain embodiments, the CDRs are encoded by DNA oligos with 5′ NNB or NNN randomized sequences, where N is a mixture of A, T, G, C bases, and B is a mixture of G, C, T bases. In certain embodiments, step (c) is performed in solutions containing Mg2+ ions at concentrations of 5 mM or less. In certain embodiments, step (d) is performed using a mixture of two DNA polymerases in the PCR reaction, wherein one type is a DNA polymerase without strand displacement activity or with weak strand displacement activity and the other type is a DNA polymerase with strong strand displacement activity. In certain embodiments, steps (b) to (d) are performed for three rounds. In certain embodiments, the method further comprises identifying amino acid substitutions that will increase antibody binding and/or viral neutralization activity, said method comprising: h. introducing random mutations across the full length of one or more identified antibody frameworks using error prone PCR to obtain a mutated linear DNA library; i. repeating steps (b) to (d) for 1 to 3 rounds using the linear DNA library obtained in step (h) as the linear DNA library; j. sequencing the linear DNA library in (h) and the cDNA obtained in (i); k. calculating the percentage of each proteinogenic amino acid found at each antibody framework amino acid position among all sequenced antibody frameworks obtained from (h) and (i); 1. identifying amino acids at each position with increased percentage in (i) as compared to in sequences from (h); and m. replacing the amino acids at said positions in the antibody framework with the identified amino acids. In certain embodiments, step (c) is performed using a binding time of less than 1 minute. In certain embodiments, CDRs are selected from one or more of the clusters having the largest number of members. In certain embodiments, the antibody frameworks are heavy chain antibody variable domains (VHHs). In certain embodiments, the VHHs are camelid VHHs. In certain embodiments, the linear DNA library in step (a) is obtained according to the method of any embodiment herein. In certain embodiments, the method further comprises validating at least one member of a cluster or VHH sequence with amino acid substitutions by expressing the antibody framework and determining binding to the antigen of interest. In certain embodiments, the antigen of interest is associated with a viral pathogen and the antibody framework is tested for neutralizing activity. In certain embodiments, the method further comprises transferring one or more of the CDRs to a different antibody framework. In certain embodiments, the method further comprises synthesizing one or more sequences from each antibody cluster for cloning of the antibody genes and testing the antibody proteins.

[0014] These and other aspects, objects, features, and advantages of the example embodiments will become apparent to those having ordinary skill in the art upon consideration of the following detailed description of example embodiments.

### BRIEF DESCRIPTION OF THE DRAWINGS

[0015] An understanding of the features and advantages of the present invention will be obtained by reference to the following detailed description that sets forth illustrative embodiments, in which the principles of the invention may be utilized, and the accompanying drawings of which:

[0016] FIGS. 1A-1J-A cell-free nanobody engineering platform for rapid isolation of nanobodies from large synthetic libraries. (FIG. 1a) The workflow takes linear DNA library as input. (FIG. 1B) Ribosome display links genotype (RNAs transcribed from DNA input library that are stop codon free, and stall ribosome at the end of the transcript) and phenotype (folded VHH protein tethered to ribosomes due to the lack of stop codon in the RNA). (FIG. 1c) Selection cycle that enriches DNA encoding for VHHs that binds immobilized targets. (FIG. 1d) High throughput sequencing of full-length VHHs. (FIG. 1e) Sequences are grouped into clusters based on similarity of their CDRs, each cluster is distinct and represent a unique binding family. (FIG. 1f) The system outputs one representative sequence from each cluster to be synthesized and characterized for specific downstream applications. (FIG. 1g) Workflow for generating VHH library. VHH CDR randomization was introduced by PCR using a hairpin oligo (blocks DNA end from ligation) and an oligo with random 5′ sequence, followed by orientation-controlled ligation. Three successive PCR plus ligation cycles randomizes all three CDRs. (FIG. 1h) The final DNA library sequence structure. (FIG. 1i) One round of ribosome display and anti-Myc selection was performed after randomization of CDR1 and CDR2. The pie chart shows percentage of indicated sequence categories before and after anti-Myc selection. (FIG. 1j) Length distribution of DNA region encoding CDR1 of the VHH library before and after anti-Myc selection. Arrows indicate all correct-frame lengths showing increased percentage after anti-Myc selection.

[0017] FIGS. 2A-2D—Amino acid profiles of natural and synthetic VHHs (nanobodies). (FIG. 2a) Position-wise amino acid profile of natural VHHs (298 VHHs, PDB) and (FIG. 2b) synthetic VHHs. Amino acids were color coded according to labels to the right, B indicates an empty position. Bar height is the relative percentage of each amino acids. The two most common amino acids were shown as patterned bars while others were shown as solid bars. (FIG. 2c) Plot of diversity index (as 1—Gini index) for each amino acid position of natural VHHs and (FIG. 2d) synthetic VHHs.

[0018] FIGS. 3A-3C—Design of VHH frames and their homology to human IGH genes. (FIG. 3a) Amino acid sequences encoded by frames that serve as templates for VHH library generation were aligned to the corresponding segments of the human IGHV3-23 (hIGHV3-23) or IGHJ4 (hIGHJ4). Positions in hIGHV3-23/hIGHJ4 that are identical to the corresponding position in at least one VHH frames are highlighted in orange. Positions in VHH frames that are identical to the corresponding position in hIGHV3-23/hIGHJ4 are highlighted in orange. hIGHV3-23 positions not identical to any VHH frames are numbered according to its position within the segment. Asterisks indicate VHH hallmark residues thought to be required for VHH's independence of light chain. (FIG. 3b) Percent homology of VHH frames to the closest human gene. (FIG. 3c) List of VHH residues at positions numbered in (a) and representative human IGHV genes that encode the same VHH residue at the corresponding position. None: no human IGHV genes has the VHH residue at the corresponding position.

[0019] FIGS. 4A-4B—Working principles of orientation-controlled ligation by end blocking using hairpin oligos. (FIG. 4a) working principle for generating one end blocked DNA for orientation-controlled ligation by PCR using a hairpin DNA oligo. (FIG. 4b) Representative orientation-controlled ligation products visualized by agarose gel electrophoresis.

[0020] FIGS. 5—Comparison of the CDR2 region in the CeVICA nanobody library and previous designs. Alignment of CDR2 and neighboring sequences designed for four libraries (rows). X: highly diversified positions (>=10 different amino acids); blue triangles: positions with limited diversity (<10 different amino acids).

[0021] FIGS. 6A-6H—Isolation and characterization of synthetic VHHs that binds SARS-CoV-2 spike RBD. (FIG. 6a) Immobilization strategy for the target proteins: 3×Flag-tagged EGFP or RBD. (FIG. 6b) Pair-wise CDR match score (based on BLOSUM62 matrix) were calculated for 2000 randomly selected sequences from input library and output libraries after 3 rounds of selection. High match score populations appeared in the output libraries. Combining CDR1 and 2 match scores further separated high and low score population and a match score of 35 (black dashed line) was chosen as cut-off for downstream clustering analysis. (FIG. 6c) Percentage of indicated sequence categories in the input library and output libraries (EGFP, RBD). (FIG. 6d) Number of unique and shared clusters identified in EGFP and RBD output libraries. (FIG. 6e) Number of sequences for each size of RBD unique clusters. (FIG. 6f) ELISA assay revealed 3 strong binders (“s”) to RBD, 8 weak binders (“w”) and (FIG. 6g) 3 non-binders (“n”, background subtracted OD 450 nm<0.02) among the 14 VHHs chosen for characterization. (FIG. 6h) SARS-CoV-2 S pseudotyped lentivirus neutralization assay showed 6 VHHs inhibiting infection >30% at 1 μM on HEK293T expressing ACE2 and TMPRSS2. Data shown are two technical replicates, bars indicate the average of data, circles indicate values of each replicate.

[0022] FIGS. 7A-7F—Evaluation of ribosome display and selection rounds. (FIG. 7a) Yield of recovered RNA at each round of ribosome display and selection for EGFP or RBD targets. (FIG. 7b) Representative RT reaction (without heat denaturation) product for RBD selection after 3 rounds, visualized by agarose gel electrophoresis. (FIG. 7c) Plot of match scores of sequence pairs with a combined CDR1 and CDR2 score >35. (FIG. 7d) Plot of match scores of sequence pairs (from 2000 randomly sampled sequences) with indicated CDR1 scores, and (FIG. 7e) indicated CDR2 scores, and (FIG. 70 indicated CDR3 scores.

[0023] FIGS. 8A-8E—Unique output binders amino acid profiles is more similar to that of input library than natural VHHs. (FIG. 8a) Spearman correlation coefficient values for the amino acid percentages in the indicated sequence group pairs at each CDR position. 298 natural nanobodies (natural) and 298 randomly sampled sequences from input library (input) and output binders (output) were analyzed. Three random sampling trials were performed to generate three Spearman correlation coefficient for each position. **: p<0.01, *: p<0.05 (t test between output vs. input and output vs. natural values). (FIG. 8b) Scatter plots of the percentage of each amino acid in the input library and the output binders and (FIG. 8c) that in the natural nanobodies and the output binders at representative CDR positions. A few data points are out of the range of the set axes due to extreme “outlier” values in the natural profile, see Table 11 for all data point values. Circle: mean, error bar: standard deviation. (FIG. 8d) Root mean square error (RMSE, relative to y=x line) values for the indicated sequence group pairs at each CDR position. Using the same randomly sampled sequences as (a). **: p<0.01, *: p<0.05 (t test between output vs. input and output vs. natural values). (FIG. 8e) Three-way distance maps of the distances between the three groups, with the length of each line connecting between two sequence groups indicating their RMSE. The input group (input) is fixed at (0,0), the natural group (natural) is fixed on the x axis (0,y), and the position of output group (output) is calculated based on its distance (RMSE) to the input and natural groups. Vertical dashed lines indicate the middle point of the distance between the input and natural groups.

[0024] FIGS. 9A-9B—Amino acid profile for EGFP and RBD unique output binders. (FIG. 9a) Amino acid profile of representative VHH sequence for each unique cluster identified from RBD and EGFP output libraries (“output binders”, 932 sequences). Plotted as described in FIG. 2a. (FIG. 9b) Plot of diversity index (as 1—Gini index) for each amino acid position of output binder VHHs.

[0025] FIG. 10A-10B—Comparison of CeVICA input and output amino acid profiles to that of 1,030 natural nanobody sequences in the abYsis collection. (FIG. 10a) Root mean square error (RMSE, relative to y=x line) values for the amino acid percentages in 1,030 nanobodies from abYsis (natural), and 350 randomly sampled sequences from either the input (input) or output binders (output) libraries. Three random sampling trials were performed to generate three RMSE for each position. **: p<0.01, t test of the difference between output vs. input and output vs. natural. (FIG. 10b) Three-way distance maps of the distances between the three groups, with the length of each line connecting between two sequence groups indicating their RMSE. The input group (input) is fixed at (0,0), the natural group (natural) is fixed on the x axis (0,y), and the position of output group (output) is calculated based on its distance (RMSE) to the input and natural groups. Vertical dashed lines indicate the middle point of the distance between the input and natural groups.

[0026] FIG. 11A-11G—An affinity maturation strategy enhances binding and neutralization properties of synthetic VHHs. (FIG. 11a) Affinity maturation workflow. (FIG. 11b) Two representative sections of position-wise post-minus pre-affinity maturation amino acid percent point change profile. White values indicate the original amino acid, yellow values indicate the beneficial mutation. Empty positions indicate amino acids not detected in either the pre- or post-selection libraries. (FIG. 11c) ELISA assay of VHH variants. (FIG. 1id) SARS-CoV-2 S pseudotyped lentivirus neutralization assay of VHHs on HEK293T expressing ACE2 and TMPRSS2. For (c) and (d), data shown are two technical replicates, bars indicate the average of data, circles indicate values of each replicate. (FIG. 11e) Scatter plot of ELISA assay absorbance versus pseudotyped lentivirus neutralization as percent infection inhibited. VHH concentration for both assays were 50 nM. Values are average of two technical replicates. Numbers on linear fitting lines were r² value for data within each family. (FIG. 111) Dose-response curve for neutralization of pseudotyped lentiviral infection by VHHs. Markers are average of three technical replicates, error bars are standard deviation. (FIG. 11g) IC50 calculated from data in (f), presented as mean±standard deviation.

[0027] FIG. 12—Affinity maturation leads to some VHH hallmark residues converting to the corresponding human VII residues. The post-minus pre-affinity maturation percent point change of VHH hallmark residues and the corresponding human residues for each VHH. Arrows indicate human residues with increased frequency as a result of affinity maturation.

[0028] FIG. 13A-13C—Identification of additional RBD binders and pseudovirus neutralizers among lower ranking clusters. (FIG. 13a, FIG. 13b) Binding assay. Binding measured by ELISA assay (y axis, OD 450 nm) of each of the nanobodies (x axis) tested at 1 for binding to wild type RBD (RBD wt) or RBD carrying the N501Y (RBD N501Y) or E484K (RBD E484K) mutations. Non binder: 5 nanobodies that showed undetectable values (background subtracted OD 450 nm<0.02). (FIG. 13c) Pseudovirus neutralization. SARS-CoV-2 S pseudotyped lentivirus neutralization of nanobodies at 1 μM on HEK293T expressing ACE2 and TMPRSS2. Data shown are two technical replicates, bar height: mean, circle: value of each replicate.

[0029] FIG. 14A-14D-A second affinity maturation generates neutralizing agents with picomolar IC50. (FIG. 14a) Binding (y axis, ELISA assay) of new SR6 variants identified by the second affinity maturation and two previously reported nanobodies, Nb21 and Ty1 (x axis). Nanobody concentrations shown at the bottom. Data shown are two technical replicates, bar height: mean, circle: value of each replicate. (FIG. 14b) Biolayer interferometry assay of SR6v15. Red traces: recorded sensorgrams, black traces: fitted curves. K_{D}, Kₐ and K_{d} values are mean of five measurements. (FIG. 14c) Pseudovirus neutralization. % inhibition (y axis) of different nanobodies (x axis). Data shown are two technical replicates, bar height: mean, circle: value of each replicate. (FIG. 14d) Dose-response curve for neutralization of pseudotyped lentiviral infection by nanobodies and nanobody-based agents. Markers: mean of three technical replicates, error bars: standard deviation. IC50 values are shown as mean±standard deviation.

[0030] FIG. 15A-15C—Representative nanobodies mainly exist as monomers in solution. Size-exclusion chromatography traces of SR12 (FIG. 15a), SR18 (FIG. 15b), and SR6c3 (FIG. 15c). Percent monomer values are shown next to the monomer peaks.

[0031] FIG. 16A-16D—Intramolecular disulfide bond formation via CDR cysteine does not impair SR6c3 function. (FIG. 16a, FIG. 16b) Coomassie blue stained SDS PAGE gel of nanobody samples prepared in (a) non-reducing sample buffer or (b) in non-reducing (−) or reducing (+) sample buffer. Number of months: length of time the sample has been stored at 4° C. (FIG. 16c) Binding (y axis, by ELISA) of SR6c3 samples stored for different durations with or without treatment with DTT (50 mM DTT at room temperature for 2 hours). (FIG. 16d) SARS-CoV-2 S pseudotyped lentivirus neutralization of SR6c3 samples on HEK293T expressing ACE2 and TMPRSS2. Data shown are two technical replicates, bar height: mean, circle: value of each replicate.

[0032] FIG. 17A-17B—Thermal stability and refolding analysis of nanobodies. (FIG. 17a) Protein thermal shift assay. Melt curve derivative (y axis) at different temperatures (x axis) for two nanobodies. (FIG. 17b) Refolding assay following thermal denaturation. Ratio of binding (ELISA OD 450 nm) of heated (98° C. for 10 minutes) vs. non-heated samples (y axis) for different nanobodies (x axis). DTT: 25 mM DTT in sample solution. Data shown are three technical replicates, bar height: mean, circle: value of each replicate.

[0033] The figures herein are for illustrative purposes only and are not necessarily drawn to scale.

### DETAILED DESCRIPTION OF THE EXAMPLE EMBODIMENTS

### General Definitions

[0034] Unless defined otherwise, technical and scientific terms used herein have the same meaning as commonly understood by one of ordinary skill in the art to which this disclosure pertains. Definitions of common terms and techniques in molecular biology may be found in Molecular Cloning: A Laboratory Manual, 2^{nd} edition (1989) (Sambrook, Fritsch, and Maniatis); Molecular Cloning: A Laboratory Manual, 4^{th} edition (2012) (Green and Sambrook); Current Protocols in Molecular Biology (1987) (F. M. Ausubel et al. eds.); the series Methods in Enzymology (Academic Press, Inc.): PCR 2: A Practical Approach (1995) (M. J. MacPherson, B. D. Hames, and G. R. Taylor eds.): Antibodies, A Laboratory Manual (1988) (Harlow and Lane, eds.): Antibodies A Laboratory Manual, 2^{nd} edition 2013 (E. A. Greenfield ed.); Animal Cell Culture (1987) (R. I. Freshney, ed.); Benjamin Lewin, Genes IX, published by Jones and Bartlet, 2008 (ISBN 0763752223); Kendrew et al. (eds.), The Encyclopedia of Molecular Biology, published by Blackwell Science Ltd., 1994 (ISBN 0632021829); Robert A. Meyers (ed.), Molecular Biology and Biotechnology: a Comprehensive Desk Reference, published by VCH Publishers, Inc., 1995 (ISBN 9780471185710); Singleton et al., Dictionary of Microbiology and Molecular Biology 2^{nd} ed., J. Wiley & Sons (New York, N.Y. 1994), March, Advanced Organic Chemistry Reactions, Mechanisms and Structure 4th ed., John Wiley & Sons (New York, N.Y. 1992); and Marten H. Hofker and Jan van Deursen, Transgenic Mouse Methods and Protocols, 2^{nd} edition (2011).

[0035] As used herein, the singular forms “a”, “an”, and “the” include both singular and plural referents unless the context clearly dictates otherwise.

[0036] The term “optional” or “optionally” means that the subsequent described event, circumstance or substituent may or may not occur, and that the description includes instances where the event or circumstance occurs and instances where it does not.

[0037] The recitation of numerical ranges by endpoints includes all numbers and fractions subsumed within the respective ranges, as well as the recited endpoints.

[0038] The terms “about” or “approximately” as used herein when referring to a measurable value such as a parameter, an amount, a temporal duration, and the like, are meant to encompass variations of and from the specified value, such as variations of +/−10% or less, +/−5% or less, +/−1% or less, and +/−0.1% or less of and from the specified value, insofar such variations are appropriate to perform in the disclosed invention. It is to be understood that the value to which the modifier “about” or “approximately” refers is itself also specifically, and preferably, disclosed.

[0039] As used herein, a “biological sample” may contain whole cells and/or live cells and/or cell debris. The biological sample may contain (or be derived from) a “bodily fluid”. The present invention encompasses embodiments wherein the bodily fluid is selected from amniotic fluid, aqueous humour, vitreous humour, bile, blood serum, breast milk, cerebrospinal fluid, cerumen (earwax), chyle, chyme, endolymph, perilymph, exudates, feces, female ejaculate, gastric acid, gastric juice, lymph, mucus (including nasal drainage and phlegm), pericardial fluid, peritoneal fluid, pleural fluid, pus, rheum, saliva, sebum (skin oil), semen, sputum, synovial fluid, sweat, tears, urine, vaginal secretion, vomit and mixtures of one or more thereof. Biological samples include cell cultures, bodily fluids, cell cultures from bodily fluids. Bodily fluids may be obtained from a mammal organism, for example by puncture, or other collecting or sampling procedures.

[0040] The terms “subject,” “individual,” and “patient” are used interchangeably herein to refer to a vertebrate, preferably a mammal, more preferably a human. Mammals include, but are not limited to, murines, simians, humans, farm animals, sport animals, and pets. Tissues, cells and their progeny of a biological entity obtained in vivo or cultured in vitro are also encompassed.

[0041] Various embodiments are described hereinafter. It should be noted that the specific embodiments are not intended as an exhaustive description or as a limitation to the broader aspects discussed herein. One aspect described in conjunction with a particular embodiment is not necessarily limited to that embodiment and can be practiced with any other embodiment(s). Reference throughout this specification to “one embodiment”, “an embodiment,” “an example embodiment,” means that a particular feature, structure or characteristic described in connection with the embodiment is included in at least one embodiment of the present invention. Thus, appearances of the phrases “in one embodiment,” “in an embodiment,” or “an example embodiment” in various places throughout this specification are not necessarily all referring to the same embodiment, but may. Furthermore, the particular features, structures or characteristics may be combined in any suitable manner, as would be apparent to a person skilled in the art from this disclosure, in one or more embodiments. Furthermore, while some embodiments described herein include some but not other features included in other embodiments, combinations of features of different embodiments are meant to be within the scope of the invention. For example, in the appended claims, any of the claimed embodiments can be used in any combination.

[0042] All publications, published patent documents, and patent applications cited herein are hereby incorporated by reference to the same extent as though each individual publication, published patent document, or patent application was specifically and individually indicated as being incorporated by reference.

### OVERVIEW

[0043] Embodiments disclosed herein provide a cell-free antibody engineering platform for rapid isolation of antibodies from synthetic library and antibodies obtained by the platform. Antibody engineering technologies face increasing demands for speed, reliability and scale. Applicants developed CeVICA, a cell-free antibody engineering platform that uses ribosome display for in vitro selection of nanobodies from a library of 1011 randomized sequences. Applicants applied CeVICA to engineer antibodies against the Receptor Binding Domain (RBD) of SARS-CoV-2 spike proteins and identified >800 binder families using a computational pipeline based on CDR-directed clustering. Among 38 experimentally tested families, 30 were true RBD binders and 11 inhibited SARS-CoV-2 pseudotyped virus infection. Affinity maturation and multivalency engineering increased nanobody binding affinity and yielded a virus neutralizer with picomolar IC50. Furthermore, the unique capability of CeVICA for comprehensive binder prediction allowed retrospective validation of the synthetic VHH library fitness. CeVICA offers an integrated solution to rapid generation of divergent synthetic antibodies with tunable affinities in vitro and may serve as the basis for automated and highly parallel antibody generation. The identified antibodies can be used for treatment of SARS-CoV-2 and variants thereof. The identified antibodies can be used for detection of SARS-CoV-2 and variants thereof.

### Therapeutic Antibodies or Binding Fragments of an Antibody

### Antibodies

[0044] In certain embodiments, the present invention provides antibodies, antibody fragments, binding fragments of an antibody, or antigen binding fragments capable of binding to an antigen of interest (e.g., the receptor binding domain of SARS-CoV-2). The term “antibody” is used interchangeably with the term “immunoglobulin” herein, and includes intact antibodies, fragments of antibodies, e.g., Fab, F(ab′)2 fragments, and intact antibodies and fragments that have been mutated either in their constant and/or variable region (e.g., mutations to produce chimeric, partially humanized, or fully humanized antibodies, as well as to produce antibodies with a desired trait, e.g., enhanced binding and/or reduced FcR binding). The term “fragment” refers to a part or portion of an antibody or antibody chain comprising fewer amino acid residues than an intact or complete antibody or antibody chain. Fragments can be obtained via chemical or enzymatic treatment of an intact or complete antibody or antibody chain. Fragments can also be obtained by recombinant means. Exemplary fragments include Fab, Fab′, F(ab′)2, Fabc, Fd, dAb, VHH and scFv and/or Fv fragments.

[0045] The term “antigen-binding fragment” refers to a polypeptide fragment of an immunoglobulin or antibody that binds antigen or competes with intact antibody (i.e., with the intact antibody from which they were derived) for antigen binding (i.e., specific binding). As such these antibodies or fragments thereof are included in the scope of the invention, provided that the antibody or fragment binds specifically to a target molecule.

[0046] In certain embodiments, the antibody or antibody fragment is a therapeutic antibody. In certain embodiments, the antibody is a neutralizing antibody. As used herein, “neutralizing antibody” refers to an antibody that is capable of neutralizing a pathogen or reducing infectivity, such as a viral pathogen (e.g., SARS-CoV-2). In certain embodiments, the antibody or antibody fragment is capable of use in detection (e.g., SARS-CoV-2).

[0047] Applicants have used the methods described further herein to identify specific antibodies capable of neutralizing SARS-CoV-2. The antibodies specifically bind to the receptor binding domain of SARS-CoV-2 spike and neutralize pseudotyped virus expressing the spike protein.

[0048] The antibodies or antibody fragments disclosed herein can also bind to and/or neutralize SARS-CoV-2 variants. As used herein, the term “variant” refers to any virus having one or more mutations as compared to a known virus. A strain is a genetic variant or subtype of a virus. The terms ‘strain’, ‘variant’, and ‘isolate’ may be used interchangeably. In certain embodiments, a variant has developed a “specific group of mutations” that causes the variant to behave differently than that of the strain it originated from. While there are many thousands of variants of SARS-CoV-2, (Koyama, Takahiko Koyama; Platt, Daniela; Parida, Laxmi (June 2020). “Variant analysis of SARS-CoV-2 genomes”. Bulletin of the World Health Organization. 98: 495-504) there are also much larger groupings called clades. Several different Glade nomenclatures for SARS-CoV-2 have been proposed. As of December 2020, GISAID, referring to SARS-CoV-2 as hCoV-19 identified seven clades (0, S, L, V, G, GH, and GR) (Alm E, Broberg E K, Connor T, et al. Geographical and temporal distribution of SARS-CoV-2 clades in the WHO European Region, January to June 2020 [published correction appears in Euro Surveill. 2020 August; 25(33):]. Euro Surveill. 2020; 25(32):2001410). Also as of December 2020, Nextstrain identified five (19A, 19B, 20A, 20B, and 20C) (Cited in Alm et al. 2020). Guan et al. identified five global clades (G614, S84, V251, 1378 and D392) (Guan Q, Sadykov M, Mfarrej S, et al. A genetic barcode of SARS-CoV-2 for monitoring global distribution of different clades during the COVID-19 pandemic. Int J Infect Dis. 2020; 100:216-223). Rambaut et al. proposed the term “lineage” in a 2020 article in Nature Microbiology; as of December 2020, there have been five major lineages (A, B, B.1, B.1.1, and B.1.777) identified (Rambaut, A.; Holmes, E. C.; O'Toole, A.; et al. “A dynamic nomenclature proposal for SARS-CoV-2 lineages to assist genomic epidemiology”. 5: 1403-1407).

[0049] Genetic variants of SARS-CoV-2 have been emerging and circulating around the world throughout the COVID-19 pandemic (see, e.g., The US Centers for Disease Control and Prevention; www.cdc.gov/coronavirus/2019-ncov/variants/variant-info.html). Exemplary, non-limiting variants applicable to the present invention include variants of SARS-CoV-2 having substitutions of therapeutic concern (Table A).

TABLE A

| Spike Protein | Common Pango Lineages with Spike Protein |
|---|---|
| Substitution | Substitutions |
| L452R | A.2.5, B.1, B.1.429, B.1.427, B.1.617.1, |
| | B.1.526.1, B.1.617.2, C.36.3 |
| E484K | B.1.1.318, B.1.1.7, B.1.351, B.1.525, B.1.526, |
| | B.1.621, B.1.623, P.1, P.1.1, P.1.2, R.1 |
| K417N, E484K, N501Y | B.1.351, B.1.351.3 |
| K417T, E484K, N501Y | P.1, P.1.1, P.1.2 |

Phylogenetic Assignment of Named Global Outbreak (PANGO) Lineages is software tool developed by members of the Rambaut Lab. The associated web application was developed by the Centre for Genomic Pathogen Surveillance in South Cambridgeshire and is intended to implement the dynamic nomenclature of SARS-CoV-2 lineages, known as the PANGO nomenclature.

[0050] The SARS-CoV-2 variants applicable to the present invention include: B.1.1.7, also known as Alpha (WHO) or UK variant, having the following spike protein substitutions: 69de1, 70de1, 144de1, (E484K*), (S494P*), N501Y, A570D, D614G, P681H, T716I, S982A, and D1118H (K1191N*); B.1.351, also known as Beta (WHO) or South Africa variant, having the following spike protein substitutions: D80A, D215G, 241de1, 242de1, 243de1, K417N, E484K, N501Y, D614G, and A701V; B.1.427, also known as Epsilon (WHO) or US California variant, having the following spike protein substitutions: L452R, and D614G; B.1.429, also known as Epsilon (WHO) or US California variant, having the following spike protein substitutions: S13I, W152C, L452R, and D614G; B.1.617.2, also known as Delta (WHO) or India variant, having the following spike protein substitutions: T19R, (G142D), 156de1, 157de1, R158G, L452R, T478K, D614G, P681R, and D950N; and P.1, also known as Gamma (WHO) or Japan/Brazil variant, having the following spike protein substitutions: L18F, T20N, P26S, D138Y, R190S, K417T, E484K, N501Y, D614G, H655Y, and T10271.

[0051] The antibodies include “complementarity determining regions” or “CDRs” interspersed among “frame regions” or “FRs”, as defined herein. As used herein CDRs refer to variable regions in an antibody that provide for antigen specificity. In certain embodiments, specific CDRs identified can be used in an antibody framework described further herein. In certain embodiments, one, two, or all three CDRs are used in a framework. In certain embodiments, CDR1 and CDR3 are used in a framework. In certain embodiments, CDR3 is used in a framework. In preferred embodiments, all three CDRs are used in a framework. In certain embodiments, the CDRs are used in a heavy-chain antibody VHH domain. As used herein, framework can refer to an entire antibody VHH domain or antibody as described herein. In certain embodiments, frame region (FR) refers to the non-CDR regions or constant regions in the antibody. The frame regions in the antibodies of the present invention are also referred to as frame 1, frame2, frame3 and frame4.

[0052] In certain embodiments, the antibodies of the present invention are heavy chain antibodies. As used herein “heavy chain antibody,” “VHH” or “single-domain antibodies” (sdAbs) refers to an antibody which consists only of two heavy chains and lacks the two light chains usually found in antibodies (see, e.g., Henry and MacKenzie, Antigen recognition by single-domain antibodies: structural latitudes and constraints. MAbs. 2018 August-September; 10(6): 815-826). VHH can refer to an antibody or VHH domain. Single-domain antibodies (sdAb) are also known as a nanobody; an antibody fragment consisting of a single monomeric variable antibody domain. As used herein “VHH” is used interchangeably with “nanobody.” The ˜12-15 kDa variable domains of these antibodies (VHHs and VNARs) can be produced recombinantly and can recognize antigen in the absence of the remainder of the antibody heavy chain. In common antibodies, the antigen binding region consists of the variable domains of the heavy and light chains (VH and VL). Heavy-chain antibodies can bind antigens despite having only VH domains. In certain embodiments, the heavy chain antibody is an antibody derived from cartilaginous fishes (immunoglobulin new antigen receptor (IgNAR)) or camelid ungulates. Non-limiting examples of camelids include dromedaries, camels, llamas and alpacas.

[0053] Applicants specifically identified CDR clusters in camelid heavy chain antibody domains (VHH) that specifically bind to the receptor binding domain of SARS-CoV-2 spike and neutralize pseudotyped virus expressing the spike protein or that specifically bind to EGFP (Tables 1-9). Antibodies belonging to 6 clusters or families having similar CDRs were identified that have binding and neutralizing activity (Tables 1-7 and 9).

TABLE 1
Sequences belonging to cluster SR1.
Each line in the table represents one sequence,
both segments and full length of the sequence
are shown. Shown items are divided by “#” and
in the order from start to end of each line is:
CDR1 amino acid sequence, CDR2 amino acid
sequence, CDR3 amino acid sequence, full-length
amino acid sequence with CDRs capitalized,
full-length DNA sequence.
(SEQ ID NOS: 1-195)

KTGRSVI#RGDDT#VYFVNDCIV#evqlvesggglvqagdslrlscaasg
KTGRSVImgwfrqapgkerefvatitRGDDTtnyadsvkgrftisrddar
ntvylqmnslkpedtavyycaaVYFVNDCIVdywgqgtqvtvss#ATACC
ATGGAAGTTCAACTGGTTGAATCTGGTGGCGGTTTAGTTCAAGCCGGTGA
TAGCCTTCGTCTGAGCTGCGCCGCAAGCGGAAAGACCGGTCGGAGCGTCA
TTATGGGTTGGTTTCGCCAGGCACCTGGTAAAGAACGTGAATTTGTGGCA
ACCATTACCCGCGGGGATGACACTACCAACTATGCCGATTCTGTTAAAGG
TCGCTTCACTATTTCACGCGATGATGCGCGTAATACCGTGTACTTACAGA
TGAACTCACTGAAACCTGAGGATACCGCCGTTTATTATTGTGCGGCAGTC
TATTTTGTCAACGACTGCATTGTTGACTATTGGGGTCAGGGCACACAAGT
CACGGTCTCAAGCGGCGGAAGCTCTGGTGAACAGAAACTGATTTCAGAAG
KTGRSVI#RGDDT#IVLLTNLGLC#evqlvesggglvqag
dslrlscaasgKTGRSVImgwfrqapgkerefvatitRGDDTtnyadsvk
grftisrddarntvylqmnslkpedtavyycarlVLLTNLGLCdywgqgt
qvtvss#AGATATACCATGGAAGTTCAACTGGTTGAATCTGGTGGCGGTT
TAGTTCAAGCCGGTGATAGCCTTCGTCTGAGCTGCGCCGCAAGCGGAAAG
ACCGGTCGGAGCGTCATTATGGGTTGGTTTCGCCAGGCACCTGGTAAAGA
ACGTGAATTTGTGGCAACCATTACCCGCGGGGATGACACTACCAACTATG
CCGATTCTGTTAAAGGTCGCTTCACTATTTCACGCGATGATGCGCGTAAT
ACCGTGTACTTACAGATGAACTCACTGAAACCTGAGGATACCGCCGTTTA
TTATTGTGCGCGTATTGTGCTCCTGACTAACCTTGGCCTCTGCGACTATT
GGGGTCAGGGCACACAAGTCACGGTCTCAAGCGGCGGAAGCTCTGGTGAA
CAGAAACTGATTTCAGAAG
KTGRSVI#RGDDT#VYFVNDC
IV#evqlvesggglvqagdslrlscaasgKTGRSVImgwfrqapdkeref
vatitRGDDTtnyadsvkgrftisrddarntvylqmnslkpedtavyyca
aVYFVNDCIVdywgqgtqvtvss#ACCATGGAAGTTCAACTGGTTGAATC
TGGTGGCGGTTTAGTTCAAGCCGGTGATAGCCTTCGTCTGAGCTGCGCCG
CAAGCGGAAAGACCGGTCGGAGCGTCATTATGGGTTGGTTTCGCCAGGCA
CCTGATAAAGAACGTGAATTTGTGGCAACCATTACCCGCGGGGATGACAC
TACCAACTATGCCGATTCTGTTAAAGGTCGCTTCACTATTTCACGCGATG
ATGCGCGTAATACCGTGTACTTACAGATGAACTCACTGAAACCTGAGGAT
ACCGCCGTTTATTATTGTGCGGCAGTCTATTTTGTCAACGACTGCATTGT
TGACTATTGGGGTCAGGGCACACAAGTCACGGTCTCAAGCGGCGGAAGCT
CTGGTGAACAGAAACTGATTTCAGAAG
KTGRSVI#RGDDTVYFVNDCIV#evqlvesggglvqagdslrlscaasg
KTGRSVImgwfrq
apgkerefvatitRGDDTtnyadsvkgrftisrddarntvylqmnslkpe
dtavyycaaVYFVNDCIVaywgqgtqvtvss#ATATACCATGGAAGTTCA
ACTGGTTGAATCTGGTGGCGGTTTAGTTCAAGCCGGTGATAGCCTTCGTC
TGAGCTGCGCCGCAAGCGGAAAGACCGGTCGGAGCGTCATTATGGGTTGG
TTTCGCCAGGCACCTGGTAAAGAACGTGAATTTGTGGCAACCATTACCCG
CGGGGATGACACTACCAACTATGCCGATTCTGTTAAAGGTCGCTTCACTA
TTTCACGCGATGATGCGCGTAATACCGTGTACTTACAGATGAACTCACTG
AAACCTGAGGATACCGCCGTTTATTATTGTGCGGCAGTCTATTTTGTCAA
CGACTGCATTGTTGCCTATTGGGGTCAGGGCACACAAGTCACGGTCTCAA
GCGGCGGAAGCTCTGGTGAACAGAAACTGATTTCAGAAG
K
TGRSVI#RGDDT#VYFVNDCIV#evqlvesggglvqagdslrlscaasgK
TGRSVImgwfrqapgkerefvatitRGDDTtnyadsvkgrltisrddarn
tvylqmnslkpedtavyycaaVYFVNDCIVdywgqgtqvtvss#AGATAT
ACCATGGAAGTTCAACTGGTTGAATCTGGTGGCGGTTTAGTTCAAGCCGG
TGATAGCCTTCGTCTGAGCTGCGCCGCAAGCGGAAAGACCGGTCGGAGCG
TCATTATGGGTTGGTTTCGCCAGGCACCTGGTAAAGAACGTGAATTTGTG
GCAACCATTACCCGCGGGGATGACACTACCAACTATGCCGATTCTGTTAA
AGGTCGCCTCACTATTTCACGCGATGATGCGCGTAATACCGTGTACTTAC
AGATGAACTCACTGAAACCTGAGGATACCGCCGTTTATTATTGTGCGGCA
GTCTATTTTGTCAACGACTGCATTGTTGACTATTGGGGTCAGGGCACACA
AGTCACGGTCTCAAGCGGCGGAAGCTCTGGTGAACAGAAACTGATTTCAG
AAG
KTGRSVI#RGDDT#VYFVNDCIV#evqlvesggglvq
agdslrlscaasgKTGRSVImgwfrqapgkerefvatitRGDDTtnyvds
vkgrftisrddarntvylqmnslkpedtavyycaaVYFVNDCIVdywgqg
tqvtvss#GGAGATATACCATGGAAGTTCAACTGGTTGAATCTGGTGGCG
GTTTAGTTCAAGCCGGTGATAGCCTTCGTCTGAGCTGCGCCGCAAGCGGA
AAGACCGGTCGGAGCGTCATTATGGGTTGGTTTCGCCAGGCACCTGGTAA
AGAACGTGAATTTGTGGCAACCATTACCCGCGGGGATGACACTACCAACT
ATGTCGATTCTGTTAAAGGTCGCTTCACTATTTCACGCGATGATGCGCGT
AATACCGTGTACTTACAGATGAACTCACTGAAACCTGAGGATACCGCCGT
TTATTATTGTGCGGCAGTCTATTTTGTCAACGACTGCATTGTTGACTATT
GGGGTCAGGGCACACAAGTCACGGTCTCAAGCGGCGGAAGCTCTGGTGAA
CAGAAACTGATTTCAGAAG
KTGRSVI#RGDDT#VYFVNDC
IV#evqlvesggglvqagdslrlscaasgKTGRSVImgwfrqapgkeref
vatitRGDDTtnyadsvkgrftisrddarntvylqmntlkpedtavyyca
aVYFVNDCIVddwgqgtqvtvss#ATACCATGGAAGTTCAACTGGTTGAA
TCTGGTGGCGGTTTAGTTCAAGCCGGTGATAGCCTTCGTCTGAGCTGCGC
CGCAAGCGGAAAGACCGGTCGGAGCGTCATTATGGGTTGGTTTCGCCAGG
CACCTGGTAAAGAACGTGAATTTGTGGCAACCATTACCCGCGGGGATGAC
ACTACCAACTATGCCGATTCTGTTAAAGGTCGCTTCACTATTTCACGCGA
TGATGCGCGTAATACCGTGTACTTACAGATGAACACACTGAAACCTGAGG
ATACCGCCGTTTATTATTGTGCGGCAGTCTATTTTGTCAACGACTGCATT
GTTGACGATTGGGGTCAGGGCACACAAGTCACGGTCTCAAGCGGCGGAAG
CTCTGATGAACAGAAACGGATTTCAGAAG
KTGRSVI#RGD
DT#VYFVNDCIV#evqlfesggglvqagdslrlscaasgKTGRSVImgwf
rqapgkerefvatitRGDDTtnyadsvkgrftisrddarntvylqmnslk
pedtavyycaaVYFVNDCIVdywgqgtqvtvss#ATATACCATGGAAGTT
CAACTGTTTGAATCTGGTGGCGGTTTAGTTCAAGCCGGTGATAGCCTTCG
TCTGAGCTGCGCCGCAAGCGGAAAGACCGGTCGGAGCGTCATTATGGGTT
GGTTTCGCCAGGCACCTGGTAAAGAACGTGAATTTGTGGCAACCATTACC
CGCGGGGATGACACTACCAACTATGCCGATTCTGTTAAAGGTCGCTTCAC
TATTTCACGCGATGATGCGCGTAATACCGTGTACTTACAGATGAACTCAC
TGAAACCTGAGGATACCGCCGTTTATTATTGTGCGGCAGTCTATTTTGTC
AACGACTGCATTGTTGACTATTGGGGTCAGGGCACACAAGTCACGGTCTC
AAGCGGCGGAAGCTCTGGTGAACAGAAACTGATTTCAGAAG
KTGRSVI#RGDDT#VYFVNDCIV#evqlvesggglvqagdslrlscaas
gKTGRSVImgwfrqapgkerefvatitRGDDTtnyadsvkgrftisrdda
rntvylqmnslkpedtavyycaaVYFVNDCIVeyggqgtqvtvas#ATAC
CATGGAAGTTCAACTGGTTGAATCTGGTGGCGGTTTAGTTCAAGCCGGTG
ATAGCCTTCGTCTGAGCTGCGCCGCAAGCGGAAAGACCGGTCGGAGCGTC
ATTATGGGTTGGTTTCGCCAGGCACCTGGTAAAGAACGTGAATTTGTGGC
AACCATTACCCGCGGGGATGACACTACCAACTATGCCGATTCTGTTAAAG
GTCGCTTCACTATTTCACGCGATGATGCGCGTAATACCGTGTACTTACAG
ATGAACTCACTGAAACCTGAGGATACCGCCGTTTATTATTGTGCGGCAGT
CTATTTTGTCAACGACTGCATTGTTGAATATGGGGGTCAGGGCACACAAG
TCACGGTCGCAAGCGGCGGAAGCTCTGGTGAACAGAAACTGATTTCAGAA
G
KTGRSVI#RGDDT#VYFVNDCIV#evqlvepggglvqag
dslrlscaasgKTGRSVImgwfrqapgkerefaatitRGDDTtnyadsvk
grftisrddarntvylqmnslkpedtavyycaaVYFVNDCIVdywgqgtq
vtvss#ATATACCATGGAAGTTCAACTGGTTGAACCTGGTGGCGGTTTAG
TTCAAGCCGGTGATAGCCTTCGTCTGAGCTGCGCCGCAAGCGGAAAGACC
GGTCGGAGCGTCATTATGGGTTGGTTTCGCCAGGCACCTGGCAAAGAACG
TGAATTTGCGGCAACCATTACCCGCGGGGATGACACTACCAACTATGCCG
ATTCTGTTAAAGGTCGCTTCACTATTTCACGCGATGATGCGCGTAATACC
GTGTACTTACAGATGAACTCACTGAAACCTGAGGATACCGCCGTTTATTA
TTGTGCGGCAGTCTATTTTGTCAACGACTGCATTGTTGACTATTGGGGTC
AGGGCACACAAGTCACGGTCTCAAGCGGCGGAAGCTCTGGTGAACAGAAA
CTGATTTCAGAAG
KTGRSVI#RGDET#VYFVNDCIV#evq
lvesggdliqdgdslrlscaasgKTGRSVImgwfrqapgkerefaatitR
GDETtnyadsvkgrftisrddarntvylqmnslkpedtavyycaaVYFVN
DCIVdywcqgtqvtvsr#ATATACCATGGAAGTTCAACTGGTTGAATCTG
GTGGCGATTTAATTCAAGACGGTGATAGCCTTCGTCTGAGCTGCGCCGCA
AGCGGAAAGACCGGTCGGAGCGTCATTATGGGTTGGTTTCGCCAGGCACC
TGGCAAAGAACGTGAATTTGCGGCAACCATTACCCGCGGGGATGAAACTA
CCAACTATGCCGATTCTGTTAAAGGTCGCTTCACTATTTCACGCGATGAT
GCGCGTAATACCGTGTACTTACAGATGAACTCACTGAAACCTGAGGATAC
CGCCGTTTATTATTGTGCGGCAGTCTATTTTGTCAACGACTGCATTGTTG
ACTATTGGTGTCAGGGCACACAAGTCACGGTCTCACGCGGCGGAAGCTCT
TTTGAACAGAAACTGATTTCAGAAG
KTGRSVI#RGDDT#V
YFVNDCIV#evqlvesggglvqagdslrlrcaasgKTGRSVImgwfrqap
gkerefvatitRGDDTtnyadsvksrftisrddarntvylqmnslkpedt
avyycaaVYFVNDCIVdywcqgtqvtvss#ACCATGGAAGTTCAACTGGT
TGAATCTGGTGGCGGTTTAGTTCAAGCCGGTGATAGCCTTCGTCTGAGAT
GCGCCGCAAGCGGAAAGACCGGTCGGAGCGTCATTATGGGTTGGTTTCGC
CAGGCACCTGGTAAAGAACGTGAATTTGTGGCAACCATTACCCGCGGGGA
TGACACTACCAACTATGCCGATTCTGTTAAAAGTCGCTTCACTATTTCAC
GCGATGATGCGCGTAATACCGTGTACTTACAGATGAACTCACTGAAACCT
GAGGATACCGCCGTTTATTATTGTGCGGCAGTCTATTTTGTCAACGACTG
CATTGTTGACTATTGGTGTCAGGGCACACAAGTCACGGTCTCAAGCGGCG
GAAGCTCTTTTGAACAGACACTGATTTCAGAAG
IGERC
LF#AFSFR#VYFVNDCIV#evqlvesggglvqagdslrlscaasgIGERC
LFmgwfrqapgkerefvaaitAFSFRtyyadsvkgrftisrddarntvyl
qmnslkpedtavyycaaVYFVNDCIVdywgqgtqvtvss#GGAGATATAC
CATGGAAGTTCAACTGGTTGAATCTGGTGGCGGTTTAGTTCAAGCCGGTG
ATAGCCTTCGTCTGAGCTGCGCCGCAAGCGGAATCGGCGAGCGTTGTTTG
TTTATGGGTTGGTTTCGCCAGGCACCTGGTAAAGAACGTGAATTTGTGGC
AGCCATTACCGCGTTTAGTTTTCGGACCTACTATGCCGATTCTGTTAAAG
GTCGCTTCACTATTTCACGCGATGATGCGCGTAATACCGTGTACTTACAG
ATGAACTCACTGAAACCTGAGGATACCGCCGTTTATTATTGTGCGGCAGT
CTATTTTGTCAACGACTGCATTGTTGACTATTGGGGTCAGGGCACACAAG
TCACGGTCTCAAGCGGCGGAAGCTCTGGTGAACAGAAACTGATTTCAGAA
G
KTGRSVI#RGDDT#IVLLTNLGLC#evqlvesggglvqa
gdslrlscaasgKTGRSVImgwfrqapgkerefvatitRGDDTtnyadsv
kgrftisrddarntvylqmnslkpedtavyycarlVLLTNLGLCdywgqg
tqvtvsr#GAAGGAGATATACCATGGAAGTTCAACTGGTTGAATCTGGTG
GCGGTTTAGTTCAAGCCGGTGATAGCCTTCGTCTGAGCTGTGCCGCAAGC
GGAAAGACCGGTCGGAGCGTCATTATGGGTTGGTTTCGCCAGGCACCTGG
TAAAGAACGTGAATTTGTGGCAACCATTACCCGCGGGGATGACACTACCA
ACTATGCCGATTCTGTTAAAGGTCGCTTCACTATTTCACGCGATGATGCG
CGTAATACCGTGTACTTACAGATGAACTCACTGAAACCTGAGGATACCGC
CGTTTATTATTGTGCGCGTATTGTGCTCCTGACTAACCTTGGCCTCTGCG
ACTATTGGGGTCAGGGCACACAAGTCACGGTCTCACGCGGCGGAAGCTCT
GGTGAACAGAAACTGATTTCAGAAG
KTGRSVI#RGDDT#V
YFVNDCIV#evqlvesggglvqasdslrlscaasgKTGRSVImgwfrqap
gkerefvatitRGDDTtnyadsvkgrftisrddarntvylqmnslkpedt
avyycaaVYFVNDCIVdywgqgtqvtvss#ATATACCATGGAAGTTCAAC
TGGTTGAATCTGGTGGCGGTTTAGTTCAAGCCAGTGATAGCCTTCGTCTG
AGCTGCGCCGCAAGCGGAAAGACCGGTCGGAGCGTCATTATGGGTTGGTT
TCGCCAGGCACCTGGTAAAGAACGTGAATTTGTGGCAACCATTACCCGCG
GGGATGACACTACCAACTATGCCGATTCTGTTAAAGGTCGCTTCACTATT
TCACGCGATGATGCGCGTAATACCGTGTACTTACAGATGAACTCACTGAA
ACCTGAGGATACCGCCGTTTATTATTGTGCGGCAGTCTATTTTGTCAACG
ACTGCATTGTTGACTATTGGGGTCAGGGCACACAAGTCACGGTCTCAAGC
GGCGGAAGCTCTGGTGAACAGAAACTGATTTCAGAAG
KTG
RSVI#RGDDT#VYFVNDCIV#evqlvesggglvqagdslrlscaasgKTG
RSVImgwfrqapgkerefvatitRGDDTtnyadsvksrftisrddarntv
ylqmnslkpedtavyycaaVYFVNDCIVdywgqgtqvtvss#AGATATAC
CATGGAAGTTCAACTGGTTGAATCTGGTGGCGGTTTAGTTCAAGCCGGTG
ATAGCCTTCGTCTGAGCTGCGCCGCAAGCGGAAAGACCGGTCGGAGCGTC
ATTATGGGTTGGTTTCGCCAGGCACCTGGTAAAGAACGTGAATTTGTGGC
AACCATTACCCGCGGGGATGACACTACCAACTATGCCGATTCTGTTAAAA
GTCGCTTCACTATTTCACGCGATGATGCGCGTAATACCGTGTACTTACAG
ATGAACTCACTGAAACCTGAGGATACCGCCGTTTATTATTGTGCGGCAGT
CTATTTTGTCAACGACTGCATTGTTGACTATTGGGGTCAGGGCACACAAG
TCACGGTCTCAAGCGGCGGAAGCTCTGGTGAACAGAAACTGATTTCAGAA
G
KTGRSVI#RGDDT#VYFVNDCIV#kvqlvesggglvqag
dslrlscaasgKTGRSVImgwfrqapgkerefvatitRGDDTtnyadsvk
grftisrddarntvylqmnslkpedtavyycaaVYFVNDCIVdywgqgtq
vtvss#ATATACCATGAAAGTTCAACTGGTTGAATCTGGTGGCGGTTTAG
TTCAAGCCGGTGATAGCCTTCGTCTGAGCTGCGCCGCAAGCGGAAAGACC
GGTCGGAGCGTCATTATGGGTTGGTTTCGCCAGGCACCTGGTAAAGAACG
TGAATTTGTGGCAACCATTACCCGCGGGGATGACACTACCAACTATGCCG
ATTCTGTTAAAGGTCGCTTCACTATTTCACGCGATGATGCGCGTAATACC
GTGTACTTACAGATGAACTCACTGAAACCTGAGGATACCGCCGTTTATTA
TTGTGCGGCAGTCTATTTTGTCAACGACTGCATTGTTGACTATTGGGGTC
AGGGCACACAAGTCACGGTCTCAAGCGGCGGAAGCTCTGGTGAACAGAAA
CTGATTTCAGAAG
KTGRSVI#RGDDT#VYFVNDCIV#evq
lvesggglvqagdslrlscaasgKTGRSVImgwfrqapgkerefvatitR
GDDTtnyadsvkgrftisrddacntvylqmnslkpedtavyycaaVYFVN
DCIVdywgqgtqvtvss#ATACCATGGAAGTTCAACTGGTTGAATCTGGT
GGCGGTTTAGTTCAAGCCGGTGATAGCCTTCGTCTGAGCTGCGCCGCAAG
CGGAAAGACCGGTCGGAGCGTCATTATGGGTTGGTTTCGCCAGGCACCTG
GTAAAGAACGTGAATTTGTGGCAACCATTACCCGCGGGGATGACACTACC
AACTATGCCGATTCTGTTAAAGGTCGCTTCACTATTTCACGCGATGATGC
GTGTAATACCGTGTACTTACAGATGAACTCACTGAAACCTGAGGATACCG
CCGTTTATTATTGTGCGGCAGTCTATTTTGTCAACGACTGCATTGTTGAC
TATTGGGGTCAGGGCACACAAGTCACGGTCTCAAGCGGCGGAAGCTCTGG
TGAACAGAAACTGATTTCAGAAG
KTGRSVI#RGDDT#VYF
VNDCIV#evqlfesggglvqagdslrlscaasgKTGRSVImgwfrqapgk
erefvapitRGDDTtnyadsvkgrftisrddarntvylqmnslkpedtav
yycaaVYFVNDCIVdywgqgtqvtvss#ATATACCATGGAAGTTCAACTG
TTTGAATCTGGTGGCGGTTTAGTTCAAGCCGGTGATAGCCTTCGTCTGAG
CTGCGCCGCAAGCGGAAAGACCGGTAGGAGCGTCATTATGGGTTGGTTTC
GCCAGGCACCTGGTAAAGAACGTGAATTTGTGGCACCCATTACCCGCGGG
GATGACACTACCAACTATGCCGATTCTGTTAAAGGTCGCTTCACTATTTC
ACGCGATGATGCGCGTAATACCGTGTACTTACAGATGAACTCACTGAAAC
CTGAGGATACCGCCGTTTATTATTGTGCGGCAGTCTATTTTGTCAACGAC
TGCATTGTTGACTATTGGGGTCAGGGCACACAAGTCACGGTCTCAAGCGG
CGGAAGCTCTGGTGAACAGAAACTGATTTCAGAAG
KTGRS
VI#RGDDT#VYFVNDCIV#evqlvesggglvqagdnlrlscvasgKTGRS
VImgwfrqapgkerefvatitRGDDTtnyadsvkgrftisrddarntvyl
qmnslkpedtavyycaaVYFVNDCIVdywgqgtqvtvss#AGGAGATATA
CCATGGAAGTTCAACTGGTTGAATCTGGTGGCGGTTTAGTTCAAGCCGGT
GATAACCTTCGTCTGAGCTGCGTCGCAAGCGGAAAGACCGGTCGGAGCGT
CATTATGGGTTGGTTTCGCCAGGCACCTGGTAAAGAACGTGAATTTGTGG
CAACCATTACCCGCGGGGATGACACTACCAACTATGCCGATTCTGTTAAA
GGTCGCTTCACTATTTCACGCGATGATGCGCGTAATACCGTGTACTTACA
GATGAACTCACTGAAACCTGAGGATACCGCCGTTTATTATTGTGCGGCAG
TCTATTTTGTCAACGACTGCATTGTTGACTATTGGGGTCAGGGCACACAA
GTCACGGTCTCAAGCGGCGGAAGCTCTGGTGAACAGAAACTGATTTCAGA
AG
KTGRSVI#RGDDT#VYFVNDCIV#evqlvesggglvqa
gdslrlscaasgKTGRSVImgwfrqapgkerefvatltRGDDTtnyadsv
kgrftisrddarntvylqmnslkpedtavyycaaVYFVNDCIVdywgqgt
qvtvss#ACCATGGAAGTTCAACTGGTTGAATCTGGTGGCGGTTTAGTTC
AAGCCGGTGATAGCCTTCGTCTGAGCTGCGCCGCAAGCGGAAAGACCGGT
CGGAGCGTCATTATGGGTTGGTTTCGCCAGGCACCTGGTAAAGAACGTGA
ATTTGTGGCAACCCTTACCCGCGGGGATGACACTACCAACTATGCCGATT
CTGTTAAAGGTCGCTTCACTATTTCACGCGATGATGCGCGTAATACCGTG
TACTTACAGATGAACTCACTGAAACCTGAGGATACCGCCGTTTATTATTG
TGCGGCAGTCTATTTTGTCAACGACTGCATTGTTGACTATTGGGGTCAGG
GCACACAAGTCACGGTCTCAAGCGGCGGAAGCTCTGGTGAACAGAAACTG
ATTTCAGAAG
KTGRSVI#RGDDT#VYFVNDCIV#evqlve
sggglvqagdslrlscaargKTGRSVImgwfrqapgkerelvatitRGDD
TtnyadsvkgrftisrdearntvylqmnslkpedtavyycaaVYFVNDCI
Vaywgqgtqvtvss#ACCATGGAAGTTCAACTGGTTGAATCTGGTGGCGG
TTTAGTTCAAGCCGGTGATAGCCTTCGTCTGAGCTGCGCCGCAAGAGGAA
AGACCGGTCGAAGCGTCATTATGGGTTGGTTTCGCCAGGCACCTGGTAAA
GAACGTGAATTGGTGGCAACCATTACCCGCGGGGATGACACTACCAACTA
TGCCGATTCTGTTAAAGGTCGCTTCACTATTTCACGCGATGAGGCGCGTA
ATACCGTGTACTTACAGATGAACTCACTGAAACCTGAGGATACCGCCGTT
TATTATTGTGCGGCAGTCTATTTTGTCAACGACTGCATTGTTGCCTATTG
GGGCCAGGGCACACAAGTCACGGTCTCAAGCGGCGGAAGCTCTGGTGAAC
AGAAACTGATTTCAGAAG
KTGRSVI#RGDDT#VYFVNDCI
V#evqlvesggglvqagdrlrlscaasgKTGRSVImgwfrqapgkerefv
atitRGDDTtnyadsvkgrftisrddarntvylqmnslkpedtavyycaa
VYFVNDCIVdywgqgtqvtvss#GAAGGAGATATACCATGGAAGTTCAAC
TGGTTGAATCTGGTGGCGGTTTAGTTCAAGCCGGTGATCGCCTTCGTCTG
AGCTGCGCCGCAAGCGGAAAGACCGGTCGGAGCGTCATTATGGGTTGGTT
TCGCCAGGCACCTGGTAAAGAACGTGAATTTGTGGCAACCATTACCCGCG
GGGATGACACTACCAACTATGCCGATTCTGTTAAAGGTCGCTTCACTATT
TCACGCGATGATGCGCGTAATACCGTGTACTTACAGATGAACTCACTGAA
ACCTGAGGATACCGCCGTTTATTATTGTGCGGCAGTCTATTTTGTCAACG
ACTGCATTGTTGACTATTGGGGTCAGGGCACACAAGTCACGGTCTCAAGC
GGCGGAAGCTCTGGTGAACAGAAACTGATTTCAGAAG
KTG
RSVI#RGDDT#VYFVNDCIV#evqlvesggglvhagdslrlscaasgKTG
RSVImgwfrqapgkerefvatitRGDDTtnyadsvkgrftisrddarntv
ylqmnslkpedtavyycaaVYFVNDCIVdywgqgtqvtvsr#GAAGGAGA
TATACCATGGAAGTTCAACTGGTTGAATCTGGTGGCGGTTTAGTTCACGC
CGGTGATAGCCTTCGTCTGAGCTGCGCCGCAAGCGGAAAGACCGGTCGGA
GCGTCATTATGGGTTGGTTTCGCCAGGCACCTGGTAAAGAACGTGAATTT
GTGGCAACCATTACCCGCGGGGATGACACTACCAACTATGCCGATTCTGT
TAAAGGTCGCTTCACTATTTCACGCGATGATGCGCGTAATACCGTGTACT
TACAGATGAACTCACTGAAACCTGAGGATACCGCCGTTTATTATTGTGCG
GCAGTCTATTTTGTCAACGACTGCATTGTTGACTATTGGGGTCAGGGCAC
ACAAGTCACGGTCTCACGCGGCGGAAGCTCTTGTGAACAGAAACTGATTT
CAGAAG
KTGRSVI#RGDDT#IVLLTNLGLC#evqlvesgg
glvqagdrlrlscaasgKTGRSVImgwfrqapgkerefvatitRGDDTtn
yadsvkgrftisrddarntvylqmnslkpedtavyycvrlVLLTNLGLCd
ywgqgtqvtvss#GAAGGAGATATACCATGGAAGTTCAACTGGTTGAATC
TGGTGGCGGTTTAGTTCAAGCCGGTGATCGCCTTCGTCTGAGCTGCGCCG
CAAGCGGAAAGACCGGTCGGAGCGTCATTATGGGTTGGTTTCGCCAGGCA
CCTGGTAAAGAACGTGAATTTGTGGCAACCATTACCCGCGGGGATGACAC
TACCAACTATGCCGATTCTGTTAAAGGTCGCTTCACTATTTCACGCGATG
ATGCGCGTAATACCGTGTACTTACAGATGAACTCACTGAAACCTGAGGAT
ACCGCCGTTTATTATTGTGTGCGTATTGTGCTCCTGACTAACCTTGGCCT
TTGCGACTATTGGGGTCAGGGCACACAAGTCACGGTCTCAAGCGGCGGAA
GCTCTGGTGAAAAGAAACTGATTTCAGAAGCCAA
KTGRSV
I#RGDDT#VYFVNDCIV#evqlvesggglvqagdslrlscaasgKTGRSV
ImgwfrqapgkerefvatitRGDDTtnyadsvkgrftisrddarntvylq
mnslkpedtavyycaaVYFVNDCIVdywgqgthvtvss#ATACCATGGAA
GTTCAACTGGTTGAATCTGGTGGCGGTTTAGTTCAAGCCGGTGATAGCCT
TCGTCTGAGCTGCGCCGCAAGCGGAAAGACCGGTCGGAGCGTCATTATGG
GTTGGTTTCGCCAGGCACCTGGTAAAGAACGTGAATTTGTGGCAACCATT
ACCCGCGGGGATGACACTACCAACTATGCCGATTCTGTTAAAGGTCGCTT
CACTATTTCACGCGATGATGCGCGTAATACCGTGTACTTACAGATGAACT
CACTGAAACCTGAGGATACCGCCGTTTATTATTGTGCGGCAGTCTATTTT
GTCAACGACTGCATTGTTGACTATTGGGGTCAGGGCACACATGTCACGGT
CTCAAGCGGCGGAAGCTCTGGTGAACAGAAACTGATTTCAGAAGCCAA
KTGRSVI#RGDDT#VYFVNDCIV#evqlvesggglvqagdsl
rlscaasgKTGRSVImgwfrqapgkerefvatitRGDDTtnyadsvkgrf
tisredarntvylqmnslkpedtavyycaaVYFVNDCIVdywgqgtqvtv
ss#AGATATACCATGGAAGTTCAACTGGTTGAATCTGGTGGCGGTTTAGT
TCAAGCCGGTGATAGCCTTCGTCTGAGCTGCGCCGCAAGCGGAAAGACCG
GTCGGAGCGTCATTATGGGTTGGTTTCGCCAGGCACCTGGTAAAGAACGT
GAATTTGTGGCAACCATTACCCGCGGGGATGACACTACCAACTATGCCGA
TTCTGTTAAAGGTCGCTTCACTATTTCACGCGAAGATGCGCGTAATACCG
TGTACTTACAGATGAACTCACTGAAACCTGAGGATACCGCCGTTTATTAT
TGTGCGGCAGTCTATTTTGTCAACGACTGCATTGTTGACTATTGGGGTCA
GGGCACACAAGTCACGGTCTCAAGCGGCGGAAGCTCTGGTGAAAAGAAAC
TGATTTCAGAAGCCAA
KTGRSVI#RGDDT#VYFVNDCIV#
evqlvesggglvqagdslrlscaasgKTGRSVImgwfrqapgkerefvat
itRGDDTtnyadsvkgrftisrddarntvylqmnslkpedtavyycaaVY
FVNDCIVdywgqgtqgtvss#AGATATACCATGGAAGTTCAACTGGTTGA
ATCTGGTGGCGGTTTAGTTCAAGCCGGTGATAGCCTTCGTCTGAGCTGCG
CCGCAAGCGGAAAGACCGGTCGGAGCGTCATTATGGGTTGGTTTCGCCAG
GCACCTGGTAAAGAACGTGAATTTGTGGCAACCATTACCCGCGGGGATGA
CACTACCAACTATGCCGATTCTGTTAAAGGTCGCTTCACTATTTCACGCG
ATGATGCGCGTAATACCGTGTACTTACAGATGAACTCACTGAAACCTGAG
GATACCGCCGTTTATTATTGTGCGGCAGTCTATTTTGTCAACGACTGCAT
TGTTGACTATTGGGGTCAGGGCACACAAGGCACGGTCTCAAGCGGCGGAA
GCTCTGGTGAACAGAAACTGATTTCAGAAGCCAA
KTGRSV
I#RGDDT#VYFVNDCIV#evqlvesggglvqagdslrlscaasgKTGRSV
ImgwfrqapgkerefvatitRGDDTtnyadsvkgrftisrddardtvylq
mnslkpedtavyycaaVYFVNDCIVdywgqgtqvtvss#GGAGATATACC
ATGGAAGTTCAACTGGTTGAATCTGGTGGCGGTTTAGTTCAAGCCGGTGA
TAGCCTTCGTCTGAGCTGCGCCGCAAGCGGAAAGACCGGTCGGAGCGTCA
TTATGGGTTGGTTTCGCCAGGCACCTGGTAAAGAACGTGAATTTGTGGCA
ACCATTACCCGCGGGGATGACACTACCAACTATGCCGATTCTGTTAAAGG
TCGCTTCACTATTTCACGCGATGATGCGCGTGATACCGTGTACTTACAGA
TGAACTCACTGAAACCTGAGGATACCGCCGTTTATTATTGTGCGGCAGTC
TATTTTGTCAACGACTGCATTGTTGACTATTGGGGTCAGGGCACACAAGT
CACGGTCTCAAGCGGCGGAAGCTCTGGTGAACAGAAACTGATTTCAGAAG
CCAA
KTGRSVI#RGDDT#IVLLTNLGLC#evqlvesgggl
vqagdslrlscaasgKTGRSVImgwfrqapgkerefvatitRGDDTtnya
dsvkgrftisrddarntvylqmnslkpedtavyycarlVLLTNLGLCdyw
gqgtqgtvss#AGATATACCATGGAAGTTCAACTGGTTGAATCTGGTGGC
GGTTTAGTTCAAGCCGGTGATAGCCTTCGTCTGAGCTGCGCCGCAAGCGG
AAAGACCGGTCGGAGCGTCATTATGGGTTGGTTTCGCCAGGCACCTGGTA
AAGAACGTGAATTTGTGGCAACCATTACCCGCGGGGATGACACTACCAAC
TATGCCGATTCTGTTAAAGGTCGCTTCACTATTTCACGCGATGATGCGCG
TAATACCGTGTACTTACAGATGAACTCACTGAAACCTGAGGATACCGCCG
TTTATTATTGTGCGCGTATTGTGCTCCTGACTAACCTTGGCCTCTGCGAC
TATTGGGGTCAGGGCACACAAGGCACGGTCTCAAGCGGCGGAAGCTCTGG
TGAACAGAAACTGATTTCAGAAGCCAA
QSGKGCR#RGD
DT#VYFVNDCIV#evqlvesggglvqagdslrlscaasgQSGKGCRmgwf
rqapgkerefvatitRGDDTtnyadsvkgrftisrddarntvylqmnslk
pedtavyycaaVYFVNDCIVdywgqgtqgtvss#ATACCATGGAAGTTCA
ACTGGTTGAATCTGGTGGCGGTTTAGTTCAAGCCGGTGATAGCCTTCGTC
TGAGCTGCGCCGCAAGCGGACAGAGTGGCAAGGGTTGCCGGATGGGTTGG
TTTCGCCAGGCACCTGGTAAAGAACGTGAATTTGTGGCAACCATTACCCG
CGGGGATGACACTACCAACTATGCCGATTCTGTTAAAGGTCGCTTCACTA
TTTCACGCGATGATGCGCGTAATACCGTGTACTTACAGATGAACTCACTG
AAACCTGAGGATACCGCCGTTTATTATTGTGCGGCAGTCTATTTTGTCAA
CGACTGCATTGTTGACTATTGGGGTCAGGGCACACAAGGCACGGTCTCAA
GCGGCGGAAGCTCTGGTGAACAGAAACTGATTTCAGAAGCCAA
KTGRSVI#RGDDT#VYFVNDCIV#qvqlvesggglvqagdslrlsc
aasgKTGRSVImgwfrqapgkerefvatitRGDDTtnyadsvkgrftisr
ddarntvylqmnslkpedtavyycaaVYFVNDCIVdywgqgtqgtvss#A
AGGAGATATACCATGCAGGTTCAACTGGTTGAATCTGGTGGCGGTTTAGT
TCAAGCCGGTGATAGCCTTCGTCTGAGCTGCGCCGCAAGCGGAAAGACCG
GTCGGAGCGTCATTATGGGTTGGTTTCGCCAGGCACCTGGTAAAGAACGT
GAATTTGTGGCAACCATTACCCGCGGGGATGACACTACCAACTATGCCGA
TTCTGTTAAAGGTCGCTTCACTATTTCACGCGATGATGCGCGTAATACCG
TGTACTTACAGATGAACTCACTGAAACCTGAGGATACCGCCGTTTATTAT
TGTGCGGCAGTCTATTTTGTCAACGACTGCATTGTTGACTATTGGGGTCA
GGGCACACAAGGCACGGTCTCAAGCGGCGGAAGCTCTGGTGAACAGAAAC
TGATTTCAGAAGCCAA
KTGRSVI#RGDDT#VYFVNDCIVevqlvesggglvkagdslrlscaasgK
TGRSVImgwfrqapgkerefva
titRGDDTtnyadsvkgrftisrddarntvylqmnslkpedtavyycaaV
YFVNDCIVdywgqgtqvtvss#GGAGATATACCATGGAAGTTCAACTGGT
TGAATCTGGTGGCGGTTTAGTTAAAGCCGGTGATAGCCTTCGTCTGAGCT
GCGCCGCAAGCGGAAAGACCGGTCGGAGCGTCATTATGGGTTGGTTTCGC
CAGGCACCTGGTAAAGAACGTGAATTTGTGGCAACCATTACCCGCGGGGA
TGACACTACCAACTATGCCGATTCTGTTAAAGGTCGCTTCACTATTTCAC
GCGATGATGCGCGTAATACCGTGTACTTACAGATGAACTCACTGAAACCT
GAGGATACCGCCGTTTATTATTGTGCGGCAGTCTATTTTGTCAACGACTG
CATTGTTGACTATTGGGGTCAGGGCACACAAGTCACGGTCTCAAGCGGCG
GAAGCTCTGGTGAACAGAAACTGATTTCAGAAGCCAA
K
TGRSVL#RGDDT#IVLLTNLGLC#evqlvesggglvqagdslrlscaasg
KTGRSVLmgwfrqapgkerefvatitRGDDTtnyadsvkgrftisrddar
ntvylqmnslkpedtavyycarlVLLTNLGLCdywgqgtqvtvss#GGAG
ATATACCATGGAAGTTCAACTGGTTGAATCTGGTGGCGGTTTAGTTCAAG
CCGGTGATAGCCTTCGTCTGAGCTGCGCCGCAAGCGGAAAGACCGGTCGG
AGCGTCCTTATGGGTTGGTTTCGCCAGGCACCTGGTAAAGAACGTGAATT
TGTGGCAACCATTACCCGCGGGGATGACACTACCAACTATGCCGATTCTG
TTAAAGGTCGCTTCACTATTTCACGCGATGATGCGCGTAATACCGTGTAC
TTACAGATGAACTCACTGAAACCTGAGGATACCGCCGTTTATTATTGTGC
GCGTATTGTGCTCCTGACTAACCTTGGCCTCTGCGACTATTGGGGTCAGG
GCACACAGGTCACGGTCTCAAGCGGCGGAAGCTCTGGTGAACAGAAACTG
ATTTCAGAAGCCAA
KTGRSVI#RGDDT#VYFVNDCIV#e
vqlvesggvlvqagdslrlscaasgKTGRSVImgwfrqapgkerefvati
tRGDDTtnyadsvkgrftisrddarntvylqmnslkpedtavyycaaVYF
VNDCIVdywgqgtqvtvss#AAGGAGATATACCATGGAAGTTCAACTGGT
TGAATCTGGTGGCGTTTTAGTTCAAGCCGGTGATAGCCTTCGTCTGAGCT
GCGCCGCAAGCGGAAAGACCGGTCGGAGCGTCATTATGGGTTGGTTTCGC
CAGGCACCTGGTAAAGAACGTGAATTTGTGGCAACCATTACCCGCGGGGA
TGACACTACCAACTATGCCGATTCTGTTAAAGGTCGCTTCACTATTTCAC
GCGATGATGCGCGTAATACCGTGTACTTACAGATGAACTCACTGAAACCT
GAGGATACCGCCGTTTATTATTGTGCGGCAGTCTATTTTGTCAACGACTG
CATTGTTGACTATTGGGGTCAGGGCACACAAGTCACGGTCTCAAGCGGCG
GAAGCTCTGGTGAACAGAAACTGATTTCAGAAGCCAA
KT
GRSVI#RGDDT#VYFVNDCIV#qvqlqesggglvqagdslrlscaasgKT
GRSVImgwfrqapgkerefvatitRGDDTtnyadsvkgrftisrddarnt
vylqmnslkpedtavyycaaVYFVNDCIVdywgqgtqgtvss#ACCATGC
AGGTTCAACTGCAAGAATCTGGTGGCGGTTTAGTTCAAGCCGGTGATAGC
CTTCGTCTGAGCTGCGCCGCAAGCGGAAAGACCGGTCGGAGCGTCATTAT
GGGTTGGTTTCGCCAGGCACCTGGTAAAGAACGTGAATTTGTGGCAACCA
TTACCCGCGGGGATGACACTACCAACTATGCCGATTCTGTTAAAGGTCGC
TTCACTATTTCACGCGATGATGCGCGTAATACCGTGTACTTACAGATGAA
CTCACTGAAACCTGAGGATACCGCCGTTTATTATTGTGCGGCAGTCTATT
TTGTCAACGACTGCATTGTTGACTATTGGGGTCAGGGCACACAAGGCACG
GTCTCAAGCGGCGGAAGCTCTGGTGAAAAGAAACTGATTTCAGAAGCCAA
KTGRSVL#RGDDT#VYFVNDCIV#evqlvesggglvqa
gdslrlscaasgKTGRSVLmgwfrqapgkerefvatitRGDDTtnyadsv
kgrftisrddarntvylqmnslkpedtavyycaaVYFVNDCIVdywgqgt
qvtvss#GGAGATATACCATGGAAGTTCAACTGGTTGAATCTGGTGGCGG
TTTAGTTCAAGCCGGTGATAGCCTTCGTCTGAGCTGCGCCGCAAGCGGAA
AGACCGGTCGGAGCGTCCTTATGGGTTGGTTTCGCCAGGCACCTGGTAAA
GAACGTGAATTTGTGGCAACCATTACCCGCGGGGATGACACTACCAACTA
TGCCGATTCTGTTAAAGGTCGCTTCACTATTTCACGCGATGATGCGCGTA
ATACCGTGTACTTACAGATGAACTCACTGAAACCTGAGGATACCGCCGTT
TATTATTGTGCGGCAGTCTATTTTGTCAACGACTGCATTGTTGACTATTG
GGGTCAGGGCACACAAGTCACGGTCTCAAGCGGCGGAAGCTCTGGTGAAC
AGAAACTGATTTCAGAAGCCAA
KTGRSVI#RGDDT#VYF
VNDCIV#evqlvesggglvqagdslrlscaasgKTGRSVImgwfrqapgk
erefvatitRGDDTtnyadsvkgrftisrddarntvylqmnslkpediav
yycaaVYFVNDCIVdywgqgtqgtvss#AGGAGATATACCATGGAAGTTC
AACTGGTTGAATCTGGTGGCGGTTTAGTTCAAGCCGGTGATAGCCTTCGT
CTGAGCTGCGCCGCAAGCGGAAAGACCGGTCGGAGCGTCATTATGGGTTG
GTTTCGCCAGGCACCTGGTAAAGAACGTGAATTTGTGGCAACCATTACCC
GCGGGGATGACACTACCAACTATGCCGATTCTGTTAAAGGTCGCTTCACT
ATTTCACGCGATGATGCGCGTAATACCGTGTACTTACAGATGAACTCACT
GAAACCTGAGGATATCGCCGTTTATTATTGTGCGGCAGTCTATTTTGTCA
ACGACTGCATTGTTGACTATTGGGGTCAGGGCACACAAGGCACGGTCTCA
AGCGGCGGAAGCTCTGGTGAAAAGAAACTGATTTCAGAAGCCAA
KTGRSVI#RGDDT#IVLLTNLGLC#evqlvesggglvqagdslrl
scaasgKTGRSVImgwfrqapgkerefvatitRGDDTtnyadsvkgrfti
srddacntvylqmnslkpedtavyycarlVLLTNLGLCdywgqgtqvtvs
s#ACCATGGAAGTTCAACTGGTTGAATCTGGTGGCGGTTTAGTTCAAGCC
GGTGATAGCCTTCGTCTGAGCTGCGCCGCAAGCGGAAAGACCGGTCGGAG
CGTCATTATGGGTTGGTTTCGCCAGGCACCTGGTAAAGAACGTGAATTTG
TGGCAACCATTACCCGCGGGGATGACACTACCAACTATGCCGATTCTGTT
AAAGGTCGCTTCACTATTTCACGCGATGATGCGTGTAATACCGTGTACTT
ACAGATGAACTCACTGAAACCTGAGGATACCGCCGTTTATTATTGTGCGC
GTATTGTGCTCCTGACTAACCTTGGCCTCTGCGACTATTGGGGTCAGGGC
ACACAAGTCACGGTCTCAAGCGGCGGAAGCTCTGGTGAACAGAAACTGAT
TTCAGAAGCCAA

TABLE 2
Sequences belonging to cluster SR2.
Each line in the table represents one sequence,
both segments and full length of the sequence
are shown. Shown items are divided by “#” and in
the order from start to end of each line is:CDR1
amino acid sequence, CDR2 amino acid sequence,
CDR3 amino acid sequence, full-length amino acid
sequence with CDRs capitalized, full-length
DNA sequence.
(SEQ ID NOS: 196-400)

AFGSNVF#PHHTV#AIYRNASVL#evqlvesggglvqagdslrlscaasg
AFGSNVFmgwfrqapgkerefvasitPHHTVtdyadsvrgrfsisadsak
ntvylqmnslkpedtavyycaaAIYRNASVLdywgqgtqvtvss#ATACC
ATGGAAGTTCAACTGGTTGAATCTGGTGGCGGTTTAGTTCAAGCCGGTGA
TAGCCTTCGTCTGAGCTGCGCCGCAAGCGGAGCTTTCGGTTCTAACGTTT
TCATGGGTTGGTTTCGCCAGGCACCTGGTAAAGAACGTGAATTTGTGGCA
TCCATTACCCCTCATCACACGGTCACCGACTATGCCGATTCTGTTCGTGG
TCGCTTCAGCATTTCAGCAGATTCTGCGAAGAATACCGTGTACTTACAGA
TGAACTCACTGAAACCTGAGGATACCGCCGTTTATTATTGTGCGGCAGCC
ATTTATAGGAACGCGTCGGTTTTGGACTATTGGGGTCAGGGCACACAAGT
CACGGTCTCAAGCGGCGGAAGCTCTGGTGAACAGAAACTGATTTCAGAAG
AFGSNVF#PHHTV#AIYRNASVL#evqlfesggglvqagdslrlscaasg
AFGSNVFmgwfrqapgkerefvasitPHHTVtdyadsvrgrfsisadsak
ntvylqmnslkpedtavyycaaAIYRNASVLdywgqgtqvtvss#AGATA
TACCATGGAAGTTCAACTGTTTGAATCTGGTGGCGGTTTAGTTCAAGCCG
GTGATAGCCTTCGTCTGAGCTGCGCCGCAAGCGGAGCTTTCGGTTCTAAC
GTTTTCATGGGTTGGTTTCGCCAGGCACCTGGTAAAGAACGTGAATTTGT
GGCATCCATTACCCCTCATCACACGGTCACCGACTATGCCGATTCTGTTC
GTGGTCGCTTCAGCATTTCAGCAGATTCTGCGAAGAATACCGTGTACTTA
CAGATGAACTCACTGAAACCTGAGGATACCGCCGTTTATTATTGTGCGGC
AGCCATTTATAGGAACGCGTCGGTTTTGGACTATTGGGGTCAGGGCACAC
AAGTCACGGTCTCAAGCGGCGGAAGCTCTGGTGAACAGAAACTGATTTCA
GAAG
AFGSNVF#PHHTV#AIYRNASVL#evqlvesggglvqagdrlrlscaasg
AFGSNVFmgwfrqapgkerefvasitPHHTVtdyadsvrgrfsisadsak
ntvylqmnslkpedtavyycaaAIYRNASVLdywgqgtqvtvss#GAAGG
AGATATACCATGGAAGTTCAACTGGTTGAATCTGGTGGCGGTTTAGTTCA
AGCCGGTGATCGCCTTCGTCTGAGCTGCGCCGCAAGCGGAGCTTTCGGTT
CTAACGTTTTCATGGGTTGGTTTCGCCAGGCACCTGGTAAAGAACGTGAA
TTTGTGGCATCCATTACCCCTCATCACACGGTCACCGACTATGCCGATTC
TGTTCGTGGTCGCTTCAGCATTTCAGCAGATTCTGCGAAGAATACCGTGT
ACTTACAGATGAACTCACTGAAACCTGAGGATACCGCCGTTTATTATTGT
GCAGCAGCCATTTATAGGAACGCGTCGGTTTTGGACTATTGGGGTCAGGG
CACACAAGTCACGGTCTCAAGCGGCGGAAGCTCTGGTGAACAGAAACTGA
TTTCAGAAG
AFGSNVF#PHHTV#AIYRNASVL#evqlvesggglvqagdslrlscaasg
AFGSNVFmgwfrqapgkerefvasitPHHTVtdyadsvrgrfsisadsak
ntvylqmnslkpedtavyycvaAIYRNASVLdywgqgtqvtvss#ATACC
ATGGAAGTTCAACTGGTTGAATCTGGTGGCGGTTTAGTTCAAGCCGGTGA
TAGCCTTCGTCTGAGCTGCGCCGCAAGCGGAGCTTTCGGTTCTAACGTTT
TCATGGGTTGGTTTCGCCAGGCACCTGGTAAAGAACGTGAATTTGTGGCA
TCCATTACCCCTCATCACACGGTCACCGACTATGCCGATTCTGTTCGTGG
TCGCTTCAGCATTTCAGCAGATTCTGCGAAGAATACCGTGTACTTACAGA
TGAACTCACTGAAACCTGAGGATACCGCCGTTTATTATTGTGTGGCAGCC
ATTTATAGGAACGCGTCGGTTTTGGACTATTGGGGTCAGGGCACACAAGT
CACGGTCTCAAGCGGCGGAAGCTCTGGTGAACAGAAACTGATTTCAGAAG
AFGSNVF#PHHTV#AIYRNASVL#evqlvesggglvqagdslrlrcaasg
AFGSNVFmgwfrqapgkerefvasitPHHTVtdyadsvrgrfsisadsak
ntvylqmnslkpedtavyycaaAIYRNASVLdywgqgtqvtvss#AGGAG
ATATACCATGGAAGTTCAACTGGTTGAATCTGGTGGCGGTTTAGTTCAAG
CCGGTGATAGCCTTCGTCTGCGCTGCGCCGCAAGCGGAGCTTTCGGTTCT
AACGTTTTCATGGGTTGGTTTCGCCAGGCACCTGGTAAAGAACGTGAATT
TGTGGCATCCATTACCCCTCATCACACGGTCACCGACTATGCCGATTCTG
TTCGTGGTCGCTTCAGCATTTCAGCAGATTCTGCGAAGAATACCGTGTAC
TTACAGATGAACTCACTGAAACCTGAGGATACCGCCGTTTATTATTGTGC
GGCAGCCATTTATAGGAACGCGTCGGTTTTGGACTATTGGGGTCAGGGCA
CACAAGTCACGGTCTCAAGCGGCGGAAGCTCTGGTGAACAGAAACTGATT
TCAGAAG
AFGSNVF#PHHTV#AIYRNASVL#evqlvesggglvqagdslrlscaasg
AFGSNVFmgwfrqapgkerefvasitPHHTVtdyadsvrgrfsisadsak
ntvylqmnslkpedtavyycaaAIYRNASVLaywgqgtqvtvss#ATATA
CCATGGAAGTTCAACTGGTTGAATCTGGTGGCGGTTTAGTTCAAGCCGGT
GATAGCCTTCGTCTGAGCTGCGCCGCAAGCGGAGCTTTCGGTTCTAACGT
TTTCATGGGTTGGTTTCGCCAGGCACCTGGTAAAGAACGTGAATTTGTGG
CATCCATTACCCCTCATCACACGGTCACCGACTATGCCGATTCTGTTCGT
GGTCGCTTCAGCATTTCAGCAGATTCTGCGAAGAATACCGTGTACTTACA
GATGAACTCACTGAAACCTGAGGATACCGCCGTTTATTATTGTGCGGCAG
CCATTTATAGGAACGCGTCGGTTTTGGCCTATTGGGGTCAGGGCACACAA
GTCACGGTCTCAAGCGGCGGAAGCTCTGGTGAACAGAAACTGATTTCAGA
AG
AFGSNVF#PHHTV#AIYRNASVL#evqlvesggglvqagdslrlscaasg
AFGSNVFmgwfrqapgkerefvasitPHHTVtdyadsvrgrfsisadsak
itvylqmnslkpedtavyycaaAIYRNASVLdywgqgtqvtvss#ACCAT
GGAAGTTCAACTGGTTGAATCTGGTGGCGGTTTAGTTCAAGCCGGTGATA
GCCTTCGTCTGAGCTGCGCCGCAAGCGGAGCTTTCGGTTCTAACGTTTTC
ATGGGTTGGTTTCGCCAGGCACCTGGTAAAGAACGTGAATTTGTGGCATC
CATTACCCCTCATCACACGGTCACCGACTATGCCGATTCTGTTCGTGGTC
GCTTCAGCATTTCAGCAGATTCTGCGAAGATTACCGTGTACTTACAGATG
AACTCACTGAAACCTGAGGATACCGCCGTTTATTATTGTGCGGCAGCCAT
TTATAGGAACGCGTCGGTTTTGGACTATTGGGGTCAGGGCACACAAGTCA
CGGTCTCAAGCGGCGGAAGCTCTGGTGAACAGAAACTGATTTCAGAAG
AFGSNVF#PHHTV#AIYRNASVL#evqlvdsggglvqagdrlrlscaasg
AFGSNVFmgwfrqapgkerefvasitPHHTVtdyadsvrgrfsisadsak
ntvylqmnslkpedtavyycaaAIYRNASVLdywgqgtqvtvss#GAAGG
AGATATACCATGGAAGTTCAACTGGTTGACTCTGGTGGCGGTTTAGTTCA
AGCCGGTGATCGCCTTCGTCTGAGCTGCGCCGCAAGCGGAGCTTTTGGTT
CTAACGTTTTCATGGGTTGGTTTCGCCAGGCACCTGGTAAAGAACGTGAA
TTTGTGGCATCCATTACCCCTCATCACACGGTCACCGACTATGCCGATTC
TGTTCGTGGTCGCTTCAGCATTTCAGCAGATTCTGCGAAGAATACCGTGT
ACTTACAGATGAACTCACTGAAACCTGAGGATACCGCCGTTTATTATTGT
GCGGCAGCCATTTATAGGAACGCGTCGGTTTTGGACTATTGGGGTCAGGG
CACACAAGTCACGGTCTCAAGCGGCGGAAGCTCTGGTGAACAGAAACTGA
TTTCAGAAG
AFGSNVF#PHHTV#AIYRNASVL#evqlvesggglvqagdslrlscaasg
AFGSNVFmgwfrqapgkerefvasitPHHTVtdyadsvrgrfsisadsak
ntvylqmnslkpedtavyygaaAIYRNASVLdyggqgtqvtvss#GGAGA
TATACCATGGAAGTTCAACTGGTTGAATCTGGTGGCGGTTTAGTTCAAGC
CGGTGATAGCCTTCGTCTGAGCTGCGCCGCAAGCGGAGCTTTCGGTTCTA
ACGTTTTCATGGGTTGGTTTCGCCAGGCACCTGGTAAAGAACGTGAATTT
GTGGCATCCATTACCCCTCATCACACGGTCACCGACTATGCCGATTCTGT
TCGTGGTCGCTTCAGCATTTCAGCAGATTCTGCGAAGAATACCGTGTACT
TACAGATGAACTCACTGAAACCTGAGGATACCGCCGTTTATTATGGTGCG
GCAGCCATTTATAGGAACGCGTCGGTTTTGGACTATGGGGGTCAGGGCAC
ACAAGTCACGGTCTCAAGCGGCGGAAGCTCTGGTGAACAGAAACTGATTT
CAGAAG
AFGSNVF#PHHTV#AIYRNASGL#evqlvesggglvqagdslrlscaasg
AFGSNVFmgwfrqapgkerefvasitPHHTVtdyadsvrgrfsisadsak
ntvylqmnslkpedtavyycaaAIYRNASGLdywgqgtqvtvss#ATACC
ATGGAAGTTCAACTGGTTGAATCTGGTGGCGGTTTAGTTCAAGCCGGTGA
TAGCCTTCGTCTGAGCTGCGCCGCAAGCGGAGCTTTCGGTTCTAACGTTT
TCATGGGTTGGTTTCGCCAGGCACCTGGTAAAGAACGTGAATTTGTGGCA
TCCATTACCCCTCATCACACGGTCACCGACTATGCCGATTCTGTTCGTGG
TCGCTTCAGCATTTCAGCAGATTCTGCGAAGAATACCGTGTACTTACAGA
TGAACTCACTGAAACCTGAGGATACCGCCGTTTATTATTGTGCGGCAGCC
ATTTATAGGAACGCGTCGGGTTTGGACTATTGGGGTCAGGGCACACAAGT
CACGGTCTCAAGCGGCGGAAGCTCTGGTGAACAGAAACTGATTTCAGAAG
AFGSNVF#PHHTV#AIYRNASVL#evqlvesggglvqagdslrlscaasg
AFGSNVFmgwfrqapgkerefvasitPHHTVtdyadsvrgrfsisadsak
ntvylqmnslkpedtavyyceaAIYRNASVLdywgqgtqvtvss#ACCAT
GGAAGTTCAACTGGTTGAATCTGGTGGCGGTTTAGTTCAAGCCGGTGATA
GCCTTCGTCTGAGCTGCGCCGCAAGCGGAGCTTTCGGTTCTAACGTTTTC
ATGGGTTGGTTTCGCCAGGCACCTGGTAAAGAACGTGAATTTGTGGCATC
CATTACCCCTCATCACACGGTCACCGACTATGCCGATTCTGTTCGTGGTC
GCTTCAGCATTTCAGCAGATTCTGCGAAGAATACCGTGTACTTACAGATG
AACTCACTGAAACCTGAGGATACCGCCGTTTATTATTGTGAGGCAGCCAT
TTATAGGAACGCGTCGGTTTTGGACTATTGGGGTCAGGGCACACAAGTCA
CGGTCTCAAGCGGCGGAAGCTCTGGTGAACAGAAACTGATTTCAGAAG
AFGSNVF#PHHTV#AIYRNASVL#evqlvesggglvqagdsirlscaasg
AFGSNVFmgwfrqapgkerefvasitPHHTVtdyadsvrgrfsisadsak
ntvylqmnslkpedtavyycaaAIYRNASVLdywgqgtqvtvss#GAAGG
AGATATACCATGGAAGTTCAACTGGTTGAATCTGGTGGCGGTTTAGTTCA
AGCCGGTGATAGCATTCGTCTGAGCTGCGCCGCAAGCGGAGCTTTCGGTT
CTAACGTTTTCATGGGTTGGTTTCGCCAGGCACCTGGTAAAGAACGTGAA
TTTGTGGCATCCATTACCCCTCATCACACGGTCACCGACTATGCCGATTC
TGTTCGTGGTCGCTTCAGCATTTCAGCAGATTCTGCGAAGAATACCGTGT
ACTTACAGATGAACTCACTGAAACCTGAGGATACCGCCGTTTATTATTGT
GCGGCAGCCATTTATAGGAACGCGTCGGTTTTGGACTATTGGGGTCAGGG
CACACAAGTCACGGTCTCAAGCGGCGGAAGCTCTGGTGAACAGAAACTGA
TTTCAGAAG
AFGSNVF#PHHTV#AIYRNASVL#evqlfesggglvqagdslrlscaasg
AFGSNVFmgwfrqapgkerefvasitPHHTVtdyadsvrgrfsisadsak
ntvylqmnslkpedtavyycaaAIYRNASVLgywgqgtqvtvss#AGATA
TACCATGGAAGTTCAACTGTTTGAATCTGGTGGCGGTTTAGTTCAAGCCG
GTGATAGCCTTCGTCTGAGCTGCGCCGCAAGCGGAGCTTTCGGTTCTAAC
GTTTTCATGGGTTGGTTTCGCCAGGCACCTGGTAAAGAACGTGAATTTGT
GGCATCCATTACCCCTCATCACACGGTCACCGACTATGCCGATTCTGTTC
GTGGTCGCTTCAGCATTTCAGCAGATTCTGCGAAGAATACCGTGTACTTA
CAGATGAACTCACTGAAACCTGAGGATACCGCCGTTTATTATTGTGCGGC
AGCCATTTATAGGAACGCGTCGGTTTTGGGCTATTGGGGTCAGGGCACAC
AAGTCACGGTCTCAAGCGGCGGAAGCTCTGGTGAACAGAAACTGATTTCA
GAAG
AFGSNVF#PHHTV#AIYRNASVL#evqlvesggglvkagdslrlscaasg
AFGSNVFmgwfrqapgkerefvasitPHHTVtdyadsvrgrfsisadsak
ntvylqmnslkpedtavyycaaAIYRNASVLdywgqgtqvtvss#GGAGA
TATACCATGGAAGTTCAACTGGTTGAATCTGGTGGCGGTTTAGTTAAAGC
CGGTGATAGCCTTCGTCTGAGCTGCGCCGCAAGCGGAGCTTTCGGTTCTA
ACGTTTTCATGGGTTGGTTTCGCCAGGCACCTGGTAAAGAACGTGAATTT
GTGGCATCCATTACCCCTCATCACACGGTCACCGACTATGCCGATTCTGT
TCGTGGTCGCTTCAGCATTTCAGCAGATTCTGCGAAGAATACCGTGTACT
TACAGATGAACTCACTGAAACCTGAGGATACCGCCGTTTATTATTGTGCG
GCAGCCATTTATAGGAACGCGTCGGTTTTGGACTATTGGGGTCAGGGCAC
ACAAGTCACGGTCTCAAGCGGCGGAAGCTCTGGTGAACAGAAACTGATTT
CAGAAG
AFGSNVF#PHHTV#AIYRNASVL#evqlvdsggglvhagdrlrlscaasg
AFGSNVFmgwfrqapgkerefvasitPHHTVtdyadsvrgrfsisadsak
ntvylqmnslkpedtavyycaaAIYRNASVLdywgqgtqvtvss#GAAGG
AGATATACCATGGAAGTTCAACTGGTTGACTCTGGTGGCGGTTTAGTTCA
CGCCGGTGATCGCCTTCGTCTGAGCTGCGCCGCAAGCGGAGCTTTCGGTT
CTAACGTTTTCATGGGTTGGTTTCGCCAGGCACCTGGTAAAGAACGTGAA
TTTGTGGCATCCATTACCCCTCATCACACGGTCACCGACTATGCCGATTC
TGTTCGTGGTCGCTTCAGCATTTCAGCAGATTCTGCGAAGAATACCGTGT
ACTTACAGATGAACTCACTGAAACCTGAGGATACCGCCGTTTATTATTGT
GCGGCAGCCATTTATAGGAACGCGTCGGTTTTGGACTATTGGGGTCAGGG
CACACAAGTCACGGTCTCAAGCGGCGGAAGCTCTGGTGAACAGAAACTGA
TTTCAGAAG
AFGSNVF#PHHTV#AIYRDASVL#evqlvesggglvqagdslrlscaasg
AFGSNVFmgwfrqapgkerefvasitPHHTVtdyadsvrgrfsisadsak
ntvylqmnslkpedtavyycaaAIYRDASVLdywgqgtqvtvss#AGGAG
ATATACCATGGAAGTTCAACTGGTTGAATCTGGTGGCGGTTTAGTTCAAG
CCGGTGATAGCCTTCGTCTGAGCTGCGCCGCAAGCGGAGCTTTCGGTTCT
AACGTTTTCATGGGTTGGTTTCGCCAGGCACCTGGTAAAGAACGTGAATT
TGTGGCATCCATTACCCCTCATCACACGGTCACCGACTATGCCGATTCTG
TTCGTGGTCGCTTCAGCATTTCAGCAGATTCTGCGAAGAATACCGTGTAC
TTACAGATGAACTCACTGAAACCTGAGGATACCGCCGTTTATTATTGTGC
GGCAGCCATTTATAGGGACGCGTCGGTTTTGGACTATTGGGGTCAGGGCA
CACAAGTCACGGTCTCAAGCGGCGGAAGCTCTGGTGAACAGAAACTGATT
TCAGAAG
AFGSNVF#PHHTF#AIYRNASVL#evqlvesggglvqagdslrlscaasg
AFGSNVFmgwfrqapgkerefvasitPHHTFtdyadsvrgrfsisadsak
ntvylqmnslkpedtavyycaaAIYRNASVLdywgqgtqvtvss#AGATA
TACCATGGAAGTTCAACTGGTTGAATCTGGTGGCGGTTTAGTTCAAGCCG
GTGATAGCCTTCGTCTGAGCTGCGCCGCAAGCGGAGCTTTCGGTTCTAAC
GTTTTCATGGGTTGGTTTCGCCAGGCACCTGGTAAAGAACGTGAATTTGT
GGCATCCATTACCCCTCATCACACGTTCACCGACTATGCCGATTCTGTTC
GTGGTCGCTTCAGCATTTCAGCAGATTCTGCGAAGAATACCGTGTACTTA
CAGATGAACTCACTGAAACCTGAGGATACCGCCGTTTATTATTGTGCGGC
AGCCATTTATAGGAACGCGTCGGTTTTGGACTATTGGGGTCAGGGCACAC
AAGTCACGGTCTCAAGCGGCGGAAGCTCTGGTGAACAGAAACTGATTTCA
GAAG
AFGSNVF#PHHTV#AIYRNASVL#evqlvesggglvqagdslrlscaasg
AFGSNVFmgwfrqapgkerefvasitPHHTVtdyadsvrgrfsisadsak
ntvylqmnslkpedtavyycaaAIYRNASVLaywvqgtqvtvss#AGATA
TACCATGGAAGTTCAACTGGTTGAATCTGGTGGCGGTTTAGTTCAAGCCG
GTGATAGCCTTCGTCTGAGCTGCGCCGCAAGCGGAGCTTTCGGTTCTAAC
GTTTTCATGGGTTGGTTTCGCCAGGCACCTGGTAAAGAACGTGAATTTGT
GGCATCCATTACCCCTCATCACACGGTCACCGACTATGCCGATTCTGTTC
GTGGTCGCTTCAGCATTTCAGCAGATTCTGCGAAGAATACCGTGTACTTA
CAGATGAACTCACTGAAACCTGAGGATACCGCCGTTTATTATTGTGCGGC
AGCCATTTATAGGAACGCGTCGGTTTTGGCCTATTGGGTTCAGGGCACAC
AAGTCACGGTCTCAAGCGGCGGAAGCTCTGTTGAACAGAAACTGATTTCA
GAAG
AFGSNVF#PHHTV#AIYRNASVL#evqlvesggglvqagdslrlscaasg
AFGSNVFmgwfrqapgkergfvasitPHHTVtdyadsvrgrfsisadsak
ntvylqmnslkpedtavyycaaAIYRNASVLdywgqgtqvtvss#GAAGG
AGATATACCATGGAAGTTCAACTGGTTGAATCTGGTGGCGGTTTAGTTCA
AGCCGGTGATAGCCTTCGTCTGAGCTGCGCCGCAAGCGGAGCTTTCGGTT
CTAACGTTTTCATGGGTTGGTTTCGCCAGGCACCTGGTAAAGAACGTGGA
TTTGTGGCATCCATTACCCCTCATCACACGGTCACCGACTATGCCGATTC
TGTTCGTGGTCGCTTCAGCATTTCAGCAGATTCTGCGAAGAATACCGTGT
ACTTACAGATGAACTCACTGAAACCTGAGGATACCGCCGTTTATTATTGT
GCGGCAGCCATTTATAGGAACGCGTCGGTTTTGGACTATTGGGGTCAGGG
CACACAAGTCACGGTCTCAAGCGGCGGAAGCTCTGGTGAACAGAAACTGA
TTTCAGAAG
AFGSNVF#PHHTV#AIYRNASVL#evqlvesggglvqagdslrlscvasg
AFGSNVFmgwfrqapgkerefvasitPHHTVtdyadsvrgrfsisadsak
ntvylqmnslkpedtavyycaaAIYRNASVLdywgqgtqvtvss#AAGGA
GATATACCATGGAAGTTCAACTGGTTGAATCTGGTGGCGGTTTAGTTCAA
GCCGGTGATAGCCTTCGTCTGAGCTGCGTCGCAAGCGGAGCTTTCGGTTC
TAACGTTTTCATGGGTTGGTTTCGCCAGGCACCTGGTAAAGAACGTGAAT
TTGTGGCATCCATTACCCCTCATCACACGGTCACCGACTATGCCGATTCT
GTTCGTGGTCGCTTCAGCATTTCAGCAGATTCTGCGAAGAATACCGTGTA
CTTACAGATGAACTCACTGAAACCTGAGGATACCGCCGTTTATTATTGTG
CGGCAGCCATTTATAGGAACGCGTCGGTTTTGGACTATTGGGGTCAGGGC
ACACAAGTCACGGTCTCAAGCGGCGGAAGCTCTGGTGAACAGAAACTGAT
TTCAGAAG
AFGSNVL#PHHTV#AIYRNASVL#evqlvesggglvqagdslrlscaasg
AFGSNVLmgwfrqapgkerefvasitPHHTVtdyadsvrgrfsisadsak
ntvylqmnslkpedtavyycaaAIYRNASVLdywgqgtqvtvss#ATATA
CCATGGAAGTTCAACTGGTTGAATCTGGTGGCGGTTTAGTTCAAGCCGGT
GATAGCCTTCGTCTGAGCTGCGCCGCAAGCGGAGCTTTCGGTTCTAACGT
TTTAATGGGTTGGTTTCGCCAGGCACCTGGTAAAGAACGTGAATTTGTGG
CATCCATTACCCCTCATCACACGGTCACCGACTATGCCGATTCTGTTCGT
GGTCGCTTCAGCATTTCAGCAGATTCTGCGAAGAATACCGTGTACTTACA
GATGAACTCACTGAAACCTGAGGATACCGCCGTTTATTATTGTGCGGCAG
CCATTTATAGGAACGCGTCGGTTTTGGACTATTGGGGTCAGGGCACACAA
GTCACGGTCTCAAGCGGCGGAAGCTCTTGTGAACAGAAACTGATTTCAGA
AG
AFGSNVF#PHHTV#AIYRNASVL#evqlvesggglvqagdslrlscpasg
AFGSNVFmgwfrqapgkerefvasitPHHTVtdyadsvrgrfsisadsak
ntvylqmnslkpedtavyycaaAIYRNASVLdywgqgtqvtvss#ATATA
CCATGGAAGTTCAACTGGTTGAATCTGGTGGCGGTTTAGTTCAAGCCGGT
GATAGCCTTCGTCTGAGCTGCCCCGCAAGCGGAGCTTTCGGTTCTAACGT
TTTCATGGGTTGGTTTCGCCAGGCACCTGGTAAAGAACGTGAATTTGTGG
CATCCATTACCCCTCATCACACGGTCACCGACTATGCCGATTCTGTTCGT
GGTCGCTTCAGCATTTCAGCAGATTCTGCGAAGAATACCGTGTACTTACA
GATGAACTCACTGAAACCTGAGGATACCGCCGTTTATTATTGTGCGGCAG
CCATTTATAGGAACGCGTCGGTTTTGGACTATTGGGGTCAGGGCACACAA
GTCACGGTCTCAAGCGGCGGAAGCTCTGGTGAACAGAAACTGATTTCAGA
AG
AFGSNVF#PHHTV#AIYRNASVL#evqlvesggglvqagdslrlscaasg
AFGSNVFmgwfrqapgkerefvafitPHHTVtdyadsvrgrfsisadsak
ntvylqmnslkpedtavyycaaAIYRNASVLdywgqgtqvtvss#ACCAT
GGAAGTTCAACTGGTTGAATCTGGTGGCGGTTTAGTTCAAGCCGGTGATA
GCCTTCGTCTGAGCTGCGCCGCAAGCGGAGCTTTCGGTTCTAACGTTTTC
ATGGGTTGGTTTCGCCAGGCACCTGGTAAAGAACGTGAATTTGTGGCATT
CATTACCCCTCATCACACGGTCACCGACTATGCCGATTCTGTTCGTGGTC
GCTTCAGCATTTCAGCAGATTCTGCGAAGAATACCGTGTACTTACAGATG
AACTCACTGAAACCTGAGGATACCGCCGTTTATTATTGTGCGGCAGCCAT
TTATAGGAACGCGTCGGTTTTGGACTATTGGGGTCAGGGCACACAAGTCA
CGGTCTCAAGCGGCGGAAGCTCTGGTGAACAGAAACTGATTTCAGAAG
AFGSNVF#PHHTV#AIYRNASVL#evqlvesggglvqagdslrlscaasg
AFGSNVFmgwfrqapgkerefvasitPHHTVtdyadsvrgrfsisedsak
ntvylqmnslkpedtavyycaaAIYRNASVLdywgqgtqvtvss#AGGAG
ATATACCATGGAAGTTCAACTGGTTGAATCTGGTGGCGGTTTAGTTCAAG
CCGGTGATAGCCTTCGTCTGAGCTGCGCCGCAAGCGGAGCTTTCGGTTCT
AACGTTTTCATGGGTTGGTTTCGCCAGGCACCTGGTAAAGAACGTGAATT
TGTGGCATCCATTACCCCTCATCACACGGTCACCGACTATGCCGATTCTG
TTCGTGGTCGCTTCAGCATTTCAGAAGATTCTGCGAAGAATACCGTGTAC
TTACAGATGAACTCACTGAAACCTGAGGATACCGCCGTTTATTATTGTGC
GGCAGCCATTTATAGGAACGCGTCGGTTTTGGACTATTGGGGTCAGGGCA
CACAAGTCACGGTCTCAAGCGGCGGAAGCTCTGGTGAACAGAAACTGATT
TCAGAAG
AFGSNVF#PHHTV#AIYRNASVL#evqlvesggglvhagdrlrlscaasg
AFGSNVFmgwfrqapgkerefvasitPHHTVtdyadsvrgrfsisadsak
ntvylqmnslkpedtavyycaaAIYRNASVLdywgqgtqvtvss#GAAGG
AGATATACCATGGAAGTTCAACTGGTTGAATCTGGTGGCGGTTTAGTTCA
CGCCGGTGATCGCCTTCGTCTGAGCTGCGCCGCAAGCGGAGCTTTCGGTT
CTAACGTTTTCATGGGTTGGTTTCGCCAGGCACCTGGTAAAGAACGTGAA
TTTGTGGCATCCATTACCCCTCATCACACGGTCACCGACTATGCCGATTC
TGTTCGTGGTCGCTTCAGCATTTCAGCAGATTCTGCGAAGAATACCGTGT
ACTTACAGATGAACTCACTGAAACCTGAGGATACCGCCGTTTATTATTGT
GCGGCAGCCATTTATAGGAACGCGTCGGTTTTGGACTATTGGGGTCAGGG
CACACAAGTCACGGTCTCAAGCGGCGGAAGCTCTGGTGAACAGAAACTGA
TTTCAGAAG
AFGSNVF#PHHTV#AIYRNASVF#evqlvesggglvqagdslrlscaasg
AFGSNVFmgwfrqapgkerefvasitPHHTVtdyadsvrgrfsisadsak
ntvylqmnslkpedtavyycaaAIYRNASVFaywgqgtqvtvss#ATACC
ATGGAAGTTCAACTGGTTGAATCTGGTGGCGGTTTAGTTCAAGCCGGTGA
TAGCCTTCGTCTGAGCTGCGCCGCAAGCGGAGCTTTCGGTTCTAACGTTT
TCATGGGTTGGTTTCGCCAGGCACCTGGTAAAGAACGTGAATTTGTGGCA
TCCATTACCCCTCATCACACGGTCACCGACTATGCCGATTCTGTTCGTGG
TCGCTTCAGCATTTCAGCAGATTCTGCGAAGAATACCGTGTACTTACAGA
TGAACTCACTGAAACCTGAGGATACCGCCGTTTATTATTGTGCGGCAGCC
ATTTATAGGAACGCGTCGGTTTTTGCCTATTGGGGTCAGGGCACACAAGT
CACGGTCTCAAGCGGCGGAAGCTCTGGTGAACAGAAACTGATTTCAGAAG
AFGSNVF#PHHTV#AIYRNASVL#evqlvesggglvkvgdslrlscaasg
AFGSNVFmgwfrqapgkerefvasitPHHTVtdyadsvrgrfsisadsak
ntvylqmnslkpedtavyycaaAIYRNASVLdywgqgtqvtvss#ACCAT
GGAAGTTCAACTGGTTGAATCTGGTGGCGGTTTAGTTAAAGTCGGTGATA
GCCTTCGTCTGAGCTGCGCCGCAAGCGGAGCTTTCGGTTCTAACGTTTTC
ATGGGTTGGTTTCGCCAGGCACCTGGTAAAGAACGTGAATTTGTGGCATC
CATTACCCCTCATCACACGGTCACCGACTATGCCGATTCTGTTCGTGGTC
GCTTCAGCATTTCAGCAGATTCTGCGAAGAATACCGTGTACTTACAGATG
AACTCACTGAAACCTGAGGATACCGCCGTTTATTATTGTGCGGCAGCCAT
TTATAGGAACGCGTCGGTTTTGGACTATTGGGGTCAGGGCACACAAGTCA
CGGTCTCAAGCGGCGGAAGCTCTGGTGAACAGAAACTGATTTCAGAAG
AFGSNVF#PHHTV#AIYRNASVL#eiqlvesggglvqagdslrlscaasg
AFGSNVFmgwfrqapgkerefvasitPHHTVtdyadsvrgrfsisadsak
ntvylqmnslkpedtavyycaaAIYRNASVLdywgqgtqvtvss#ATACC
ATGGAAATTCAACTGGTTGAATCTGGTGGCGGTTTAGTTCAAGCCGGTGA
TAGCCTTCGTCTGAGCTGCGCCGCAAGCGGAGCTTTCGGTTCTAACGTTT
TCATGGGTTGGTTTCGCCAGGCACCTGGTAAAGAACGTGAATTTGTGGCA
TCCATTACCCCTCATCACACGGTCACCGACTATGCCGATTCTGTTCGTGG
TCGCTTCAGCATTTCAGCAGATTCTGCGAAGAATACCGTGTACTTACAGA
TGAACTCACTGAAACCTGAGGATACCGCCGTTTATTATTGTGCGGCAGCC
ATTTATAGGAACGCGTCGGTTTTGGACTATTGGGGTCAGGGCACACAAGT
CACGGTCTCAAGCGGCGGAAGCTCTGGTGAACAGAAACTGATTTCAGAAG
AFGSNVF#PHHTV#AIYRNASVL#evqlvesggglvhagdslrlscaasg
AFGSNVFmgwfrqapgkerefvasitPHHTVtdyadsvrgrfsisadsak
ntvylqmnslkpedtavyycaaAIYRNASVLdywgqgtqvtvss#GAAGG
AGATATACCATGGAAGTTCAACTGGTTGAATCTGGTGGCGGTTTAGTTCA
CGCCGGTGATAGCCTTCGTCTGAGCTGCGCCGCAAGCGGAGCTTTCGGTT
CTAACGTTTTCATGGGTTGGTTTCGCCAGGCACCTGGTAAAGAACGTGAA
TTTGTGGCATCCATTACCCCTCATCACACGGTCACCGACTATGCCGATTC
TGTTCGTGGTCGCTTCAGCATTTCAGCAGATTCTGCGAAGAATACCGTGT
ACTTACAGATGAACTCACTGAAACCTGAGGATACCGCCGTTTATTATTGT
GCGGCAGCCATTTATAGGAACGCGTCGGTTTTGGACTATTGGGGTCAGGG
CACACAAGTCACGGTCTCAAGCGGCGGAAGCTCTGGTGAACAGAAACTGA
TTTCAGAAGCCAA
AFGSNVF#PHHTV#AIYRNASVL#evqlvesggglvqagdslrlscaasg
AFGSNVFmgwfrqapgkerefvasitPHHTVtdyadsvrgrfsisadsak
ntvylqmnslkpedtavyycaaAIYRNASVLdywgqgtqgtvss#ACCAT
GGAAGTTCAACTGGTTGAATCTGGTGGCGGTTTAGTTCAAGCCGGTGATA
GCCTTCGTCTGAGCTGCGCCGCAAGCGGAGCTTTCGGTTCTAACGTTTTC
ATGGGTTGGTTTCGCCAGGCACCTGGTAAAGAACGTGAATTTGTGGCATC
CATTACCCCTCATCACACGGTCACCGACTATGCCGATTCTGTTCGTGGTC
GCTTCAGCATTTCAGCAGATTCTGCGAAGAATACCGTGTACTTACAGATG
AACTCACTGAAACCTGAGGATACCGCCGTTTATTATTGTGCGGCAGCCAT
TTATAGGAACGCGTCGGTTTTGGACTATTGGGGTCAGGGCACACAAGGCA
CGGTCTCAAGTGGCGGAAGCTCTGGTGAACAGAAACTGATTTCAGAAGCC
AA
AFGSNVF#PHHTV#AIYRNASVL#evqlvesggslvqagdslrlscaasg
AFGSNVFmgwfrqapgkerefvasitPHHTVtdyadsvrgrfsisadsak
ntvylqmnslkpedtavyycaaAIYRNASVLdywgqgtqvtvss#AAGGA
GATATACCATGGAAGTTCAACTGGTTGAATCTGGTGGCAGTTTAGTTCAA
GCCGGTGATAGCCTTCGTCTGAGCTGCGCCGCAAGCGGAGCTTTCGGTTC
TAACGTTTTCATGGGTTGGTTTCGCCAGGCACCTGGTAAAGAACGTGAAT
TTGTGGCATCCATTACCCCTCATCACACGGTCACCGACTATGCCGATTCT
GTTCGTGGTCGCTTCAGCATTTCAGCAGATTCTGCGAAGAATACCGTGTA
CTTACAGATGAACTCACTGAAACCTGAGGATACCGCCGTTTATTATTGTG
CGGCAGCCATTTATAGGAACGCGTCGGTTTTGGACTATTGGGGTCAGGGC
ACACAAGTCACGGTCTCAAGCGGCGGAAGCTCTGGTGAACAGAAACTGAT
TTCAGAAGCCAA
AFGSKVF#PHHTV#AIYRNASVL#evqlvesggglvqagdslrlscaasg
AFGSKVFmgwfrqapgkerefvasitPHHTVtdyadsvrgrfsisadsak
ntvylqmnslkpedtavyycaaAIYRNASVLdywgqgtqvtvss#GGAGA
TATACCATGGAAGTTCAACTGGTTGAATCTGGTGGCGGTTTAGTTCAAGC
CGGTGATAGCCTTCGTCTGAGCTGCGCCGCAAGCGGAGCTTTCGGTTCTA
AAGTTTTCATGGGTTGGTTTCGCCAGGCACCTGGTAAAGAACGTGAATTT
GTGGCATCCATTACCCCTCATCACACGGTCACCGACTATGCCGATTCTGT
TCGTGGTCGCTTCAGCATTTCAGCAGATTCTGCGAAGAATACCGTGTACT
TACAGATGAACTCACTGAAACCTGAGGATACCGCCGTTTATTATTGTGCG
GCAGCCATTTATAGGAACGCGTCGGTTTTGGACTATTGGGGTCAGGGCAC
ACAAGTCACGGTCTCAAGCGGCGGAAGCTCTGGTGAACAGAAACTGATTT
CAGAAGCCAA
AFGSNVF#PHHTV#AIYRNASVL#evqlvesggglvqagdslrlscatsg
AFGSNVFmgwfrqapgkerefvasitPHHTVtdyadsvrgrfsisadsak
ntvylqmkslkpedtavyycaaAIYRNASVLdywgqgtqvtvss#AGATA
TACCATGGAAGTTCAACTGGTTGAATCTGGTGGCGGTTTAGTTCAAGCCG
GTGATAGCCTTCGTCTGAGCTGCGCCACAAGCGGAGCTTTCGGTTCTAAC
GTTTTCATGGGTTGGTTTCGCCAGGCACCTGGTAAAGAACGTGAATTTGT
GGCATCCATTACCCCTCATCACACGGTCACCGACTATGCCGATTCTGTTC
GTGGTCGCTTCAGCATTTCAGCAGATTCTGCGAAGAATACCGTGTACTTA
CAGATGAAATCACTGAAACCTGAGGATACCGCCGTTTATTATTGTGCGGC
AGCCATTTATAGGAACGCGTCGGTTTTGGACTATTGGGGGCAGGGCACAC
AAGTCACGGTCTCAAGCGGCGGAAGCTCTGGTGAACAGAAACTGATTTCA
GAAGCCAA
AFGSNVF#PHHTV#VIYRNASVL#evqlvesggglvqagdslrlscaasg
AFGSNVFmgwfrqapgkerefvasitPHHTVtdyadsvrgrfsisadsak
ntvylqmnslkpedtavyycaaVIYRNASVLdywgqgtqvtvss#AAGGA
GATATACCATGGAAGTTCAACTGGTTGAATCTGGTGGCGGTTTAGTTCAA
GCCGGTGATAGCCTTCGTCTGAGCTGCGCCGCAAGCGGAGCTTTCGGTTC
TAACGTTTTCATGGGTTGGTTTCGCCAGGCACCTGGTAAAGAACGTGAAT
TTGTGGCATCCATTACCCCTCATCACACGGTCACCGACTATGCCGATTCT
GTTCGTGGTCGCTTCAGCATTTCAGCAGATTCTGCGAAGAATACCGTGTA
CTTACAGATGAACTCACTGAAACCTGAGGATACCGCCGTTTATTATTGTG
CGGCAGTCATTTATAGGAACGCGTCGGTTTTGGACTATTGGGGTCAGGGC
ACACAAGTCACGGTCTCAAGCGGCGGAAGCTCTGGTGAACAGAAACTGAT
TTCAGAAGCCAA
AFGSNVF#PHHTV#AIYRNASVL#evqlvesggglvqagdslrlscaasg
AFGSNVFmgwfrqapgkerefvasltPHHTVtdyadsvrgrfsisadsak
ntvylqmnslkpedtavyycaaAIYRNASVLdywgqgtqvtvss#AGGAG
ATATACCATGGAAGTTCAACTGGTTGAATCTGGTGGCGGTTTAGTTCAAG
CCGGTGATAGCCTTCGTCTGAGCTGCGCCGCAAGCGGAGCTTTCGGTTCT
AACGTTTTCATGGGTTGGTTTCGCCAGGCACCTGGTAAAGAACGTGAATT
TGTGGCATCCCTTACCCCTCATCACACGGTCACCGACTATGCCGATTCTG
TTCGTGGTCGCTTCAGCATTTCAGCAGATTCTGCGAAGAATACCGTGTAC
TTACAGATGAACTCACTGAAACCTGAGGATACCGCCGTTTATTATTGTGC
GGCAGCCATTTATAGGAACGCGTCGGTTTTGGACTATTGGGGTCAGGGCA
CACAAGTCACGGTCTCAAGCGGCGGAAGCTCTGGTGAACAGAAACTGATT
TCAGAAGCCAA
AFGSNVF#PHHTV#AIYRNASVL#evqlvdsggglvqagdrlrlscaasg
AFGSNVFmgwfrqapgkerefvasitPHHTVtdyadsvrgrfsisadsak
ntvylqmnslkpedtavyycaaAIYRNASVLdywgqgtqgtvss#GAAGG
AGATATACCATGGAAGTTCAACTGGTTGACTCTGGTGGCGGTTTAGTTCA
AGCCGGTGATCGCCTTCGTCTGAGCTGCGCCGCAAGCGGAGCTTTCGGTT
CTAACGTTTTCATGGGTTGGTTTCGCCAGGCACCTGGTAAAGAACGTGAA
TTTGTGGCATCCATTACCCCTCATCACACGGTCACCGACTATGCCGATTC
TGTTCGTGGTCGCTTCAGCATTTCAGCAGATTCTGCGAAGAATACCGTGT
ACTTACAGATGAACTCACTGAAACCTGAGGATACCGCCGTTTATTATTGT
GCGGCAGCCATTTATAGGAACGCGTCGGTTTTGGACTATTGGGGTCAGGG
CACACAAGGCACGGTCTCAAGCGGCGGAAGCTCTGGTGAACAGAAACTGA
TTTCAGAAGCCAA
AFGSNVF#PHHTV#AIYRNASVL#evqlvesggglvqagdslrlscaasg
AFGSNVFmgwfrqapgkerefvasitPHHTVtdyadsvrgrfsisadsak
ntvylqmnslkpedtavyycatAIYRNASVLdywgqgtqvtvss#GGAGA
TATACCATGGAAGTTCAACTGGTTGAATCTGGTGGCGGTTTAGTTCAAGC
CGGTGATAGCCTTCGTCTGAGCTGCGCCGCAAGCGGAGCTTTCGGTTCTA
ACGTTTTCATGGGTTGGTTTCGCCAGGCACCTGGTAAAGAACGTGAATTT
GTGGCATCCATTACCCCTCATCACACGGTCACCGACTATGCCGATTCTGT
TCGTGGTCGCTTCAGCATTTCAGCAGATTCTGCGAAGAATACCGTGTACT
TACAGATGAACTCACTGAAACCTGAGGATACCGCCGTTTATTATTGTGCG
ACAGCCATTTATAGGAACGCGTCGGTTTTGGACTATTGGGGTCAGGGCAC
ACAAGTCACGGTCTCAAGCGGCGGAAGCTCTGGTGAACAGAAACTGATTT
CAGAAGCCAA
AFGSNVF#PHHTV#AIYRNASVL#evqlvesggglvqagdslrlscaasg
AFGSNVFmgcfrqapgkerefvasitPHHTVtdyadsvrgrfsisadsak
ntvylqmnslkpedtavyycaaAIYRNASVLdywgqgtqgtvss#ACCAT
GGAAGTTCAACTGGTTGAATCTGGTGGCGGTTTAGTTCAAGCCGGTGATA
GCCTTCGTCTGAGCTGCGCCGCAAGCGGAGCTTTCGGTTCTAACGTTTTC
ATGGGTTGTTTTCGCCAGGCACCTGGTAAAGAACGTGAATTTGTGGCATC
CATTACCCCTCATCACACGGTCACCGACTATGCCGATTCTGTTCGTGGTC
GCTTCAGCATTTCAGCAGATTCTGCGAAGAATACCGTGTACTTACAGATG
AACTCACTGAAACCTGAGGATACCGCCGTTTATTATTGTGCGGCAGCCAT
TTATAGGAACGCGTCGGTTTTGGACTATTGGGGTCAGGGCACACAAGGCA
CGGTCTCAAGCGGCGGAAGCTCTGGTGAACAGAAACTGATTTCAGAAGCC
AA
AFGSNVF#PHHTV#AIYGNASVL#evqlvesggglvqagdslrlscaasg
AFGSNVFmgwfrqapgkerefvasitPHHTVtdyadsvrgrfsisadsak
ntvylqmnslkpedtavyycaaAIYGNASVLdywgqgtqvtvss#AGATA
TACCATGGAAGTTCAACTGGTTGAATCTGGTGGCGGTTTAGTTCAAGCCG
GTGATAGCCTTCGTCTGAGCTGCGCCGCAAGCGGAGCTTTCGGTTCTAAC
GTTTTCATGGGTTGGTTTCGCCAGGCACCTGGTAAAGAACGTGAATTTGT
GGCATCCATTACCCCTCATCACACGGTCACCGACTATGCCGATTCTGTTC
GTGGTCGCTTCAGCATTTCAGCAGATTCTGCGAAGAATACCGTGTACTTA
CAGATGAACTCACTGAAACCTGAGGATACCGCCGTTTATTATTGTGCGGC
AGCCATTTATGGGAACGCGTCGGTTTTGGACTATTGGGGTCAGGGCACAC
AAGTCACGGTCTCAAGCGGCGGAAGCTCTGGTGAACAGAAACTGATTTCA
GAAGCCAA
DFGYNVF#PHHTV#AIYRNASVL#evqlvesggglvqagdslrlscaesg
DFGYNVFmgwfrqapgkerefvasitPHHTVtdyadsvrgrfsisadsak
ntvylqmnslkpedtavyycaaAIYRNASVLdywghgtqvtvss#ACCAT
GGAAGTTCAACTGGTTGAATCTGGTGGCGGTTTAGTTCAAGCCGGAGATA
GCCTTCGTCTGAGCTGCGCCGAAAGCGGAGATTTCGGTTATAACGTTTTC
ATGGGTTGGTTTCGCCAAGCACCTGGTAAAGAACGTGAATTTGTGGCATC
CATTACCCCTCATCACACGGTCACCGACTATGCCGATTCTGTTCGTGGTC
GCTTCAGCATTTCAGCAGATTCTGCGAAGAATACCGTGTACTTACAGATG
AACTCACTGAAACCTGAGGATACCGCCGTTTATTATTGTGCGGCAGCCAT
TTATAGGAACGCGTCGGTTTTGGACTATTGGGGTCATGGCACACAAGTCA
CGGTCTCAAGCGGCGGAAGCTCTGGTGAACAGAAACTTATTTCAGAAGCC
AA
AFGSNVF#PHHTV#AIYRNASVL#evqlfesggglvqagdslrlscaasg
AFGSNVFmgwfrqapgkerefvasitPHHTVtdyadsvrgrfsfsadsak
ntvylqmnslkpedtavyycaaAIYRNASVLdywgqgtqvtvss#AGATA
TACCATGGAAGTTCAACTGTTTGAATCTGGTGGCGGTTTAGTTCAAGCCG
GTGATAGCCTTCGTCTGAGCTGCGCCGCAAGCGGAGCTTTCGGTTCTAAC
GTTTTCATGGGTTGGTTTCGCCAGGCACCTGGTAAAGAACGTGAATTTGT
GGCATCCATTACCCCTCATCACACGGTCACCGACTATGCCGATTCTGTTC
GTGGTCGCTTCAGCTTTTCAGCAGATTCTGCGAAGAATACCGTGTACTTA
CAGATGAACTCACTGAAACCTGAGGATACCGCCGTTTATTATTGTGCGGC
AGCCATTTATAGGAACGCGTCGGTTTTGGACTATTGGGGTCAGGGCACAC
AAGTCACGGTCTCAAGCGGCGGAAGCTCTGGTGAACAGAAACTGATTTCA
GAAGCCAA

TABLE 3
Sequences belonging to cluster SR4.
Each line in the table represents one sequence,
both segments and full length of the sequence
are shown. Shown items are divided by “#” and
in the order from start to end of each line is:
CDR1 amino acid sequence, CDR2 amino acid
sequence, CDR3 amino acid sequence, full-length
amino acid sequence with CDRs capitalized,
full-length DNA sequence.
(SEQ ID NOS: 401-690)

FQLSCYC#QHAFR#GEHCLAF#qvqlqesggvlvqagdslrlscaasgFQ
LSCYCmgwfrqapgkerefvasitQHAFRtyyadsvkgrftisrddarnt
vylqmnslkpedtavyycaaGEHCLAFdywgqgtqvtvss#ATATACCAT
GCAGGTTCAACTGCAAGAATCTGGTGGCGTTTTAGTTCAAGCCGGTGATA
GCCTTCGTCTGAGCTGCGCCGCAAGCGGATTTCAGCTCTCGTGTTACTGT
ATGGGTTGGTTTCGCCAGGCACCTGGTAAAGAACGTGAATTTGTGGCATC
CATTACCCAGCACGCCTTTCGTACCTACTATGCCGATTCTGTTAAAGGTC
GCTTCACTATTTCACGCGATGATGCGCGTAATACCGTGTACTTACAGATG
AACTCACTGAAACCTGAGGATACCGCCGTTTATTATTGTGCGGCAGGCGA
GCACTGTCTCGCCTTCGACTATTGGGGTCAGGGCACACAAGTCACGGTCT
CAAGCGGCGGAAGCTCTGGTGAACAGAAACTGATTTCAGAAG
FQ
LSCYC#QHAFR#AETPNILVYE#evqlvesggglvqagdslrlscaasgF
QLSCYCmgwfrqapgkerefvasitQHAFRtyyadsvkgrftisrddarn
tvylqmnslkpedtavyycaaAETPNILVYEnywgqgtqvtvss#ACCAT
GGAAGTTCAACTGGTTGAATCTGGTGGCGGTTTAGTTCAAGCCGGTGATA
GCCTTCGTCTGAGCTGCGCCGCAAGCGGATTTCAGCTCTCGTGTTACTGT
ATGGGTTGGTTTCGCCAGGCACCTGGTAAAGAACGTGAATTTGTGGCATC
CATTACCCAGCACGCCTTTCGTACCTACTATGCCGATTCTGTTAAAGGTC
GCTTCACTATTTCACGCGATGATGCGCGTAATACCGTGTACTTACAGATG
AACTCACTGAAACCTGAGGATACCGCCGTTTATTATTGTGCGGCAGCCGA
GACCCCGAATATCCTCGTGTACGAGAACTATTGGGGTCAGGGCACACAAG
TCACGGTCTCAAGCGGCGGAAGCTCTGGTGAACAGAAACTGATTTCAGAA
G
FQLSCYC#QHAFR#GEHCLAF#qvqlqesggvlvqagdslrls
caasgFQLSCYCmgwfrqapgkerefvasitQHAFRtyyadsvkgrftis
rddarntvylqmnslkpkdtavyycaaGEHCLAFdywgqgtqvtvss#AT
ATACCATGCAGGTTCAACTGCAAGAATCTGGTGGCGTTTTAGTTCAAGCC
GGTGATAGCCTTCGTCTGAGCTGCGCCGCAAGCGGATTTCAGCTCTCGTG
TTACTGTATGGGTTGGTTTCGCCAGGCACCTGGTAAAGAACGTGAATTTG
TGGCATCCATTACCCAGCACGCCTTTCGTACCTACTATGCCGATTCTGTT
AAAGGTCGCTTCACTATTTCACGCGATGATGCGCGTAATACCGTGTACTT
ACAGATGAACTCACTGAAACCTAAGGATACCGCCGTTTATTATTGTGCGG
CAGGCGAGCACTGTCTCGCCTTCGACTATTGGGGTCAGGGCACACAAGTC
ACGGTCTCAAGCGGCGGAAGCTCTGGTGAACAGAAACTGATTTCAGAAG
FQLSCYC#QHAFR#DPSFSDAIAS#evqlvesggglvqagdslrl
scaasgFQLSCYCmgwfrqapgkerefvasitQHAFRtyyadsvkgrfti
srddarntvylqtnslkpedtavyycavDPSFSDAIASdywgqgtqvtvs
s#AAGGAGATATACCATGGAAGTTCAACTGGTTGAATCTGGTGGCGGTTT
AGTTCAAGCCGGTGATAGCCTTCGTCTGAGCTGCGCCGCAAGCGGATTTC
AGCTCTCGTGTTACTGTATGGGTTGGTTTCGCCAGGCACCTGGTAAAGAA
CGTGAATTTGTGGCATCCATTACCCAGCACGCCTTTCGTACCTACTATGC
CGATTCTGTTAAAGGTCGCTTCACTATTTCACGCGATGATGCGCGTAATA
CCGTGTACTTACAGACGAACTCACTGAAACCTGAGGATACCGCCGTTTAT
TATTGTGCGGTTGATCCTTCTTTCTCCGACGCTATCGCCTCGGACTATTG
GGGTCAGGGCACACAAGTCACGGTCTCAAGCGGCGGAAGCTCTGGTGAAC
AGAAACTGATTTCAGAAG
FQLSCYC#QHAFR#GEHCLAF#qvql
qesggglvqagdslrlscaasgFQLSCYCmgwfrqapgkerefvasitQH
AFRtyyadsvkgrftisrddarntvylqmnslkpedtavyycaaGEHCLA
Fdywgqgtqvtvss#ACCATGCAGGTTCAACTGCAAGAATCTGGTGGCGG
TTTAGTTCAAGCCGGTGATAGCCTTCGTCTGAGCTGCGCCGCAAGCGGAT
TTCAGCTCTCGTGTTACTGTATGGGTTGGTTTCGCCAGGCACCTGGTAAA
GAACGTGAATTTGTGGCATCCATTACCCAGCACGCCTTTCGTACCTACTA
TGCCGATTCTGTTAAAGGTCGCTTCACTATTTCACGCGATGATGCGCGTA
ATACCGTGTACTTACAGATGAACTCACTGAAACCTGAGGATACCGCCGTT
TATTATTGTGCGGCAGGCGAGCACTGTCTCGCCTTCGACTATTGGGGTCA
GGGCACACAAGTCACGGTCTCAAGCGGCGGAAGCTCTGGTGAACAGAAAC
TGATTTCAGAAG
FQLSCYC#QHAFR#AETPNILVYE#evqlves
ggglvqagdslrlscaasgFQLSCYCmgwfrqapgkerefvasitQHAFR
tyyadsvkgrftisrddarntvylqmnslkpedtavyycaaAETPNILVY
Etywgqgtqvtvss#AAGGAGATATACCATGGAAGTTCAACTGGTTGAAT
CTGGTGGCGGTTTAGTTCAAGCCGGTGATAGCCTTCGTCTGAGCTGCGCC
GCAAGCGGATTTCAGCTCTCGTGTTACTGTATGGGTTGGTTTCGCCAGGC
ACCTGGTAAAGAACGTGAATTTGTGGCATCCATTACCCAGCACGCCTTTC
GTACCTACTATGCCGATTCTGTTAAAGGTCGCTTCACTATTTCACGCGAT
GATGCGCGTAATACCGTGTACTTACAGATGAACTCACTGAAACCTGAGGA
TACCGCCGTTTATTATTGTGCGGCAGCCGAGACCCCGAATATCCTCGTGT
ACGAGACCTATTGGGGTCAGGGCACACAAGTCACGGTCTCAAGCGGCGGA
AGCTCTGGTGAACAGAAACTGATTTCAGAAG
FQLSCYC#QHAFRDPSFSDAIAS#evqlvesggglvqagdslrlscaasg
FQLSCYCmgwfr
qapgkerefvasitQHAFRtyyadsvkgrftisrddarntvylqmnslkp
edtavyycavDPSFSDAIASdywgqgtqvtvss#ACCATGGAAGTTCAAC
TGGTTGAATCTGGTGGCGGTTTAGTTCAAGCCGGTGATAGCCTTCGTCTG
AGCTGCGCCGCAAGCGGATTTCAGCTCTCGTGTTACTGTATGGGTTGGTT
TCGCCAGGCACCTGGTAAAGAACGTGAATTTGTGGCATCCATTACCCAGC
ACGCCTTTCGTACCTACTATGCCGATTCTGTTAAAGGTCGCTTCACTATT
TCACGCGATGATGCGCGTAATACCGTGTACTTACAGATGAACTCACTGAA
ACCTGAGGATACTGCCGTTTATTATTGTGCGGTTGATCCTTCTTTCTCCG
ACGCTATCGCCTCGGACTATTGGGGTCAGGGCACACAAGTCACGGTCTCA
AGCGGCGGAAGCTCTGGTGAACAGAAACTGATTTCAGAAG
FQLS
CYC#QHAFR#AETPNILVYE#evqlvesggvlvqagdslrlscaasgFQL
SCYCmgwfrqapgkerefvasitQHAFRtyyadsvkgrftisrddarntv
ylqmnslkpedtavyycaaAETPNILVYEnywgqgtqvtvss#ACCATGG
AAGTTCAACTGGTTGAATCTGGTGGCGTTTTAGTTCAAGCCGGTGATAGC
CTTCGTCTGAGCTGCGCCGCAAGCGGATTTCAGCTCTCGTGTTACTGTAT
GGGTTGGTTTCGCCAGGCACCTGGTAAAGAACGTGAATTTGTGGCATCCA
TTACCCAGCACGCCTTTCGTACCTACTATGCCGATTCTGTTAAAGGTCGC
TTCACTATTTCACGCGATGATGCGCGTAATACCGTGTACTTACAGATGAA
CTCACTGAAACCTGAGGATACCGCCGTTTATTATTGTGCGGCAGCCGAGA
CCCCGAATATCCTCGTGTACGAGAACTATTGGGGTCAGGGCACACAAGTC
ACGGTCTCAAGCGGCGGAAGCTCTGGTGAACAGAAACTGATTTCAGAAG
FQLSCYC#QHAFR#AETPNILVYE#evqlvesggglvqagnslrl
scaasgFQLSCYCmgwfrqapgkerefvasitQHAFRtyyadsvkgrfti
srddarntvylqmnslkpedtavyycaaAETPNILVYEnywgqgtqvtvs
s#ACCATGGAAGTTCAACTGGTTGAATCTGGTGGCGGTTTAGTTCAAGCC
GGTAATAGCCTTCGTCTGAGCTGCGCCGCAAGCGGATTTCAGCTCTCGTG
TTACTGTATGGGTTGGTTTCGCCAGGCACCTGGTAAAGAACGTGAATTTG
TGGCATCCATTACCCAGCACGCCTTTCGTACCTACTATGCCGATTCTGTT
AAAGGTCGCTTCACTATTTCACGCGATGATGCGCGTAATACCGTGTACTT
ACAGATGAACTCACTGAAACCTGAGGATACCGCCGTTTATTATTGTGCGG
CAGCCGAGACCCCGAATATCCTCGTGTACGAGAACTATTGGGGTCAGGGC
ACACAAGTCACGGTCTCAAGCGGCGGAAGCTCTGGTGAACAGAAACTGAT
TTCAGAAG
FQLSCYC#QHAFR#GEHCLAF#qvqlqesggvlvqa
gdslrlscaasgFQLSCYCmgwfrqapgkerefvasitQHAFRtyyadsv
kgrftisrddvrntvylqmnslkpedtavyycaaGEHCLAFdywgqgtqv
tvss#AAGGAGATATACCATGCAGGTTCAACTGCAAGAATCTGGTGGCGT
TTTAGTTCAAGCCGGTGATAGCCTTCGTCTGAGCTGCGCCGCAAGCGGAT
TTCAGCTCTCGTGTTACTGTATGGGTTGGTTTCGCCAGGCACCTGGTAAA
GAACGTGAATTTGTGGCATCCATTACCCAGCACGCCTTTCGTACCTACTA
TGCCGATTCTGTTAAAGGTCGCTTCACTATTTCACGCGATGATGTGCGTA
ATACCGTGTACTTACAGATGAACTCACTGAAACCTGAGGATACCGCCGTT
TATTATTGTGCGGCAGGCGAGCACTGTCTCGCCTTCGACTATTGGGGTCA
GGGCACACAAGTCACGGTCTCAAGCGGCGGAAGCTCTGGTGAACAGAAAC
TGATTTCAGAAG
FQLSCYC#QHAFR#AETPNILVYE#evqlves
ggglvqagdslrlscaasgFQLSCYCmgwfrqapgkerefvasitQHAFR
tyyadsvkgrftisrddarntvylqmnslkpedtavyycaaAETPNILVY
Enyrgqgtqvtvss#ATATACCATGGAAGTTCAACTGGTTGAATCTGGTG
GCGGTTTAGTTCAAGCCGGTGATAGCCTTCGTCTGAGCTGCGCCGCAAGC
GGATTTCAGCTCTCGTGTTACTGTATGGGTTGGTTTCGCCAGGCACCTGG
TAAAGAACGTGAATTTGTGGCATCCATTACCCAGCACGCCTTTCGTACCT
ACTATGCCGATTCTGTTAAAGGTCGCTTCACTATTTCACGCGATGATGCG
CGTAATACCGTGTACTTACAGATGAACTCACTGAAACCTGAGGATACCGC
CGTTTATTATTGTGCGGCAGCCGAGACCCCGAATATCCTCGTGTACGAGA
ACTATCGGGGTCAGGGCACACAAGTCACGGTCTCAAGCGGCGGAAGCTCT
GGTGAACAGAAACTGATTTCAGAAG
FPLSCYC#QHAFR#AETPN
ILVYE#evqlvesggglvqagdslrlscaasgFPLSCYCmgwfrqapgke
refvasitQHAFRtyyadsvkgrftisrddarntvylqmnslkpedtavy
ycaaAETPNILVYEtywgqgtqvtvss#ATACCATGGAAGTTCAACTGGT
TGAATCTGGTGGCGGTTTAGTTCAAGCCGGTGATAGCCTTCGGCTGAGCT
GCGCCGCAAGCGGATTTCCGCTCTCGTGTTACTGTATGGGTTGGTTTCGC
CAGGCACCTGGTAAAGAACGTGAATTTGTGGCATCCATTACCCAGCACGC
CTTTCGTACCTACTATGCCGATTCTGTTAAAGGTCGCTTCACTATTTCAC
GCGATGATGCGCGTAATACCGTGTACTTACAGATGAACTCACTGAAACCT
GAGGATACCGCCGTTTATTATTGTGCGGCAGCCGAGACCCCGAATATCCT
CGTGTACGAGACCTATTGGGGTCAGGGCACACAAGTCACGGTCTCAAGCG
GCGGAAGCTCTGGTGAACAGAAACTGATTTCAGAAG
FQLSCYC#
QHAFR#AETPNILVYE#evqlvesggglvqagdslrmscaasgFQLSCYC
mgwfrqapgkerefvasitQHAFRtyyadsvkgrftisrddarntvylqm
nslkpedtavyycaaAETPNILVYEnywgqgtqvtvss#GGAGATATACC
ATGGAAGTTCAACTGGTTGAATCTGGTGGCGGTTTAGTTCAAGCCGGTGA
TAGCCTTCGTATGAGCTGCGCCGCAAGCGGATTTCAGCTCTCGTGTTACT
GTATGGGTTGGTTTCGCCAGGCACCTGGTAAAGAACGTGAATTTGTGGCA
TCCATTACCCAGCACGCCTTTCGTACCTACTATGCCGATTCTGTTAAAGG
TCGCTTCACTATTTCACGCGATGATGCGCGTAATACCGTGTACTTACAGA
TGAACTCACTGAAACCTGAGGATACCGCCGTTTATTATTGTGCGGCAGCC
GAGACCCCGAATATCCTCGTGTACGAGAACTATTGGGGTCAGGGCACACA
AGTCACGGTCTCAAGCGGCGGAAGCTCTGGTGAACAGAAACTGATTTCAG
AAG
FQLSCYC#QHAFR#AETPNILVYE#evqlvesggglvqagd
slrlscaasgFQLSCYCmgcfrqapgkerefvasitQHAFRtyyadsvkg
rftisrddvrntvylqmnslkpedtavyycaaAETPNILVYEnywgqgtq
vtvss#ACCATGGAAGTTCAACTGGTTGAATCTGGTGGCGGTTTAGTTCA
AGCCGGTGATAGCCTTCGTCTGAGCTGCGCCGCAAGCGGATTTCAGCTCT
CGTGTTACTGTATGGGTTGTTTTCGCCAGGCACCTGGTAAAGAACGTGAA
TTTGTGGCATCCATTACCCAGCACGCCTTTCGTACCTACTATGCCGATTC
TGTTAAAGGTCGCTTCACTATTTCACGCGATGATGTGCGTAATACCGTGT
ACTTACAGATGAACTCACTGAAACCTGAGGATACCGCCGTTTATTATTGT
GCGGCAGCCGAGACCCCGAATATCCTCGTGTACGAGAACTATTGGGGTCA
GGGCACACAAGTCACGGTCTCAAGCGGCGGAAGCTCTGGTGAACAGAAAC
TGATTTCAGAAG
FQLSCYC#QHAFR#DPSFSDAIAS#evqlves
ggglvqagdslrlscaasgFQLSCYCmgwfrqapgkerefvasitQHAFR
tyyadsvkgrftisrddarntvylqmnslkpedtavyycvvGCGGATTTC
AGCTCTCGTGTTACTGTATGGGTTGGTTTCGCCAGGCACCTGGTAAAGAA
CGTGAATTTGTGGCATCCATTACCCAGCACGCCTTTCGTACCTACTATGC
CGATTCTGTTAAAGGTCGCTTCACTATTTCACGCGATGATGCGCGTAATA
CCGTGTACTTACAGATGAACTCACTGAAACCTGAGGATACCGCCGTTTAT
TATTGTGTGGTTGATCCTTCTTTCTCTGACGCCATCGCCTCGGACTATTG
GGGTCAGGGCACACAAGTCACGGTCTCAAGCGGCGGAAGCTCTGGTGAAC
AGAAACTGATTTCAGAAG
FQLSCYC#QHAFR#AETPNILVYE#e
vqlvesggglvqagdslrlscaasgFQLSCYCmgwfrqapgkehefvasi
tQHAFRtyyadsvkgrftisrddarntvylqmnslkpedtavyycaaAET
PNILVYEnywgqgtqvtvss#ATACCATGGAAGTTCAACTGGTTGAATCT
GGTGGCGGTTTAGTTCAAGCCGGTGATAGCCTTCGTCTGAGCTGCGCCGC
AAGCGGATTTCAGCTCTCGTGTTACTGTATGGGTTGGTTTCGCCAGGCAC
CTGGTAAAGAACATGAATTTGTGGCATCCATTACCCAGCACGCCTTTCGT
ACCTACTATGCCGATTCTGTTAAAGGTCGCTTCACTATTTCACGCGATGA
TGCGCGTAATACCGTGTACTTACAGATGAACTCACTGAAACCTGAGGATA
CCGCCGTTTATTATTGTGCGGCAGCCGAGACCCCGAATATCCTCGTGTAC
GAGAACTATTGGGGTCAGGGCACACAAGTCACGGTCTCAAGCGGCGGAAG
CTCTGGTGAACAGAAACTGATTTCAGAAG
FQLSCYC#QHAFR#A
ETPNILVYE#evqlvesggglvqagdslrlscaasgFQLSCYCmgcfrqa
pgkerefvasitQHAFRtyyadsvkgrftisrddarntvylqmnslkped
tavyycaaAETPNILVYEnywgqgtqvtvss#AGATATACCATGGAAGTT
CAACTGGTTGAATCTGGTGGCGGTTTAGTTCAAGCCGGTGATAGCCTTCG
TCTGAGCTGCGCCGCAAGCGGATTTCAGCTCTCGTGTTACTGTATGGGTT
GTTTTCGCCAGGCACCTGGTAAAGAACGTGAATTTGTGGCATCCATTACC
CAGCACGCCTTTCGTACCTACTATGCCGATTCTGTTAAAGGTCGCTTCAC
TATTTCACGCGATGATGCGCGTAATACCGTGTACTTACAGATGAACTCAC
TGAAACCTGAGGATACCGCCGTTTATTATTGTGCGGCAGCCGAGACCCCG
AATATCCTCGTGTACGAGAACTATTGGGGTCAGGGCACACAAGTCACGGT
CTCAAGCGGCGGAAGCTCTGGTGAACAGAAACTGATTTCAGAAG
FQLSCYC#QHAFR#AETPNILVYE#evqlvesggglvqagdslrlscaas
gFQLSCYCmgwfrqapgkerefvasitQHAFRtyyadsvkgrftisrdda
rntvylqmnslkpedtavyycaaAETPNILVYEnywcqgtqvtvss#ACC
ATGGAAGTTCAACTGGTTGAATCTGGTGGCGGTTTAGTTCAAGCCGGTGA
TAGCCTTCGTCTGAGCTGCGCCGCAAGCGGATTTCAGCTCTCGTGTTACT
GTATGGGTTGGTTTCGCCAGGCACCTGGTAAAGAACGTGAATTTGTGGCA
TCCATTACCCAGCACGCCTTTCGTACCTACTATGCCGATTCTGTTAAAGG
TCGCTTCACTATTTCACGCGATGATGCGCGTAATACCGTGTACTTACAGA
TGAACTCACTGAAACCTGAGGATACCGCCGTTTATTATTGTGCGGCAGCC
GAGACCCCGAATATCCTCGTGTACGAGAACTATTGGTGTCAGGGCACACA
AGTCACGGTCTCAAGCGGCGGAAGCTCTGGTGAACAGAAACTGATTTCAG
AAG
FQLSCYC#QHAFR#DPSFSDAIAS#evqlvesggglvqagd
slrlscaasgFQLSCYCmgwfrqapgkerefvasitQHAFRtyyadsvkg
rftisrddarntvylqmnslkpgdtavyycavDPSFSDAIASdywgqgtq
vtvsr#ATATACCATGGAAGTTCAACTGGTTGAATCTGGTGGCGGTTTAG
TTCAAGCCGGTGATAGCCTTCGTCTGAGCTGCGCCGCAAGCGGATTTCAG
CTCTCGTGTTACTGTATGGGTTGGTTTCGCCAGGCACCTGGTAAAGAACG
TGAATTTGTGGCATCCATTACCCAGCACGCCTTTCGTACCTACTATGCCG
ATTCTGTTAAAGGTCGCTTCACTATTTCACGCGATGATGCGCGTAATACC
GTGTACTTACAGATGAACTCACTGAAACCTGGGGATACCGCCGTTTATTA
TTGTGCGGTTGATCCTTCTTTCTCCGACGCTATCGCCTCGGACTATTGGG
GTCAGGGCACACAAGTCACGGTCTCACGCGGCGGAAGCTCTGGTGAACAG
AAACTGATTTCAGAAG
FQLSCYC#QHAFR#DPSFSDAIAS#evq
lvesggglvqagdrlrlscaasgFQLSCYCmgwfrqapgkerefvasitQ
HAFRtyyadsvkgrftisrddarntvylqmnslkpedtavyycavDPSFS
DAIASdywgqgtqvtvss#GGAGATATACCATGGAAGTTCAACTGGTTGA
ATCTGGTGGCGGTTTAGTTCAAGCCGGTGATAGACTTCGTCTGAGCTGCG
CCGCAAGCGGATTTCAGCTCTCGTGTTACTGTATGGGTTGGTTTCGCCAG
GCACCTGGTAAAGAACGTGAATTTGTGGCATCCATTACCCAGCACGCCTT
TCGTACCTACTATGCCGATTCTGTTAAAGGTCGCTTCACTATTTCACGCG
ATGATGCGCGTAATACCGTGTACTTACAGATGAACTCACTAAAACCTGAG
GATACCGCCGTTTATTATTGTGCGGTTGATCCTTCTTTCTCCGACGCTAT
CGCCTCGGACTATTGGGGTCAGGGCACACAAGTCACGGTCTCAAGCGGCG
GAAGCTCTGGTGAACAGAAACTGATTTCAGAAG
FQLSCYC#QHA
FR#AETPNILVYE#egqlvesggglvqagdslrlscaasgFQLSCYCmgw
frqapgkerefvasitQHAFRtyyadsvkgrftisrddarntvylqmnsl
kpedtavyycaaAETPNILVYEnywgqgtqvtvss#ACCATGGAAGGTCA
ACTGGTTGAATCTGGTGGCGGTTTAGTTCAAGCCGGTGATAGCCTTCGTC
TGAGCTGCGCCGCAAGCGGATTTCAGCTCTCGTGTTACTGTATGGGTTGG
TTTCGCCAGGCACCTGGTAAAGAACGTGAATTTGTGGCATCCATTACCCA
GCACGCCTTTCGTACCTACTATGCCGATTCTGTTAAAGGTCGCTTCACTA
TTTCACGCGATGATGCGCGTAATACCGTGTACTTACAGATGAACTCACTG
AAACCTGAGGATACCGCCGTTTATTATTGTGCGGCAGCCGAGACCCCGAA
TATCCTCGTGTACGAGAACTATTGGGGTCAGGGCACACAAGTCACGGTCT
CAAGCGGCGGAAGCTCTGGTGAACAGAAACTGATTTCAGAAG
FQ
LSCYC#QHAFR#AETPNILVYE#evqlvesggglvqagdslrlscaasgF
QLSCYCmgwfrqapgkerefvasitQHAFRtyyadsvkgrftisrddarn
tvylqmnslkpedtavyycaaAETPNILVYEnywgqgtqvtvsr#AAGGA
GATATACCATGGAAGTTCAACTGGTTGAATCTGGTGGCGGTTTAGTTCAA
GCCGGTGATAGCCTTCGTCTGAGCTGCGCCGCAAGCGGATTTCAGCTCTC
GTGTTACTGTATGGGTTGGTTTCGCCAGGCACCTGGTAAAGAACGTGAAT
TTGTGGCATCCATTACCCAGCACGCCTTTCGTACCTACTATGCCGATTCT
GTTAAAGGTCGCTTCACTATTTCACGCGATGATGCGCGTAATACCGTGTA
CTTACAGATGAACTCACTGAAACCTGAGGATACCGCCGTTTATTATTGTG
CGGCAGCCGAGACCCCGAATATCCTCGTGTACGAGAACTATTGGGGTCAG
GGCACACAAGTCACGGTCTCACGCGGCGGAAGCTCTGGTGAACAGAAACT
GATTTCAGAAG
FQLSCYC#QHAFR#AETPNILVYE#evqlvesg
gglvqagdslrlscaasgFQLSCYCigwfrqapgkerefvasitQHAFRt
yyadsvkgrftisrddarntvylqmnslkpedtavyycaaAETPNILVYE
nywgqgtqvtvss#ATACCATGGAAGTTCAACTGGTTGAATCTGGTGGCG
GTTTAGTTCAAGCCGGTGATAGCCTTCGTCTGAGCTGCGCCGCAAGCGGA
TTTCAGCTCTCGTGTTACTGTATAGGTTGGTTTCGCCAGGCACCTGGTAA
AGAACGTGAATTTGTGGCATCCATTACCCAGCACGCCTTTCGTACCTACT
ATGCCGATTCTGTTAAAGGTCGCTTCACTATTTCACGCGATGATGCGCGT
AATACCGTGTACTTACAGATGAACTCACTGAAACCTGAGGATACCGCCGT
TTATTATTGTGCGGCAGCCGAGACCCCGAATATCCTCGTGTACGAGAACT
ATTGGGGTCAGGGCACACAAGTCACGGTCTCAAGCGGCGGAAGCTCTGGT
GAACAGAAACTGATTTCAGAAG
FQLSCSC#QHAFR#AETPNILV
YE#evqlvesggglvqagdslrlscaasgFQLSCSCmgwfrqapgkeref
vasitQHAFRtyyadsvkgrftisrddarntvylqmnslkpedtavyyca
aAETPNILVYEnywgqgtqvtvss#AAGGAGATATACCATGGAAGTTCAA
CTGGTTGAATCTGGTGGCGGTTTAGTTCAAGCCGGTGATAGCCTTCGTCT
GAGCTGCGCCGCAAGCGGATTTCAGCTCTCGTGTTCCTGTATGGGTTGGT
TTCGCCAGGCACCTGGTAAAGAACGTGAATTTGTGGCATCCATTACCCAG
CACGCCTTTCGTACCTACTATGCCGATTCTGTTAAAGGTCGCTTCACTAT
TTCACGCGATGATGCGCGTAATACCGTGTACTTACAGATGAACTCACTGA
AACCTGAGGATACCGCCGTTTATTATTGTGCGGCAGCCGAGACCCCGAAT
ATCCTCGTGTACGAGAACTATTGGGGTCAGGGCACACAAGTCACGGTCTC
AAGCGGCGGAAGCTCTGGTGAACAGAAACTGATTTCAGAAG
FQL
SCYC#QHAFR#AETPNILVYE#evqlvesggglvqagdslrlscaasgFQ
LSCYCmgwfrqapgkerefvasitQHAFRtyyadsvkgrftnsrddarnt
vylqmnslkpedtavyycaaAETPNILVYEnywgqgtqvtvss#AAGGAG
ATATACCATGGAAGTTCAACTGGTTGAATCTGGTGGCGGTTTAGTTCAAG
CCGGTGATAGCCTTCGTCTGAGCTGCGCCGCAAGCGGATTTCAGCTCTCG
TGTTACTGTATGGGTTGGTTTCGCCAGGCACCTGGTAAAGAACGTGAATT
TGTGGCATCCATTACCCAGCACGCCTTTCGTACCTACTATGCCGATTCTG
TTAAAGGTCGCTTCACTAATTCACGCGATGATGCGCGTAATACCGTGTAC
TTACAGATGAACTCACTGAAACCTGAGGATACCGCCGTTTATTATTGTGC
GGCAGCCGAGACCCCGAATATCCTCGTGTACGAGAACTATTGGGGTCAGG
GCACACAAGTCACGGTCTCAAGCGGCGGAAGCTCTGGTGAACAGAAACTG
ATTTCAGAAG
FQLSCYC#QHAFR#DPSFSDAIAS#evqlvdsgg
glvqagdrlrlscaasgFQLSCYCmgwfrqapgkerefvasitQHAFRty
yadsvkgrftisrddarntvylqmnslkpedtavyycavDPSFSDAIASd
ywgqgtqvtvss#GAAGGAGATATACCATGGAAGTTCAACTGGTTGACTC
TGGTGGCGGTTTAGTTCAAGCCGGTGATCGCCTTCGTCTGAGCTGCGCCG
CAAGCGGATTTCAGCTCTCGTGTTACTGTATGGGTTGGTTTCGCCAGGCA
CCTGGTAAAGAACGTGAATTTGTGGCATCCATTACCCAGCACGCCTTTCG
TACCTACTATGCCGATTCTGTTAAAGGTCGCTTCACTATTTCACGCGATG
ATGCGCGTAATACCGTGTACTTACAGATGAACTCACTGAAACCTGAGGAT
ACCGCCGTTTATTATTGTGCGGTTGATCCTTCTTTCTCCGACGCTATCGC
CTCGGACTATTGGGGTCAGGGCACACAAGTCACGGTCTCAAGCGGCGGAA
GCTCTGGTGAACAGAAACTGATTTCAGAAG
FQLSCYC#QHAFR#
AETPNILVYE#evqlfesggglvqagdslrlscaasgFQLSCYCmgwfrq
apgkerefvasitQHAFRtyyadsvkgrftisrddarntvylqmnslkpe
dtavyycaaAETPNILVYEnywgqgtqvtvss#AGATATACCATGGAAGT
TCAACTGTTTGAATCTGGTGGCGGTTTAGTTCAAGCCGGTGATAGCCTTC
GTCTGAGCTGTGCCGCAAGCGGATTTCAGCTCTCGTGTTACTGTATGGGT
TGGTTTCGCCAGGCACCTGGTAAAGAACGTGAATTTGTGGCATCCATTAC
CCAGCACGCCTTTCGTACCTACTATGCCGATTCTGTTAAAGGTCGCTTCA
CTATTTCACGCGATGATGCGCGTAATACCGTGTACTTACAGATGAACTCA
CTGAAACCTGAGGATACCGCCGTTTATTATTGTGCGGCAGCCGAGACCCC
GAATATCCTCGTGTACGAGAACTATTGGGGTCAGGGCACACAAGTCACGG
TCTCAAGCGGCGGAAGCTCTGGTGAACAGAAACTGATTTCAGAAG
FQLSCYC#QHAFR#AETPNILVYE#evqlvesggglvqagdslrlscaa
sgFQLSCYCmgwfrqapgkerefvasitQHAFRtyyadsvkgrftisrdd
acntvylqmnslkpedtavyycaaAETPNILVYEnywgqgtqvtvss#AT
ATACCATGGAAGTTCAACTGGTTGAATCTGGTGGCGGTTTAGTTCAAGCC
GGTGATAGCCTTCGTCTGAGCTGCGCCGCAAGCGGATTTCAGCTCTCGTG
TTACTGTATGGGTTGGTTTCGCCAGGCACCTGGTAAAGAACGTGAATTTG
TGGCATCCATTACCCAGCACGCCTTTCGTACCTACTATGCCGATTCTGTT
AAAGGTCGCTTCACTATTTCACGCGATGATGCGTGTAATACCGTGTACTT
ACAGATGAACTCACTGAAACCTGAGGATACCGCCGTTTATTATTGTGCGG
CAGCCGAGACCCCGAATATCCTCGTGTACGAGAACTATTGGGGTCAGGGC
ACACAAGTCACGGTCTCAAGCGGCGGAAGCTCTGGTGAACAGAAACTGAT
TTCAGAAG
FQLSCYC#QHAFR#AETPNILVYE#evqlvdsgggl
vqagdslrlscaasgFQLSCYCmgwfrqapgkerefvasitQHAFRtyya
dsvkgrftisrddarntvylqmnslkpedtavyycaaAETPNILVYEnyw
gqgtqvtvss#GAAGGAGATATACCATGGAAGTTCAACTGGTTGACTCTG
GTGGCGGTTTAGTTCAAGCCGGTGATAGCCTTCGTCTGAGCTGCGCCGCA
AGCGGATTTCAGCTCTCGTGTTACTGTATGGGTTGGTTTCGCCAGGCACC
TGGTAAAGAACGTGAATTTGTGGCATCCATTACCCAGCACGCCTTTCGTA
CCTACTATGCCGATTCTGTTAAAGGTCGCTTCACTATTTCACGCGATGAT
GCGCGTAATACCGTGTACTTACAGATGAACTCACTGAAACCTGAGGATAC
CGCCGTTTATTATTGTGCGGCAGCCGAGACCCCGAATATCCTCGTGTACG
AGAACTATTGGGGTCAGGGCACACAAGTCACGGTCTCAAGCGGCGGAAGC
TCTGGTGAACAGAAACTGATTTCAGAAG
FQLSCYC#QHAFR#AE
TPNILVYE#evqlvesggglvqagdslrlscvasgFQLSCYCmgwfrqap
gkerefvasitQHAFRtyyadsvkgrftisrddarntvylqmnslkpedt
avyycaaAETPNILVYEnywgqgtqvtvss#GAAGGAGATATACCATGGA
AGTTCAACTGGTTGAATCTGGTGGCGGTTTAGTTCAAGCCGGTGATAGCC
TTCGTCTGAGCTGCGTCGCAAGCGGATTTCAGCTCTCGTGTTACTGTATG
GGTTGGTTTCGCCAGGCACCTGGTAAAGAACGTGAATTTGTGGCATCCAT
TACCCAGCACGCCTTTCGTACCTACTATGCCGATTCTGTTAAAGGTCGCT
TCACTATTTCACGCGATGATGCGCGTAATACCGTGTACTTACAGATGAAC
TCACTGAAACCTGAGGATACCGCCGTTTATTATTGTGCGGCAGCCGAGAC
CCCGAATATCCTCGTGTACGAGAACTATTGGGGTCAGGGCACACAAGTCA
CGGTCTCAAGCGGCGGAAGCTCTGGTGAACAGAAACTGATTTCAGAAG
FQLSCYC#QHAFR#AETPNILVYE#evqlvesggglvqagdslrls
raasgFQLSCYCmgwfrqapgkerefvasitQHAFRtyyadsvkgrftis
rddarntvylqmnslkpedtavyycaaAETPNILVYEnywgqgtqvtvss
AAGGAGATATACCATGGAAGTTCAACTGGTTGAATCTGGTGGCGGTTTA
GTTCAAGCCGGTGATAGCCTTCGTCTGAGCCGCGCCGCAAGCGGATTTCA
GCTCTCGTGTTACTGTATGGGTTGGTTTCGCCAGGCACCTGGTAAAGAAC
GTGAATTTGTGGCATCCATTACCCAGCACGCCTTTCGTACCTACTATGCC
GATTCTGTTAAAGGTCGCTTCACTATTTCACGCGATGATGCGCGTAATAC
CGTGTACTTACAGATGAACTCACTGAAACCTGAGGATACCGCCGTTTATT
ATTGTGCGGCAGCCGAGACCCCGAATATCCTCGTGTACGAGAACTATTGG
GGTCAGGGCACACAAGTCACGGTCTCAAGCGGCGGAAGCTCTGGTGAACA
GAAACTGATTTCAGAAG
FQLSCYC#QHAFR#GEHCLAF#qvqlq
esggvlvqvgdslrlscaasgFQLSCYCmgwfrqapgkerefvasitQHA
FRtyyadsvkgrftisrddarntvylqmnslkpedtavyycaaGEHCLAF
dywgqgtqvtvss#AGGAGATATACCATGCAGGTTCAACTGCAAGAATCT
GGTGGCGTTTTAGTTCAAGTCGGTGATAGCCTTCGTCTGAGCTGCGCCGC
AAGCGGATTTCAGCTCTCGTGTTACTGTATGGGTTGGTTTCGCCAGGCAC
CTGGTAAAGAACGTGAATTTGTGGCATCCATTACCCAGCACGCCTTTCGT
ACCTACTATGCCGATTCTGTTAAAGGTCGCTTCACTATTTCACGCGATGA
TGCGCGTAATACCGTGTACTTACAGATGAACTCACTGAAACCTGAGGATA
CCGCCGTTTATTATTGTGCGGCAGGCGAGCACTGTCTCGCCTTCGACTAT
TGGGGTCAGGGCACACAAGTCACGGTCTCAAGCGGCGGAAGCTCTGGTGA
ACAGAAACTGATTTCAGAAG
FQLSCYC#QHAFR#GEHCLAF#qv
qlqesggvlvhagdslrlscaasgFQLSCYCmgwfrqapgkerefvasit
QHAFRtyyadsvkgrftisrddarntvylqmnslkpedtavyycaaGEHC
LAFdywvqgtqvtvss#GAAGGAGATATACCATGCAGGTTCAACTGCAAG
AATCTGGTGGCGTTTTAGTTCACGCCGGTGATAGCCTTCGTCTGAGCTGC
GCCGCAAGCGGATTTCAGCTCTCGTGTTACTGTATGGGTTGGTTTCGCCA
GGCACCTGGTAAAGAACGTGAATTTGTGGCATCCATTACCCAGCACGCCT
TTCGTACCTACTATGCCGATTCTGTTAAAGGTCGCTTCACTATTTCACGC
GATGATGCGCGTAATACCGTGTACTTACAGATGAACTCACTGAAACCTGA
GGATACCGCCGTTTATTATTGTGCGGCAGGCGAGCACTGTCTCGCCTTCG
ACTATTGGGTTCAGGGCACACAAGTCACGGTCTCAAGCGGCGGAAGCTCT
GGTGAACAGAAACTGATTTCAGAAG
FQLSCYC#QHAFR#AETPN
ILVYE#evqlvesggglvqagdslrlscaasgFQLSCYCmgwfrqapgke
refvasitQHAFRtyyadsvkgrftisrddarntvylqmnslkpedtavy
ycaaAETPNILVYEnywvqgtqvtvss#ATATACCATGGAAGTTCAACTG
GTTGAATCTGGTGGCGGTTTAGTTCAAGCCGGTGATAGCCTTCGTCTGAG
CTGCGCTGCAAGCGGATTTCAGCTCTCGTGTTACTGTATGGGTTGGTTTC
GCCAGGCACCTGGTAAAGAACGTGAATTTGTGGCATCCATTACCCAGCAC
GCCTTTCGTACCTACTATGCCGATTCTGTTAAAGGTCGCTTCACTATTTC
ACGCGATGATGCGCGTAATACCGTGTACTTACAGATGAACTCACTGAAAC
CTGAGGATACCGCCGTTTATTATTGTGCGGCAGCCGAGACCCCGAATATC
CTCGTGTACGAGAACTATTGGGTTCAGGGCACACAAGTCACGGTCTCAAG
CGGCGGAAGCTCTTGTGAACAGAAACTGATTTCAGAAG
FQLSCY
C#QHAFR#GEHCLAF#qvqlqesggvlvqagdslrlscaasgFQLSCYCm
gwfrqapgkerefvasitQHAFRtyyadsvkgrftisrddarntvylqmn
slkpedtavyycaaGEHCLAFaywgqgtqvtvss#AGATATACCATGCAG
GTTCAACTGCAAGAATCTGGTGGCGTTTTAGTTCAAGCCGGTGATAGCCT
TCGTCTGAGCTGCGCCGCAAGCGGATTTCAGCTCTCGTGTTACTGTATGG
GTTGGTTTCGCCAGGCACCTGGTAAAGAACGTGAATTTGTGGCATCCATT
ACCCAGCACGCCTTTCGTACCTACTATGCCGATTCTGTTAAAGGTCGCTT
CACTATTTCACGCGATGATGCGCGTAATACCGTGTACTTACAGATGAACT
CACTGAAACCTGAGGATACCGCCGTTTATTATTGTGCGGCAGGCGAGCAC
TGTCTCGCCTTCGCCTATTGGGGTCAGGGCACACAAGTCACGGTCTCAAG
CGGCGGAAGCTCTGGTGAACAGAAACTGATTTCAGAAG
FQLSCY
C#QHAFR#AETPNILVYE#evqlvesggglvqagdslrlscaasgFQLSC
YCmgwfrqapgkerefvasitQHAFRtyyadsvkgrftisrddarntvyl
qmnslkpedtavyycaaAETPNILVYEnywgqgtqgtvss#ACCATGGAA
GTTCAACTGGTTGAATCTGGTGGCGGTTTAGTTCAAGCCGGTGATAGCCT
TCGTCTGAGCTGCGCCGCAAGCGGATTTCAGCTCTCGTGTTACTGTATGG
GTTGGTTTCGCCAGGCACCTGGTAAAGAACGTGAATTTGTGGCATCCATT
ACCCAGCACGCCTTTCGTACCTACTATGCCGATTCTGTTAAAGGTCGCTT
CACTATTTCACGCGATGATGCGCGTAATACCGTGTACTTACAGATGAACT
CACTGAAACCTGAGGATACCGCCGTTTATTATTGTGCGGCAGCCGAGACC
CCGAATATCCTCGTGTACGAGAACTATTGGGGTCAGGGCACACAAGGCAC
GGTCTCAAGCGGCGGAAGCTCTGGTGCACAGAAACTGATTTCAGAAGCCA
A
FQLSCYC#QHAFR#GEHCLAF#qvqlqesggvlvqagdslrls
caasgFQLSCYCmgwfrqapgkerefvasitQHAFRtyyadsvkgrftis
rddarntvylqmnslkpedtavyycaaGEHCLAFdywgqgtqgtvss#AT
ATACCATGCAGGTTCAACTGCAAGAATCTGGTGGCGTTTTAGTTCAAGCC
GGTGATAGCCTTCGTCTGAGCTGCGCCGCAAGCGGATTTCAGCTCTCGTG
TTACTGTATGGGTTGGTTTCGCCAGGCACCTGGTAAAGAACGTGAATTTG
TGGCATCCATTACCCAGCACGCCTTTCGTACCTACTATGCCGATTCTGTT
AAAGGTCGCTTCACTATTTCACGCGATGATGCGCGTAATACCGTGTACTT
ACAGATGAACTCACTGAAACCTGAGGATACCGCCGTTTATTATTGTGCGG
CAGGCGAGCACTGTCTCGCCTTCGACTATTGGGGTCAGGGCACACAAGGC
ACGGTCTCAAGCGGCGGAAGCTCTGGTGAACAGAAACTGATTTCAGAAGC
CAA
FQLSCYC#QHAFR#DPSFSDAIAS#evqlvesggglvqagd
slrlscaasgFQLSCYCmgwfrqapgkerefvasitQHAFRtyyadsvkg
rftisrddarntvylqmnslkpedtavyycavDPSFSDAIASdywgqgtq
vtfss#ACCATGGAAGTTCAACTGGTTGAATCTGGTGGCGGTTTAGTTCA
AGCCGGTGATAGCCTTCGTCTGAGCTGCGCCGCAAGCGGATTTCAGCTCT
CGTGTTACTGTATGGGTTGGTTTCGCCAGGCACCTGGTAAAGAACGTGAA
TTTGTGGCATCCATTACCCAGCACGCCTTTCGTACCTACTATGCCGATTC
TGTTAAAGGTCGCTTCACTATTTCACGCGATGATGCGCGTAATACCGTGT
ACTTACAGATGAACTCACTGAAACCTGAGGATACCGCCGTTTATTATTGT
GCGGTTGATCCTTCTTTCTCCGACGCTATCGCCTCGGACTATTGGGGTCA
GGGCACACAAGTCACGTTCTCAAGCGGCGGAAGCTCTGGTGAACAGAAAC
TGATTTCAGAAGCCAA
FQLSCYC#QHAFR#GEHCLAF#qvqlqe
sggvlvqagdslrlscaasgFQLSCYCmgwfrqapgkerefvasitQHAF
RtyyadsvkgrftisrddarntvylqmsslkpedtavyycaaGEHCLAFd
ywgqgtqvtvss#GGAGATATACCATGCAGGTTCAACTGCAAGAATCTGG
TGGCGTTTTAGTTCAAGCCGGTGATAGCCTTCGTCTGAGCTGCGCCGCAA
GCGGATTTCAGCTCTCGTGTTACTGTATGGGTTGGTTTCGCCAGGCACCT
GGTAAAGAACGTGAATTTGTGGCATCCATTACCCAGCACGCCTTTCGTAC
CTACTATGCCGATTCTGTTAAAGGTCGCTTCACTATTTCACGCGATGATG
CGCGTAATACCGTGTACTTACAGATGAGCTCACTGAAACCTGAGGATACC
GCCGTTTATTATTGTGCGGCAGGCGAGCACTGTCTCGCCTTCGACTATTG
GGGTCAGGGCACACAAGTCACGGTCTCAAGCGGCGGAAGCTCTGGTGAAC
AGAAACTGATTTCAGAAGCCAA
FQLSCYC#QHAFR#AETPNILV
YE#evqlvesggglvqagdslrlscaasgFQLSCYCmgwfrqapgkeref
vasitQHAFRtyyadsvkgrftisrddarntvylqmnslkpedtavyyca
aAETPNILVYEnywgqdtqvtvss#GAAGGAGATATACCATGGAAGTTCA
ACTGGTTGAATCTGGTGGCGGTTTAGTTCAAGCCGGTGATAGCCTTCGTC
TGAGCTGCGCCGCAAGCGGATTTCAGCTCTCGTGTTACTGTATGGGTTGG
TTTCGCCAGGCACCTGGTAAAGAACGTGAATTTGTGGCATCCATTACCCA
GCACGCCTTTCGTACCTACTATGCCGATTCTGTTAAAGGTCGCTTCACTA
TTTCACGCGATGATGCGCGTAATACCGTGTACTTACAGATGAACTCACTG
AAACCTGAGGATACCGCCGTTTATTATTGTGCGGCAGCCGAGACCCCGAA
TATCCTCGTGTACGAGAACTATTGGGGTCAGGACACACAAGTCACGGTCT
CAAGCGGCGGAAGCTCTGGTGAACAGAAACTGATTTCAGAAGCCAA
FQLSCYC#QHAFR#AETPNILVYE#evqlvesggglvqagdslrlsca
asgFQLSCYCmgwfrqapgkerefvasitQHAFRtyyadsvkgrftisrd
darntvylqmnslkpedtavyycaaAETPNILVYEnywgqgtrvtvss#A
GGAGATATACCATGGAAGTTCAACTGGTTGAATCTGGTGGCGGTTTAGTT
CAAGCCGGTGATAGCCTTCGTCTGAGCTGCGCCGCAAGCGGATTTCAGCT
CTCGTGTTACTGTATGGGTTGGTTTCGCCAGGCACCTGGTAAAGAACGTG
AATTTGTGGCATCCATTACCCAGCACGCCTTTCGTACCTACTATGCCGAT
TCTGTTAAAGGTCGCTTCACTATTTCACGCGATGATGCGCGTAATACCGT
GTACTTACAGATGAACTCACTGAAACCTGAGGATACCGCCGTTTATTATT
GTGCGGCAGCCGAGACCCCGAATATCCTCGTGTACGAGAACTATTGGGGT
CAGGGCACACGAGTCACGGTCTCAAGCGGCGGAAGCTCTGGTGAACAGAA
ACTGATTTCAGAAGCCAA
FQLSCYC#QHAFR#GEHCLAF#qvql
qescgvlvqvgdslrlscaasgFQLSCYCmgwfrqapgkerefvasitQH
AFRtyyadsvkgrftisrddarntvylqmnslkpedtavyycaaGEHCLA
Fdywgqgtqvtvss#GAAGGAGATATACCATGCAGGTTCAACTGCAAGAA
TCTTGTGGCGTTTTAGTTCAAGTCGGTGATAGCCTTCGTCTGAGCTGCGC
CGCAAGCGGATTTCAGCTCTCGTGTTACTGTATGGGTTGGTTTCGCCAGG
CACCTGGTAAAGAACGTGAATTTGTGGCATCCATTACCCAGCACGCCTTT
CGTACCTACTATGCCGATTCTGTTAAAGGTCGCTTCACTATTTCACGCGA
TGATGCGCGTAATACCGTGTACTTACAGATGAACTCACTGAAACCTGAGG
ATACCGCCGTTTATTATTGTGCGGCAGGCGAGCACTGTCTCGCCTTCGAC
TATTGGGGTCAGGGCACACAAGTCACGGTCTCAAGCGGCGGAAGCTCTGG
TGAACAGAAACTGATTTCAGAAGCCAA
FQLSCYC#QHSFR#DPS
FSDAIVS#evqlvesggglvqagdslrlscaasgFQLSCYCmgwfrqapg
kerefvasitQHSFRtyyadsvkgrftisrddarntvylqmnslkpedta
vyycavGCGGATTTCAGCTCTCGTGTTACTGTATGGGTTGGTTTCGCCAG
GCACCTGGTAAAGAACGTGAATTTGTGGCATCCATTACCCAGCACTCCTT
TCGTACCTACTATGCCGATTCTGTTAAAGGTCGCTTCACTATTTCACGCG
ATGATGCGCGTAATACCGTGTACTTACAGATGAACTCACTGAAACCTGAG
GATACCGCCGTTTATTATTGTGCGGTTGATCCTTCTTTCTCCGACGCTAT
CGTCTCGGACTATTGGGGTCAGGGCACACAAGTCACGGTCTCAAGCGGCG
GAAGCTCTGGTGAACAGAAACTGATTTCAGAAGCCAA
FQLSCYCQHAFR#DPSFSDAIAS#evqlvesggglvqagdslrlscaasg
FQLSCY
CmgwfrqapgkerefvasitQHAFRtyyadsvkgrftisrddarntvylh
mnslkpedtavyycavDPSFSDAIASdywgqgtqvtvss#GAAGGAGATA
TACCATGGAAGTTCAACTGGTTGAATCTGGTGGCGGTTTAGTTCAAGCCG
GTGATAGCCTTCGTCTGAGCTGCGCCGCAAGCGGATTTCAGCTCTCGTGT
TACTGTATGGGTTGGTTTCGCCAGGCACCTGGTAAAGAACGTGAATTTGT
GGCATCCATTACCCAGCACGCCTTTCGTACCTACTATGCCGATTCTGTTA
AAGGTCGCTTCACTATTTCACGCGATGATGCGCGTAATACCGTGTACTTA
CACATGAACTCACTGAAACCTGAGGATACCGCCGTTTATTATTGTGCGGT
TGATCCTTCTTTCTCCGACGCTATCGCCTCGGACTATTGGGGTCAGGGCA
CACAAGTCACGGTCTCAAGCGGCGGAAGCTCTGGTGAACAGAAACTGATT
TCAGAAGCCAA
FQLSCYC#QHAFR#GEHCLAF#qvqlqesggvl
vqagdglrlscaasgFQLSCYCmgwfrqapgkerefvasitQHAFRtyya
dsvkgrftisrddarntvylqmnslkpedtavyycaaGEHCLAFdywgqg
tqvtvss#AGGAGATATACCATGCAGGTTCAACTGCAAGAATCTGGTGGC
GTTTTAGTTCAAGCCGGTGATGGCCTTCGTCTGAGCTGCGCCGCAAGCGG
ATTTCAGCTCTCGTGTTACTGTATGGGTTGGTTTCGCCAGGCACCTGGTA
AAGAACGTGAATTTGTGGCATCCATTACCCAGCACGCCTTTCGTACCTAC
TATGCCGATTCTGTTAAAGGTCGCTTCACTATTTCACGCGATGATGCGCG
TAATACCGTGTACTTACAGATGAACTCACTGAAACCTGAGGATACCGCCG
TTTATTATTGTGCGGCAGGCGAGCACTGTCTCGCCTTCGACTATTGGGGT
CAGGGCACACAAGTCACGGTCTCAAGCGGCGGAAGCTCTGGTGAACAGAA
ACTGATTTCAGAAGCCAA
FQLSCYC#QHAFR#GEHCLAF#qvql
qesggvlvqagdslrlscaasgFQLSCYCmgwfrqapgkerefvasitQH
AFRtyyadsvkgrftisrddarntvylqmnslkpedttvyycaaGEHCLA
Fdywgqgtqvtvss#AGGAGATATACCATGCAGGTTCAACTGCAAGAATC
TGGTGGCGTTTTAGTTCAAGCCGGTGATAGCCTTCGTCTGAGCTGCGCCG
CAAGCGGATTTCAGCTCTCGTGTTACTGTATGGGTTGGTTTCGCCAGGCA
CCTGGTAAAGAACGTGAATTTGTGGCATCCATTACCCAGCACGCCTTTCG
TACCTACTATGCCGATTCTGTTAAAGGTCGCTTCACTATTTCACGCGATG
ATGCGCGTAATACCGTGTACTTACAGATGAACTCACTGAAACCTGAGGAT
ACCACCGTTTATTATTGTGCGGCAGGCGAGCACTGTCTCGCCTTCGACTA
TTGGGGTCAGGGCACACAAGTCACGGTCTCAAGCGGCGGAAGCTCTGGTG
AACAGAAACTGATTTCAGAAGCCAA
FQLSCYC#QHAFR#GEHCL
AF#qvqlqesggvlvqagdslrlscaasgFQLSCYCmgwfrqapgkeref
vasitQHAFRtyyadsvkgrftisrddarntvylqmnslkpedtavyyca
aGEHCLAFdywgqgtqvtvts#AGGAGATATACCATGCAGGTTCAACTGC
AAGAATCTGGTGGCGTTTTAGTTCAAGCCGGTGATAGCCTTCGTCTGAGC
TGCGCCGCAAGCGGATTTCAGCTCTCGTGTTACTGTATGGGTTGGTTTCG
CCAGGCACCTGGTAAAGAACGTGAATTTGTGGCATCCATTACCCAGCACG
CCTTTCGTACCTACTATGCCGATTCTGTTAAAGGTCGCTTCACTATTTCA
CGCGATGATGCGCGTAATACCGTGTACTTACAGATGAACTCACTGAAACC
TGAGGATACCGCCGTTTATTATTGTGCGGCAGGCGAGCACTGTCTCGCCT
TCGACTATTGGGGTCAGGGCACACAAGTCACGGTCACAAGCGGCGGAAGC
TCTGGTGAACAGAAACTGATTTCAGAAGCCAA
FQLSCYC#QHAF
R#DPSFSDAIAS#evqlvesggglvqagdslrlscaasgFQLSCYCmgwf
rqapgkerefvasitQHAFRtyyadsvkgrftisrddarntvylqmnslk
pedtavyycavDPSFSDAIASdywgqgtqgtvss#AGATATACCATGGAA
GTTCAACTGGTTGAATCTGGTGGCGGTTTAGTTCAAGCCGGTGATAGCCT
TCGTCTGAGCTGCGCCGCAAGCGGATTTCAGCTCTCGTGTTACTGTATGG
GTTGGTTTCGCCAGGCACCTGGTAAAGAACGTGAATTTGTGGCATCCATT
ACCCAGCACGCCTTTCGTACCTACTATGCCGATTCTGTTAAAGGTCGCTT
CACTATTTCACGCGATGATGCGCGTAATACCGTGTACTTACAGATGAACT
CACTGAAACCTGAGGATACCGCCGTTTATTATTGTGCGGTTGATCCTTCT
TTCTCCGACGCTATCGCCTCGGACTATTGGGGTCAGGGCACACAAGGCAC
GGTCTCAAGCGGCGGAAGCTCTGGTGAAAAGAAACTGATTTCAGAAGCCA
A
FQLSCYC#QHAFR#AETPNILVYE#evrlvesggglvqagdsl
rlscaasgFQLSCYCmgwfrqapgkerefvasitQHAFRtyyadsvkgrf
tisrddarntvylqmnslkpedtavyycaaAETPNILVYEnywgqgtqvt
vss#AGGAGATATACCATGGAAGTTCGACTGGTTGAATCTGGTGGCGGTT
TAGTTCAAGCCGGTGATAGCCTTCGTCTGAGCTGCGCCGCAAGCGGATTT
CAGCTCTCGTGTTACTGTATGGGTTGGTTTCGCCAGGCACCTGGTAAAGA
ACGTGAATTTGTGGCATCCATTACCCAGCACGCCTTTCGTACCTACTATG
CCGATTCTGTTAAAGGTCGCTTCACTATTTCACGCGATGATGCGCGTAAT
ACCGTGTACTTACAGATGAACTCACTGAAACCTGAGGATACCGCCGTTTA
TTATTGTGCGGCAGCCGAGACCCCGAATATCCTCGTGTACGAGAACTATT
GGGGTCAGGGCACACAAGTCACGGTCTCAAGCGGCGGAAGCTCTGGTGAA
CAGAAACTGATTTCAGAAGCCAA
FPLSCYC#QHAFR#AETPNIL
VYE#evqlvesggglvqagdslrlscaasgFPLSCYCmgwfrqapgkere
fvasitQHAFRtyyadsvkgrftisrddarntvylqmnslkpedtavyyc
aaAETPNILVYEnywgqgtqvtvss#ATACCATGGAAGTTCAACTGGTTG
AATCTGGTGGCGGTTTAGTTCAAGCCGGTGATAGCCTTCGTCTGAGCTGC
GCCGCAAGCGGATTTCCGCTCTCGTGTTACTGTATGGGTTGGTTTCGCCA
GGCACCTGGTAAAGAACGTGAATTTGTGGCATCCATTACCCAGCACGCCT
TTCGTACCTACTATGCCGATTCTGTTAAAGGTCGCTTCACTATTTCACGC
GATGATGCGCGTAATACCGTGTACTTACAGATGAACTCACTGAAACCTGA
GGATACCGCCGTTTATTATTGTGCGGCAGCCGAGACCCCGAATATCCTCG
TGTACGAGAACTATTGGGGTCAGGGCACACAAGTCACGGTCTCAAGCGGC
GGAAGCTCTGGTGAACAGAAACTGATTTCAGAAGCCAA
FQLSCY
C#QHAFR#AETPNILVHE#evqlvesggglvqagdslrIncaasgFQLSC
YCmgwfrqapgkerefvasitQHAFRtyyadsvkgrftisrddarntvyl
qmnslkpedtavyycaaAETPNILVHEnywgqgtqgtvss#GGAGATATA
CCATGGAAGTTCAACTGGTTGAATCTGGTGGCGGTTTAGTTCAAGCCGGT
GATAGCCTTCGTCTGAACTGCGCCGCAAGCGGATTTCAGCTCTCGTGTTA
CTGTATGGGTTGGTTTCGCCAGGCACCTGGTAAAGAACGTGAATTTGTGG
CATCCATTACCCAGCACGCCTTTCGTACCTACTATGCCGATTCTGTTAAA
GGTCGCTTCACTATTTCACGCGATGATGCGCGTAATACCGTGTACCTACA
GATGAACTCACTGAAACCTGAGGATACCGCCGTTTATTATTGTGCGGCAG
CCGAGACCCCGAATATCCTCGTGCACGAGAACTATTGGGGTCAGGGCACA
CAAGGCACGGTCTCAAGCGGCGGAAGCTCTGGTGAACAGAAACTGATTTC
AGAAGCCAA
FQLSCYC#QHAFR#DPSFSDAIAS#evqlvesggg
lvkagdslrlscaasgFQLSCYCmgwfrqapgkerefvasitQHAFRtyy
adsvkgrftisrddarntvylqmnslkpedtavyycavDPSFSDAIASdy
wgqgtqvtvss#ACCATGGAAGTTCAACTGGTTGAATCTGGTGGCGGTTT
AGTTAAAGCCGGTGATAGCCTTCGTCTGAGCTGCGCCGCAAGCGGATTTC
AGCTCTCGTGTTACTGTATGGGTTGGTTTCGCCAGGCACCTGGTAAAGAA
CGTGAATTTGTGGCATCCATTACCCAGCACGCCTTTCGTACCTACTATGC
CGATTCTGTTAAAGGTCGCTTCACTATTTCACGCGATGATGCGCGTAATA
CCGTGTACTTACAGATGAACTCACTGAAACCTGAGGATACCGCCGTTTAT
TATTGTGCGGTTGATCCTTCTTTCTCCGACGCTATCGCCTCGGACTATTG
GGGTCAGGGCACACAAGTCACGGTCTCAAGCGGCGGAAGCTCTGGTGAAC
AGAAACTGATTTCAGAAGCCAA
FQLSCYC#QHAFR#AETPNILV
YE#evqlvdsggglvqagdrlrlscaasgFQLSCYCmgwfrqapgkeref
vasitQHAFRtyyadsvkgrftisrddarntvylqmnslkpedtavyyca
aAETPNILVYEnywgqgtqgtvss#GAAGGAGATATACCATGGAAGTTCA
ACTGGTTGACTCTGGTGGCGGTTTAGTTCAAGCCGGTGATCGCCTTCGTC
TGAGCTGCGCCGCAAGCGGATTTCAGCTCTCGTGTTACTGTATGGGTTGG
TTTCGCCAGGCACCTGGTAAAGAACGTGAATTTGTGGCATCCATTACCCA
GCACGCCTTTCGTACCTACTATGCCGATTCTGTTAAAGGTCGCTTCACTA
TTTCACGCGATGATGCGCGTAATACCGTGTACTTACAGATGAACTCACTG
AAACCTGAGGATACCGCCGTTTATTATTGTGCGGCAGCCGAGACCCCGAA
TATCCTCGTGTACGAGAACTATTGGGGTCAGGGCACACAAGGCACGGTCT
CAAGCGGCGGAAGCTCTGGTGAACAGAAACTGATTTCAGAAGCCAA
FQLSCSC#QHAFR#DPSFSDAIAS#evqlvesggglvqagdrlrlsca
asgFQLSCSCmgwfrqapgkerefvasitQHAFRtyyadsvkgrftisrd
darntvylqmnslkpedtavyycavDPSFSDAIASdywgqgtqgtvss#A
AGGAGATATACCATGGAAGTTCAACTGGTTGAATCTGGTGGCGGTTTAGT
TCAAGCCGGTGATAGACTTCGTCTGAGCTGCGCCGCAAGCGGATTTCAGC
TCTCGTGTTCCTGTATGGGTTGGTTTCGCCAGGCACCTGGTAAAGAACGT
GAATTTGTGGCATCCATTACCCAGCACGCCTTTCGTACCTACTATGCCGA
TTCTGTTAAAGGTCGCTTCACTATTTCACGCGATGATGCGCGTAATACCG
TGTACTTACAGATGAACTCACTGAAACCTGAGGATACCGCCGTTTATTAT
TGTGCGGTTGATCCTTCTTTCTCCGACGCTATCGCCTCGGACTATTGGGG
TCAGGGCACACAAGGCACGGTCTCAAGCGGCGGAAGCTCTGGTGAACAGA
AACTGATTTCAGAAGCCAA
FQLSCYC#QHAFR#AETPNILVYE#
evqlvesggglvqagdslrlscaasgFQLSCYCmgwfrqapgkerefvat
itQHAFRtyyadsvkgrftisrddarntvylqmnslkpedtavyycaaAE
TPNILVYEnywgqgtqvtvss#ATACCATGGAAGTTCAACTGGTTGAATC
TGGTGGCGGTTTAGTTCAAGCCGGTGATAGCCTTCGTCTGAGCTGCGCCG
CAAGCGGATTTCAGCTCTCGTGTTACTGTATGGGTTGGTTTCGCCAGGCA
CCTGGTAAAGAACGTGAATTTGTGGCAACCATTACCCAGCACGCCTTTCG
TACCTACTATGCCGATTCTGTTAAAGGTCGCTTCACTATTTCACGCGATG
ATGCGCGTAATACCGTGTACTTACAGATGAACTCACTGAAACCTGAGGAT
ACCGCCGTTTATTATTGTGCGGCAGCCGAGACCCCGAATATCCTCGTGTA
CGAGAACTATTGGGGTCAGGGCACACAAGTCACGGTCTCAAGCGGCGGAA
GCTCTGGTGAACAGAAACTGATTTCAGAAGCCAA
FQLSCYC#QH
AFR#DPSFSDAIAS#evqlvesggglvhagdrlrlscaasgFQLSCYCmg
wfrqapgkerefvasitQHAFRtyyadsvkgrftisrddarntvylqmns
lkpedtavyycavDPSFSDAIASdywgqgtqvtvss#GAAGGAGATATAC
CATGGAAGTTCAACTGGTTGAATCTGGTGGCGGTTTAGTTCACGCCGGTG
ATCGCCTTCGTCTGAGCTGCGCCGCAAGCGGATTTCAGCTCTCGTGTTAC
TGTATGGGTTGGTTTCGCCAGGCACCTGGTAAAGAACGTGAATTTGTGGC
ATCCATTACCCAGCACGCCTTTCGTACCTACTATGCCGATTCTGTTAAAG
GTCGCTTCACTATTTCACGCGATGATGCGCGTAATACCGTGTACTTACAG
ATGAACTCACTGAAACCTGAGGATACCGCCGTTTATTATTGTGCGGTTGA
TCCTTCTTTCTCCGACGCTATCGCCTCGGACTATTGGGGTCAGGGCACAC
AAGTCACGGTCTCAAGCGGCGGAAGCTCTGGTGAACAGAAACTGATTTCA
GAAGCCAA
FQLSCYC#QHAFR#AETPNILVYE#evqlvesgggl
vqagdslrlscaasgFQLSCYCmgwfrqapgkerefvasitQHAFRtyya
dsvkgrftisrddarntvylqmnspkpedtavyycaaAETPNILVYEnyw
gqgtqvtvss#ACCATGGAAGTTCAACTGGTTGAATCTGGTGGCGGTTTA
GTTCAAGCCGGTGATAGCCTTCGTCTGAGCTGCGCCGCAAGCGGATTTCA
GCTCTCGTGTTACTGTATGGGTTGGTTTCGCCAGGCACCTGGTAAAGAAC
GTGAATTTGTGGCATCCATTACCCAGCACGCCTTTCGTACCTACTATGCC
GATTCTGTTAAAGGTCGCTTCACTATTTCACGCGATGATGCGCGTAATAC
CGTGTACTTACAGATGAACTCACCGAAACCTGAGGATACCGCCGTTTATT
ATTGTGCGGCAGCCGAGACCCCGAATATCCTCGTGTACGAGAACTATTGG
GGTCAGGGCACACAAGTCACGGTCTCAAGCGGCGGAAGCTCTGGTGAACA
GAAACTGATTTCAGAAGCCAA
FQLSCYC#QHAFR#GEHCLAF#q
vqlqesggvlvhagdrlrlscaasgFQLSCYCmgwfrqapgkerefvasi
tQHAFRtyyadsvkgrftisrddarntvylqmnslkpedtavyycaaGEH
CLAFdywgqgtqvtvss#GAAGGAGATATACCATGCAGGTTCAACTGCAA
GAATCTGGTGGCGTTTTAGTTCACGCCGGTGATCGCCTTCGTCTGAGCTG
CGCCGCAAGCGGATTTCAGCTCTCGTGTTACTGTATGGGTTGGTTTCGCC
AGGCACCTGGTAAAGAACGTGAATTTGTGGCATCCATTACCCAGCACGCC
TTTCGTACCTACTATGCCGATTCTGTTAAAGGTCGCTTCACTATTTCACG
CGATGATGCGCGTAATACCGTGTACTTACAGATGAACTCACTGAAACCTG
AGGATACCGCCGTTTATTATTGTGCGGCAGGCGAGCACTGTCTCGCCTTC
GACTATTGGGGTCAGGGCACACAAGTCACGGTCTCAAGCGGCGGAAGCTC
TGGTGAACAGAAACTGATTTCAGAAGCCAA

TABLE 4
Sequences belonging to cluster SR6. Each line
in the table represents one sequence, both
segments and full length of the sequence are
shown. Shown items are divided by “#” and in
the order from start to end of each line is:
CDR1 amino acid sequence, CDR2 amino acid
sequence, CDR3 amino acid sequence, full-length
amino acid sequence with CDRs capitalized,
full-length DNA sequence.
(SEQ ID NOS: 691-1420)

DCHVLWR#LDGLF#MPFF#evqlvesggglvqagdslrlscaasgDCHVL
WRmgwfrqapgkerefvaaisLDGLFtnyadsvrgrfsisadsakntvyl
qmnslkpedtavyycaaMPFFdywgqgtqvtvss#ACCATGGAAGTTCAA
CTGGTTGAATCTGGTGGCGGTTTAGTTCAAGCCGGTGATAGCCTTCGTCT
GAGCTGCGCCGCAAGCGGAGATTGTCACGTTCTCTGGCGTATGGGTTGGT
TTCGCCAGGCACCTGGTAAAGAACGTGAATTTGTGGCAGCCATTAGCCTC
GACGGTTTGTTTACCAACTATGCCGATTCTGTTCGTGGTCGCTTCAGCAT
TTCAGCAGATTCTGCGAAGAATACCGTGTACTTACAGATGAACTCACTGA
AACCTGAGGATACCGCCGTTTATTATTGTGCGGCAATGCCTTTTTTTGAC
TATTGGGGTCAGGGCACACAAGTCACGGTCTCAAGCGGCGGAAGCTCTGG
TGAACAGAAACTGATTTCAGAAG
DCHVLWR#LDGLF#LPATSG#
evqlvesggglvqagdslrlscaasgDCHVLWRmgwfrqapgkerefvaa
isLDGLFtnyadsvrgrfsisadsakntvylqmnslkpedtavyycaaLP
ATSGdywgqgtqvtvss#AAGGAGATATACCATGGAAGTTCAACTGGTTG
AATCTGGTGGCGGTTTAGTTCAAGCCGGTGATAGCCTTCGTCTGAGCTGC
GCCGCAAGCGGAGATTGTCACGTTCTCTGGCGTATGGGTTGGTTTCGCCA
GGCACCTGGTAAAGAACGTGAATTTGTGGCAGCCATTAGCCTCGACGGTT
TGTTTACCAACTATGCCGATTCTGTTCGTGGTCGCTTCAGCATTTCAGCA
GATTCTGCGAAGAATACCGTGTACTTACAGATGAACTCACTGAAACCTGA
GGATACCGCCGTTTATTATTGTGCGGCATTGCCGGCGACTTCTGGCGACT
ATTGGGGTCAGGGCACACAAGTCACGGTCTCAAGCGGCGGAAGCTCTGGT
GAACAGAAACTGATTTCAGAAG
DCHVLWR#LDGLF#FKPYES#e
vqlvesggglvqagdslrlscaasgDCHVLWRmgwfrqapgkerefvaai
sLDGLFtnyadsvrgrfsisadsakntvylqmnslkpedtavyycaaFKP
YESaywgqgtqvtvss#ATACCATGGAAGTTCAACTGGTTGAATCTGGTG
GCGGTTTAGTTCAAGCCGGTGATAGCCTTCGTCTGAGCTGCGCCGCAAGC
GGAGATTGTCACGTTCTCTGGCGTATGGGTTGGTTTCGCCAGGCACCTGG
TAAAGAACGTGAATTTGTGGCAGCCATTAGCCTCGACGGTTTGTTTACCA
ACTATGCCGATTCTGTTCGTGGTCGCTTCAGCATTTCAGCAGATTCTGCG
AAGAATACCGTGTACTTACAGATGAACTCACTGAAACCTGAGGATACCGC
CGTTTATTATTGTGCGGCATTCAAGCCTTACGAGTCGGCCTATTGGGGTC
AGGGCACACAAGTCACGGTCTCAAGCGGCGGAAGCTCTGGTGAACAGAAA
CTGATTTCAGAAG
DCHVLWR#LVGLF#MPFF#evqlvesggglv
qagdslrlscaasgDCHVLWRmgwfrqapgkerefvaaisLVGLFtnyad
svrgrfsisadsakntvylqmnslkpedtavyycaaMPFFdywgqgtqvt
vss#ACCATGGAAGTTCAACTGGTTGAATCTGGTGGCGGTTTAGTTCAAG
CCGGTGATAGCCTTCGTCTGAGCTGCGCCGCAAGCGGAGATTGTCACGTT
CTCTGGCGTATGGGTTGGTTTCGCCAGGCACCTGGTAAAGAACGTGAATT
TGTGGCAGCCATTAGCCTCGTCGGTTTGTTTACCAACTATGCCGATTCTG
TTCGTGGTCGCTTCAGCATTTCAGCAGATTCTGCGAAGAATACCGTGTAC
TTACAGATGAACTCACTGAAACCTGAGGATACCGCCGTTTATTATTGTGC
GGCAATGCCTTTTTTTGACTATTGGGGTCAGGGCACACAAGTCACGGTCT
CAAGCGGCGGAAGCTCTGGTGAACAGAAACTGATTTCAGAAG
DC
HVLWR#LDGLF#HHFHPGGMD#evqlvesggglvqagdslrlscaasgDC
HVLWRmgwfrqapgkerefvaaisLDGLFtnyadsvrgrfsisadsaknt
vylqmnslkpedtavyycnaHHFHPGGMDdywgqgtqvtvss#ATACCAT
GGAAGTTCAACTGGTTGAATCTGGTGGCGGTTTAGTTCAAGCCGGTGATA
GCCTTCGTCTGAGCTGCGCCGCAAGCGGAGATTGTCACGTTCTCTGGCGT
ATGGGTTGGTTTCGCCAGGCACCTGGTAAAGAACGTGAATTTGTGGCAGC
CATTAGCCTCGACGGTTTGTTTACCAACTATGCCGATTCTGTTCGTGGTC
GCTTCAGCATTTCAGCAGATTCTGCGAAGAATACCGTGTACTTACAGATG
AACTCACTGAAACCTGAGGATACCGAACAGAAACTGATTTCAGAAG
DCHVLWR#LDGLF#LPKRTV#qvqlvesggalvqagdslrlscaasgD
CHVLWRmgwfrqapgkerefvaaisLDGLFtnyadsvrgrfsisadsakn
tvylqmnslkpedtavyycaaLPKRTVdywgqgtqvtvss#AAGGAGATA
TACCATGCAGGTTCAACTGGTTGAATCTGGTGGCGCATTAGTTCAAGCCG
GTGATAGCCTTCGTCTGAGCTGCGCCGCAAGCGGAGATTGTCACGTTCTC
TGGCGTATGGGTTGGTTTCGCCAGGCACCTGGTAAAGAACGTGAATTTGT
GGCAGCCATTAGCCTCGACGGTTTGTTTACCAACTATGCCGATTCTGTTC
GTGGTCGCTTCAGCATTTCAGCAGATTCTGCGAAGAATACCGTGTACTTA
CAGATGAACTCACTGAAACCTGAGGATACCGCCGTTTATTATTGTGCGGC
ACTGCCTAAGCGGACTGTGGACTATTGGGGTCAGGGCACACAAGTCACGG
TCTCAAGCGGCGGAAGCTCTGGTGAACAGAAACTGATTTCAGAAG
DCHVLWR#LDGLF#LPATSG#evqlvesggglvhvgdrlrlscaasgDC
HVLWRmgwfrqapgkerefvaaisLDGLFtnyadsvrgrfsisadsaknt
vylqmnslkpedtavyycaaLPATSGdywgqgtqvtvss#GAAGGAGATA
TACCATGGAAGTTCAACTGGTTGAATCTGGTGGCGGTTTAGTTCACGTCG
GTGATCGCCTTCGTCTGAGCTGCGCCGCAAGCGGAGATTGTCACGTTCTC
TGGCGTATGGGTTGGTTTCGCCAGGCACCTGGTAAAGAACGTGAATTTGT
GGCAGCCATTAGCCTCGACGGTTTGTTTACCAACTATGCCGATTCTGTTC
GTGGTCGCTTCAGCATTTCAGCAGATTCTGCGAAGAATACCGTGTACTTA
CAGATGAACTCACTGAAACCTGAGGATACCGCCGTTTATTATTGTGCGGC
ATTGCCGGCGACTTCTGGCGACTATTGGGGTCAGGGCACACAAGTCACGG
TCTCAAGCGGCGGAAGCTCTGGTGAACAGAAACTGATTTCAGAAG
DCHVLWR#LDGLF#MPFF#evqlvesggglvqagdslrlscaasgDCHV
LWRmgwfrqapgkerefvaaisLDGLFtnyadsvrgrfsisadsakntvy
lqmnslkpedtavyycaaMPFFaywgqgtqvtvss#AAGGAGATATACCA
TGGAAGTTCAACTGGTTGAATCTGGTGGCGGTTTAGTTCAAGCCGGTGAT
AGCCTTCGTCTGAGCTGCGCCGCAAGCGGAGATTGTCACGTTCTCTGGCG
TATGGGTTGGTTTCGCCAGGCACCTGGTAAAGAACGTGAATTTGTGGCAG
CCATTAGCCTCGACGGTTTGTTTACCAACTATGCCGATTCTGTTCGTGGT
CGCTTCAGCATTTCAGCAGATTCTGCGAAGAATACCGTGTACTTACAGAT
GAACTCACTGAAACCTGAGGATACCGCCGTTTATTATTGTGCGGCAATGC
CTTTTTTTGCCTATTGGGGTCAGGGCACACAAGTCACGGTCTCAAGCGGC
GGAAGCTCTGGTGAACAGAAACTGATTTCAGAAG
DCHVLWR#LD
GLF#MPFF#evqlvesggglvqagdslrlscaasgDCHVLWRmgwfhqap
gkerefvaaisLDGLFtnyadsvrgrfsisadsakntvylqmnslkpedt
avyycaaMPFFdywgqgtqvtvss#ATACCATGGAAGTTCAACTGGTTGA
ATCTGGTGGCGGTTTAGTTCAAGCCGGTGATAGCCTTCGTCTGAGCTGCG
CCGCAAGCGGAGATTGTCACGTTCTCTGGCGTATGGGTTGGTTTCACCAG
GCACCTGGTAAAGAACGTGAATTTGTGGCAGCCATTAGCCTCGACGGTTT
GTTTACCAACTATGCCGATTCTGTTCGTGGTCGCTTCAGCATTTCAGCAG
ATTCTGCGAAGAATACCGTGTACTTACAGATGAACTCACTGAAACCTGAG
GATACCGCCGTTTATTATTGTGCGGCAATGCCTTTTTTTGACTATTGGGG
TCAGGGCACACAAGTCACGGTCTCAAGCGGCGGAAGCTCTGGTGAACAGA
AACTGATTTCAGAAG
DCHVLWR#LDGLF#HHFHPGGMD#evqlv
esggglvqagdslrlscaasgDCHVLWRmgwfrqapgkerefvaaisLDG
LFtnyadsvrgrfsisadsakntvylqmnslkpedtavyycnaHHFHPGG
MDaywgqgtqvtvss#AGGAGATATACCATGGAAGTTCAACTGGTTGAAT
CTGGTGGCGGTTTAGTTCAAGCCGGTGATAGCCTTCGTCTGAGCTGCGCC
GCAAGCGGAGATTGTCACGTTCTCTGGCGCATGGGTTGGTTTCGCCAGGC
ACCTGGTAAAGAACGTGAATTTGTGGCAGCCATTAGCCTCGACGGTTTGT
TTACCAACTATGCCGATTCTGTTCGTGGTCGCTTCAGCATTTCAGCAGAT
TCTGCGAAGAATACCGTGTACTTACAGATGAACTCACTGAAACCTGAGGA
TACCGCCGTTTATTATTGTAATGCACACCATTTTCATCCTGGTGGTATGG
ATGCCTATTGGGGTCAGGGCACACAAGTCACGGTCTCAAGCGGCGGAAGC
TCTGGTGAACAGAAACTGATTTCAGAAG
DCHVLWR#LDGLF#MP
FF#evqlvesggglvqagdslrlscaasgDCHVLWRmdwfrqapgkeref
vaaisLDGLFtnyadsvrgrfsisadsakntvylqmnslkpedtavyyca
aMPFFdywgqgtqvtvss#GGAGATATACCATGGAAGTTCAACTGGTTGA
ATCTGGTGGCGGTTTAGTTCAAGCCGGTGATAGCCTTCGTCTGAGCTGCG
CCGCAAGCGGAGATTGTCACGTTCTCTGGCGTATGGATTGGTTTCGCCAG
GCACCTGGTAAAGAACGTGAATTTGTGGCAGCCATTAGCCTCGACGGTTT
GTTTACCAACTATGCCGATTCTGTTCGTGGTCGCTTCAGCATTTCAGCAG
ATTCTGCGAAGAATACCGTGTACTTACAGATGAACTCACTGAAACCTGAG
GATACCGCCGTTTATTATTGTGCGGCAATGCCTTTTTTTGACTATTGGGG
TCAGGGCACACAAGTCACGGTCTCGAGCGGCGGAAGCTCTGGTGAACAGA
AACTGATTTCAGAAG
DCHVLWR#LDGLF#MPFF#evqlvesggv
lvqagdslrlscaasgDCHVLWRmgwfrqapgkerefvaaisLDGLFtny
adsvrgrfsisadsakntvylqmnslkpedtavyycaaMPFFdywgqgtq
vtvss#GAAGGAGATATACCATGGAAGTTCAACTGGTTGAATCTGGTGGC
GTTTTAGTTCAAGCCGGTGATAGCCTTCGTCTGAGCTGCGCCGCAAGCGG
AGATTGTCACGTTCTCTGGCGTATGGGTTGGTTTCGCCAGGCACCTGGTA
AAGAACGTGAATTTGTGGCAGCCATTAGCCTCGACGGTTTGTTTACCAAC
TATGCCGATTCTGTTCGTGGTCGCTTCAGCATTTCAGCAGATTCTGCGAA
GAATACCGTGTACTTACAGATGAACTCACTGAAACCTGAGGATACCGCCG
TTTATTATTGTGCGGCAATGCCTTTTTTTGACTATTGGGGTCAGGGCACA
CAAGTCACGGTCTCAAGCGGCGGAAGCTCTGGTGAACAGAAACTGATTTC
AGAAG
DCHVLWR#LDGLF#LPSVCT#evqlvesggglvqagdsl
rlscaasgDCHVLWRmgwfrqapgkerefvaaisLDGLFtnyadsvrgrf
sisadsakntvylqmnslkpedtavyycaaLPSVCTdywgqgtqvtvss#
ATACCATGGAAGTTCAACTGGTTGAATCTGGTGGCGGTTTAGTTCAAGCC
GGTGATAGCCTTCGTCTGAGCTGCGCCGCAAGCGGAGATTGTCACGTTCT
CTGGCGTATGGGTTGGTTTCGCCAGGCACCTGGTAAAGAACGTGAATTTG
TGGCAGCCATTAGCCTCGACGGTTTGTTTACCAACTATGCCGATTCTGTT
CGTGGTCGCTTCAGCATTTCAGCAGATTCTGCGAAGAATACCGTGTACTT
ACAGATGAACTCACTGAAACCTGAGGATACCGCCGTTTATTATTGTGCGG
CACTGCCTAGTGTGTGTACCGACTATTGGGGTCAGGGCACACAAGTCACG
GTCTCAAGCGGCGGAAGCTCTGGTGAACAGAAACTGATTTCAGAAG
DCHVLWR#LDGLF#LPATSG#evqlvesggglvqagdslrlscaasgD
CHVLWRmgwfsqapgkerefvaaisLDGLFtnyadsvrgrfsisadsakn
tvdvqmnslkpedtavyycaaLPATSGdywgqgtqvtvss#AAGGAGATA
TACCATGGAAGTTCAACTGGTTGAATCTGGTGGCGGTTTAGTTCAAGCCG
GTGATAGCCTTCGTCTGAGCTGCGCCGCAAGCGGAGATTGTCACGTTCTC
TGGCGTATGGGTTGGTTTAGCCAGGCACCTGGTAAAGAACGTGAATTTGT
GGCAGCCATTAGCCTCGACGGTTTGTTTACCAACTATGCCGATTCTGTTC
GTGGTCGCTTCAGCATTTCAGCAGATTCTGCGAAGAATACCGTGGACGTA
CAGATGAACTCACTGAAACCTGAGGATACCGCCGTTTATTATTGTGCGGC
ATTGCCGGCGACTTCTGGCGACTATTGGGGTCAGGGCACACAAGTCACGG
TCTCAAGCGGCGGAAGCTCTGGTGAACAGAAACTAATTTCAGAAG
DCHVLWR#LDGLF#MPFF#evqlvesggglvqagdslrlscaasgDCHV
LWRmgwfrqapgkerefvaaisLDGLFtnyadsvrgrfsisadsakntmy
lqmnslkpedtavyycaaMPFFdywgqgtqvtvss#ATATACCATGGAAG
TTCAACTGGTTGAATCTGGTGGCGGTTTAGTTCAAGCCGGTGATAGCCTT
CGTCTGAGCTGCGCCGCAAGCGGAGATTGTCACGTTCTCTGGCGTATGGG
TTGGTTTCGCCAGGCACCTGGTAAAGAACGTGAATTTGTGGCAGCCATTA
GCCTCGACGGTTTGTTTACCAACTATGCCGATTCTGTTCGTGGTCGCTTC
AGCATTTCAGCAGATTCTGCGAAGAATACCATGTACTTACAGATGAACTC
ACTGAAACCTGAGGATACCGCCGTTTATTATTGTGCGGCAATGCCTTTTT
TTGACTATTGGGGTCAGGGCACACAAGTCACGGTCTCAAGCGGCGGAAGC
TCTGGTGAACAGAAACTGATTTCAGAAG
DCHVLWR#LDGLF#LP
ATSG#evqlvesggglvqagdslrlscaasgDCHVLWRmgwfrqapgker
efvaaisLDGLFtnyadsvrgrfsisadsakntvylqmnslkpedtavyy
catLPATSGdywgqgtqvtvss#ACCATGGAAGTTCAACTGGTTGAATCT
GGTGGCGGTTTAGTTCAAGCCGGTGATAGCCTTCGTCTGAGCTGCGCCGC
AAGCGGAGATTGTCACGTTCTCTGGCGTATGGGTTGGTTTCGCCAGGCAC
CTGGTAAAGAACGTGAATTTGTGGCAGCCATTAGCCTCGACGGTTTGTTT
ACCAACTATGCCGATTCTGTTCGTGGTCGCTTCAGCATTTCAGCAGATTC
TGCGAAGAATACCGTGTACTTACAGATGAACTCACTGAAACCTGAGGATA
CCGCCGTTTATTATTGTGCGACATTGCCGGCGACTTCTGGCGACTATTGG
GGTCAGGGCACACAAGTCACGGTCTCAAGCGGCGGAAGCTCTGGTGAACA
GAAACTGATTTCAGAAG
DCHVLWR#LDGLF#MPFF#evqlfesg
gglvqagdslrlscaasgDCHVLWRmgwfrqapgkerefvaaisLDGLFt
nyadsvrgrfsisadsakntvylqmnslkpedtavyycaaMPFFdywgqg
tqvtvss#ATATACCATGGAAGTTCAACTGTTTGAATCTGGTGGCGGTTT
AGTTCAAGCCGGTGATAGCCTTCGTCTGAGCTGCGCCGCAAGCGGAGATT
GTCACGTTCTCTGGCGTATGGGTTGGTTTCGCCAGGCACCTGGTAAAGAA
CGTGAATTTGTGGCAGCCATTAGCCTCGACGGTTTGTTTACCAACTATGC
CGATTCTGTTCGTGGTCGCTTCAGCATTTCAGCAGATTCTGCGAAGAATA
CCGTGTACTTACAGATGAACTCACTGAAACCTGAGGATACCGCCGTTTAT
TATTGTGCGGCAATGCCTTTTTTTGACTATTGGGGTCAGGGCACACAAGT
CACGGTCTCAAGCGGCGGAAGCTCTGGTGAACAGAAACTGATTTCAGAAG
DCHVLWR#LDGLF#LPSVCT#evqlvesggglvqagdslrlsca
asgDCHVLWRmgcfrqapgkerefvaaisLDGLFtnyadsvrgrfsisad
sakntvylqmnslkpedtavyycaaLPSVCTdywgqgtqvtvss#AAGGA
GATATACCATGGAAGTTCAACTGGTTGAATCTGGTGGCGGTTTAGTTCAA
GCCGGTGATAGCCTTCGTCTGAGCTGCGCCGCAAGCGGAGATTGTCACGT
TCTCTGGCGTATGGGTTGTTTTCGCCAGGCACCTGGTAAAGAACGTGAAT
TTGTGGCAGCCATTAGCCTCGACGGTTTGTTTACCAACTATGCCGATTCT
GTTCGTGGTCGCTTCAGCATTTCAGCAGATTCTGCGAAGAATACCGTGTA
CTTACAGATGAACTCACTGAAACCTGAGGATACCGCCGTTTATTATTGTG
CGGCACTGCCTAGTGTGTGTACCGACTATTGGGGTCAGGGCACACAAGTC
ACGGTCTCAAGCGGCGGAAGCTCTGGTGAACAGAAACTGATTTCAGAAG
DCHVLWR#LDGLF#LPSVCT#evqlvesggglvqagdslrlscaa
sgDCHVLWRmgwfrqapgkerefvaaisLDGLFtnyadsvrgrfsisads
akntvylqmnslkpedtavyycaaLPSVCTaywgqgtqvtvss#AGGAGA
TATACCATGGAAGTTCAACTGGTTGAATCTGGTGGCGGTTTAGTTCAAGC
CGGTGATAGCCTTCGTCTGAGCTGCGCCGCAAGCGGAGATTGTCACGTTC
TCTGGCGTATGGGTTGGTTTCGCCAGGCACCTGGTAAAGAACGTGAATTT
GTGGCAGCCATTAGCCTCGACGGTTTGTTTACCAACTATGCCGATTCTGT
TCGTGGTCGCTTCAGCATTTCAGCAGATTCTGCGAAGAATACCGTGTACT
TACAGATGAACTCACTGAAACCTGAGGATACCGCCGTTTATTATTGTGCG
GCACTGCCTAGTGTGTGTACCGCCTATTGGGGTCAGGGCACACAAGTCAC
GGTCTCAAGCGGCGGAAGCTCTGGTGAACAGAAACTGATTTCAGAAG
0
DCHVLWR#LDGLF#LPSVCT#evqlvesggglvqagdslrlscaasg
DCHVLWRmgwfrqapgkeresvaaisLDGLFtnyadsvrgrfsisadsak
ntvylqmnslkpedtavyycaaLPSVCTaywgqgtqvtvss#GGAGATAT
ACCATGGAAGTTCAACTGGTTGAATCTGGTGGCGGTTTAGTTCAAGCCGG
TGATAGCCTTCGTCTGAGCTGCGCCGCAAGCGGAGATTGTCACGTTCTCT
GGCGTATGGGTTGGTTTCGCCAGGCACCTGGTAAAGAACGTGAATCTGTG
GCAGCCATTAGCCTCGACGGTTTGTTTACCAACTATGCCGATTCTGTTCG
TGGTCGCTTCAGCATTTCAGCAGATTCTGCGAAGAATACCGTGTACTTAC
AGATGAACTCACTGAAACCTGAGGATACCGCCGTTTATTATTGTGCGGCA
CTGCCTAGTGTGTGTACCGCCTATTGGGGTCAGGGCACACAAGTCACGGT
CTCAAGCGGCGGAAGCTCTGGTGAACAGAAACTGATTTCAGAAG
DCHVLWR#LDGLF#MPFF#evqlvesggglvqagdslrlscaasgDCHVL
WRmgwfrqapgkereflaaisLDGLFtnyadsvrgrfsisadsakntvyl
qmnslkpedtavyycaaMPFFdywgqgtqvtvss#ATACCATGGAAGTTC
AACTGGTTGAATCTGGTGGCGGTTTAGTTCAAGCCGGTGATAGCCTTCGT
CTGAGCTGCGCCGCAAGCGGAGATTGTCACGTTCTCTGGCGTATGGGTTG
GTTTCGCCAGGCACCTGGTAAAGAACGTGAATTTTTGGCAGCCATTAGCC
TCGACGGTTTGTTTACCAACTATGCCGATTCTGTTCGTGGTCGCTTCAGC
ATTTCAGCAGATTCTGCGAAGAATACCGTGTACTTACAGATGAACTCACT
GAAACCTGAGGATACCGCCGTTTATTATTGTGCGGCAATGCCTTTTTTTG
ACTATTGGGGTCAGGGCACACAAGTCACGGTCTCAAGCGGCGGAAGCTCT
GGTGAACAGAAACTGATTTCAGAAG
DCHVLWR#LDGLF#HHFHP
GGMD#evqlvesggglvqagdslrlscaasgDCHVLWRmgwfrqapgker
efvaaisLDGLFtnyadsvrgrfsisadsakntvylqmnslkpedtavyy
cnaHHFHPGGMDdywgqgtqvtvsi#ATATACCATGGAAGTTCAACTGGT
TGAATCTGGTGGCGGTTTAGTTCAAGCCGGTGATAGCCTTCGTCTGAGCT
GCGCCGCAAGCGGAGATTGTCACGTTCTCTGGCGTATGGGTTGGTTTCGC
CAGGCACCTGGTAAAGAACGTGAATTTGTGGCAGCCATTAGCCTCGACGG
TTTGTTTACCAACTATGCCGATTCTGTTCGTGGTCGCTTCAGCATTTCAG
CAGATTCTGCGAAGAATACCGTGTACTTACAGATGAACTCACTGAAACCT
GAGGATACCGAACAGAAACTGATTTCAGAAG
DCHVLWR#LDGLFMPFF#qvqlvesggalvqpggslrlscaasgDCHVLW
Rmgwfrqapgke
refvaaisLDGLFtnyadsvrgrfsisadsakntvylqmnslkpedtavy
ycaaMPFFaywgqgtqvtvss#ATACCATGCAGGTTCAACTGGTTGAATC
TGGTGGCGCATTAGTTCAACCGGGTGGTAGCCTTCGTCTGAGCTGCGCCG
CAAGCGGAGATTGTCACGTTCTCTGGCGTATGGGTTGGTTTCGCCAGGCA
CCTGGTAAAGAACGTGAATTTGTGGCAGCCATTAGCCTCGACGGTTTGTT
TACCAACTATGCCGATTCTGTTCGTGGTCGCTTCAGCATTTCAGCAGATT
CTGCGAAGAATACCGTGTACTTACAGATGAACTCACTGAAACCTGAGGAT
ACCGCCGTTTATTATTGTGCGGCAATGCCTTTTTTTGCCTATTGGGGTCA
GGGCACACAAGTCACGGTCTCAAGCGGCGGAAGCTCTGGTGAACAGAAAC
TGATTTCAGAAG
DCHVLWR#LDGLF#MPFF#evqlvesggglvq
agdslrlscaasgDCHVLWRmgwfrqapgkerefvaaisLDGLFtnyads
vrgrfsisadsakntvylqmnsqkpedtavyycaaMPTTGTCACGTTCTC
TGGCGTATGGGTTGGTTTCGCCAGGCACCTGGTAAAGAACGTGAATTTGT
GGCAGCCATTAGCCTCGACGGTTTGTTTACCAACTATGCCGATTCTGTTC
GTGGTCGCTTCAGCATTTCAGCAGATTCTGCGAAGAATACCGTGTACTTA
CAGATGAACTCACAGAAACCTGAGGATACCGCCGTTTATTATTGTGCGGC
AATGCCTTTTTTTGACTATTGGGGTCAGGGCACACAAGTCACGGTCTCAA
GCGGCGGAAGCTCTGGTGAACAGAAACTGATTTCAGAAG
DCHVL
WR#LDGLF#LPVTSG#evqlvesggglvqagdslrlscaasgDCHVLWRm
gwfrqapgkerefvaaisLDGLFtnyadsvrgrfsisadsakntvylqmn
slkpedtavyycaaLPVTSGdywgqgtqvtvss#ACCATGGAAGTTCAAC
TGGTTGAATCTGGTGGCGGTTTAGTTCAAGCCGGTGATAGCCTTCGTCTG
AGCTGCGCCGCAAGCGGAGATTGTCACGTTCTCTGGCGTATGGGTTGGTT
TCGCCAGGCACCTGGTAAAGAACGTGAATTTGTGGCAGCCATTAGCCTCG
ACGGTTTGTTTACCAACTATGCCGATTCTGTTCGTGGTCGCTTCAGCATT
TCAGCAGATTCTGCGAAGAATACCGTGTACTTACAGATGAACTCACTGAA
ACCTGAGGATACCGCCGTTTATTATTGTGCGGCATTGCCGGTGACTTCTG
GCGACTATTGGGGTCAGGGCACACAAGTCACGGTCTCAAGCGGCGGAAGC
TCTGGTGAACAGAAACTGATGTCAGAAG
DCHVLWR#LDGLF#MP
FF#evqlvesggglvqagdslrlscaasgDCHVLWRmgwfrqapgkeref
vaaisLDGLFtnyadfvrgrfsisadsakntvylqmnslkpedtavyyca
aMPFFdywgqgtqvtvss#AAGGAGATATACCATGGAAGTTCAACTGGTT
GAATCTGGTGGCGGTTTAGTTCAAGCCGGTGATAGCCTTCGTCTGAGCTG
CGCCGCAAGCGGAGATTGTCACGTTCTCTGGCGTATGGGTTGGTTTCGCC
AGGCACCTGGTAAAGAACGTGAATTTGTGGCAGCCATTAGCCTCGACGGT
TTGTTTACCAACTATGCCGATTTTGTTCGTGGTCGCTTCAGCATTTCAGC
AGATTCTGCGAAGAATACCGTGTACTTACAGATGAACTCACTGAAACCTG
AGGATACCGCCGTTTATTATTGTGCGGCAATGCCTTTTTTTGACTATTGG
GGTCAGGGCACACAAGTCACGGTCTCAAGCGGCGGAAGCTCTGGTGAACA
GAAACTGATTTCAGAAG
DCHVLWR#LDGLF#MPFF#evqlvesg
gglvqagdslrlscaasgDCHVLWRmgwfrqapgkerefvaairLDGLFt
nyadsvrgrfsisadsakntvylqmnslkpedtavyycaaMPFFdywgqg
tqvtvss#ACCATGGAAGTTCAACTGGTTGAATCTGGTGGCGGTTTAGTT
CAAGCCGGTGATAGCCTTCGTCTGAGCTGCGCCGCAAGCGGAGATTGTCA
CGTTCTCTGGCGTATGGGTTGGTTTCGCCAGGCACCTGGTAAAGAACGTG
AATTTGTGGCAGCCATTAGGCTCGACGGTTTGTTTACCAACTATGCCGAT
TCTGTTCGTGGTCGCTTCAGCATTTCAGCAGATTCTGCGAAGAATACCGT
GTACTTACAGATGAACTCACTGAAACCTGAGGATACCGCCGTTTATTATT
GTGCGGCAATGCCTTTTTTTGACTATTGGGGTCAGGGCACACAAGTCACG
GTCTCAAGCGGCGGAAGCTCTGGTGAACAGAAACTGATTTCAGAAG
DCHVLWR#LDGLF#MPFF#evqlvesggglvqagdslrlscaasgDCH
VLWRmgwfrqapgkerefvaaisLDGLFtnyadsvrgrcsisadsakntv
ylqmnslkpedtavyycaaMPFFdywgqgtqvtvss#GGAGATATACCAT
GGAAGTTCAACTGGTTGAATCTGGTGGCGGTTTAGTTCAAGCCGGTGATA
GCCTTCGTCTGAGCTGCGCCGCAAGCGGAGATTGTCACGTTCTCTGGCGT
ATGGGTTGGTTTCGCCAGGCACCTGGTAAAGAACGTGAATTTGTGGCAGC
CATTAGCCTCGACGGTTTGTTTACCAACTATGCCGATTCTGTTCGTGGTC
GCTGCAGCATTTCAGCAGATTCTGCGAAGAATACCGTGTACTTACAGATG
AACTCACTGAAACCTGAGGATACCGCCGTTTATTATTGTGCGGCAATGCC
TTTTTTTGACTATTGGGGTCAGGGCACACAAGTCACGGTCTCAAGCGGCG
GAAGCTCTGGTGAACAGAAACTGATTTCAGAAG
DCHVLWR#LDG
LF#LPSTPECYAL#evqlvesggglvqagdslrlscaasgDCHVLWRmgw
frqapgkerefvaaisLDGLFtnyadsvrgrfsisadsakntvylqmnsl
kpedtavyycAGCGGAGATTGTCACGTTCTCTGGCGTATGGGTTGGTTTC
GCCAGGCACCTGGTAAAGAACGTGAATTTGTGGCAGCCATTAGCCTCGAC
GGTTTGTTTACCAACTATGCCGATTCTGTTCGTGGTCGCTTCAGCATTTC
AGCAGATTCTGCGAAGAATACCGTGTACTTACAGATGAACTCACTGAAAC
CTGAGGATACCGCCGTTTATTATTGTGCGACACTGCCTAGCACCCCTGAG
TGTTATGCCTTGGGCTATTGGGGTCAGGACACACAAGTCACGGTCTCAAG
CGGCGGAAGCTCTGGTGAACAGAAACTGATTTCAGAAG
DCHVLW
R#LDGLF#MPFF#evqlvesggglvhagdrlrlscaasgDCHVLWRmgwf
rqapgkerefvaaisLDGLFtnyadsvrgrfsisadsakntvylqmnslk
pedtavyycaaMPFFdywgqgtqvtvss#GAAGGAGATATACCATGGAAG
TTCAACTGGTTGAATCTGGTGGCGGTTTAGTTCACGCCGGTGATCGCCTT
CGTCTGAGCTGCGCCGCAAGCGGAGATTGTCACGTTCTCTGGCGTATGGG
TTGGTTTCGCCAGGCACCTGGTAAAGAACGTGAATTTGTGGCAGCCATTA
GCCTCGACGGTTTGTTTACCAACTATGCCGATTCTGTTCGTGGTCGCTTC
AGCATTTCAGCAGATTCTGCGAAGAATACCGTGTACTTACAGATGAACTC
ACTGAAACCTGAGGATACCGCCGTTTATTATTGTGCGGCAATGCCTTTTT
TTGACTATTGGGGTCAGGGCACACAAGTCACGGTCTCAAGCGGCGGAAGC
TCTGGTGAACAGAAACTGATTTCAGAAG
DCHVLWR#LDGLF#HH
FHPGGMD#evqlvesggglvqagdslrlscdasgDCHVLWRmgwfrqapg
kerefvaaisLDGLFtnyadsvrgrfsisadsakntvylqmnslkpedta
vyycnaHHFHPGGMDdywgqgtqvtvss#GGAGATATACCATGGAAGTTC
AACTGGTTGAATCTGGTGGCGGTTTAGTTCAAGCCGGTGATAGCCTTCGT
CTGAGCTGCGACGCAAGCGGAGATTGTCACGTTCTCTGGCGTATGGGTTG
GTTTCGCCAGGCACCTGGTAAAGAACGTGAATTTGTGGCAGCCATTAGCC
TCGACGGTTTGTTTACCAACTATGCCGATTCTGTTCGTGGTCGCTTCAGC
ATTTCAGCAGATTCTGCGAAGAATACCGTGTACTTACAGATGAACTCACT
GAAACCTGAGGATACCGCCGTTTATTATTGTAATGCACACCATTTTCATC
CTGGTGGTATGGATGACTACTGGGGTCAGGGCACACAAGTCACGGTCTCA
AGCGGCGGAAGCTCTGGTGAACAGAAACTGATTTCAGAAG
DCHV
LWR#LDGLF#LPATSG#evqlvdsggglvhagdrlrlscaasgDCHVLWR
mgwfrqapgkerefvaaisLDGLFtnyadsvrgrfsisadsakntvylqm
nslkpedtavyycaaLPATSGdywgqgtqvtvss#GAAGGAGATATACCA
TGGAAGTTCAACTGGTTGACTCTGGTGGCGGTTTAGTTCACGCCGGTGAT
CGCCTTCGTCTGAGCTGCGCCGCAAGCGGAGATTGTCACGTTCTCTGGCG
TATGGGTTGGTTTCGCCAGGCACCTGGTAAAGAACGTGAATTTGTGGCAG
CCATTAGCCTCGACGGTTTGTTTACCAACTATGCCGATTCTGTTCGTGGT
CGCTTCAGCATTTCAGCAGATTCTGCGAAGAATACCGTGTACTTACAGAT
GAACTCACTGAAACCTGAGGATACCGCCGTTTATTATTGTGCGGCATTGC
CGGCGACTTCTGGCGACTATTGGGGTCAGGGCACACAAGTCACGGTCTCA
AGCGGCGGAAGCTCTGGTGAACAGAAACTGATTTCAGAAG
DCHV
LWR#LDGLF#LPATSG#evqlvesggglvqagdslrlscaangDCHVLWR
mgwfrqapgkerefvaaisLDGLFtnyadsvrgrfsisadsakntvylqi
nslkpedtavyycaaLPATSGdywvqgtqvtvss#ATACCATGGAAGTTC
AACTGGTTGAATCTGGTGGCGGTTTAGTTCAAGCCGGTGATAGCCTTCGT
CTGAGCTGCGCCGCAAACGGAGATTGTCACGTTCTCTGGCGTATGGGTTG
GTTTCGCCAGGCACCTGGTAAAGAACGTGAATTTGTGGCAGCCATTAGCC
TCGACGGTTTGTTTACCAACTATGCCGATTCTGTTCGTGGTCGCTTCAGC
ATTTCAGCAGATTCTGCGAAGAATACCGTGTACTTACAGATTAACTCACT
GAAACCTGAGGATACCGCCGTTTATTATTGTGCGGCATTGCCGGCGACTT
CTGGCGACTATTGGGTTCAGGGCACACAAGTCACGGTCTCAAGCGGCGGA
AGCTCTGGTGAACAGAAACTGCTTTCAGAAG
DCHVLWR#LDGLFMPFF#evqlvesggglvqagdslrlscaangDCHVLW
Rmgwfrqapgke
refvaaisLDGLFtnyadsvrgrfsisadsakntvylqmnslkpedtavy
ycaaMPFFdywgqgtqvtvss#GAAGGAGATATACCATGGAAGTTCAACT
GGTTGAATCTGGTGGCGGTTTAGTTCAAGCCGGTGATAGCCTTCGTCTGA
GCTGCGCCGCAAACGGAGATTGTCACGTTCTCTGGCGTATGGGTTGGTTT
CGCCAGGCACCTGGTAAAGAACGTGAATTTGTGGCAGCCATTAGCCTCGA
CGGTTTGTTTACCAACTATGCCGATTCTGTTCGTGGTCGCTTCAGCATTT
CAGCAGATTCTGCGAAGAATACCGTGTACTTACAGATGAACTCACTGAAA
CCTGAGGATACCGCCGTTTATTATTGTGCGGCAATGCCTTTTTTTGACTA
TTGGGGTCAGGGCACACAAGTCACGGTCTCAAGCGGCGGAAGCTCTGGTG
AACAGAAACTGATTTCAGAAG
DCHVLWR#LDGLF#HHFHPGGMDevqlvesggglvqvgdslrlscaasgD
CHVLWRmgwfrqapgkerefva
aisLDGLFtnyadsvrgrfsisadsakntvylqmnslkpedtavyycnaH
HFHPGGMDdywgqgtqvtvss#AAGGAGATATACCATGGAAGTTCAACTG
GTTGAATCTGGTGGCGGTTTAGTTCAAGTCGGTGATAGCCTTCGTCTGAG
CTGCGCCGCAAGCGGAGATTGTCACGTTCTCTGGCGTATGGGTTGGTTTC
GCCAGGCACCTGGTAAAGAACGTGAATTTGTGGCAGCCATTAGCCTCGAC
GGTTTGTTTACCAACTATGCCGATTCTGTTCGTGGTCGCTTCAGCATTTC
AGCAGATTCTGCGAAGAATACCGTGTACTTACAGATGAACTCACTGAAAC
CTGGCTCTGGTGAACAGAAACTGATTTCAGAAG
DCHVLWR#LDG
LF#HHFHPGGMD#evqlvesggglvqagdslrlscaasgDCHVLWRmgwf
rqapgkerefvaaisLDGLFtnyadsvrgrfsisadsakntvylqmnslk
pedtavyycnaHHFHPGGMDdyggqgtqvtvss#AGATATACCATGGAAG
TTCAACTGGTTGAATCTGGTGGCGGTTTAGTTCAAGCCGGTGATAGCCTT
CGTCTGAGCTGCGCCGCAAGCGGAGATTGTCACGTTCTCTGGCGTATGGG
TTGGTTTCGCCAGGCACCTGGTAAAGAACGTGAATTTGTGGCAGCCATTA
GCCTCGACGGTTTGTTTACCAACTATGCCGATTCTGTTCGTGGTCGCTTC
AGCATTTCAGCAGATTCTGCGAAGAATACCGTGTACTTACAGATGAACTC
ACTGAAACCTGAGGATACCGCCGTTTATTATTGTAATGCACACCATTTTC
ATCCTGGTGGTATGGATGACTATGGGGGGCAGGGCACACAAGTCACGGTC
TCAAGCGGCGGAAGCTCTGGTGAACAGAAACTGATTTCAGAAG
D
CHVLWR#LDGLF#MPFF#evqlvesggglvqagdslrlscaasgDCHVLW
RmgwfrqapgkerefvaaisLDGLFtnyadsvrgrfsisadsakntvylq
mnslkpedtavyycaaMPFFdyggqgtqvtvas#ATACCATGGAAGTTCA
ACTGGTTGAATCTGGTGGCGGTTTAGTTCAAGCCGGTGATAGCCTTCGTC
TGAGCTGCGCCGCAAGCGGAGATTGTCACGTTCTCTGGCGTATGGGTTGG
TTTCGCCAGGCACCTGGTAAAGAACGTGAATTTGTGGCAGCCATTAGCCT
CGACGGTTTGTTTACCAACTATGCCGATTCTGTTCGTGGTCGCTTCAGCA
TTTCAGCAGATTCTGCGAAGAATACCGTGTACTTACAGATGAACTCACTG
AAACCTGAGGATACCGCCGTTTATTATTGTGCGGCAATGCCTTTTTTTGA
CTATGGGGGTCAGGGCACACAAGTCACGGTCGCAAGCGGCGGAAGCTCTG
GGGAACAGAAACTGATTTCAGAAG
DCHVLWR#LDGLF#LPSVCTevqlvesggdlvqagdslrlscaasgDCHV
LWRmgwfrqapgkerefva
aisLDGLFtnyadsvrgrfsisadsakntvylqmnslkpedtavyycaaL
PSVCTdywgqgtqvtvss#GGAGATATACCATGGAAGTTCAACTGGTTGA
ATCTGGTGGCGATTTAGTTCAAGCCGGTGATAGCCTTCGTCTGAGCTGCG
CCGCAAGCGGAGATTGTCACGTTCTCTGGCGTATGGGTTGGTTTCGCCAG
GCACCTGGTAAAGAACGTGAATTTGTGGCAGCCATTAGCCTCGACGGTTT
GTTTACCAACTATGCCGATTCTGTTCGTGGTCGCTTCAGCATTTCAGCAG
ATTCTGCGAAGAATACCGTGTACTTACAGATGAACTCACTGAAACCTGAG
GATACCGCCGTTTATTATTGTGCGGCACTGCCTAGTGTGTGTACCGACTA
TTGGGGTCAGGGCACACAAGTCACGGTCTCAAGCGGCGGAAGCTCTGGTG
AACAGAAACTGATTTCAGAAG
DCHVLWR#LDGLF#LPATSG#ev
qlvesggglvqagdslrlscaasgDCHVLWRmgwfrqapgkerefvaais
LDGLFtnyadsvrgrfsisadsakntvylqmnslkpedtavyycaaLPAT
SGdyggqgtqvtvas#ACCATGGAAGTTCAACTGGTTGAATCTGGTGGCG
GTTTAGTTCAAGCCGGTGATAGCCTTCGTTTGAGCTGCGCCGCAAGCGGA
GATTGTCACGTTCTCTGGCGTATGGGTTGGTTTCGCCAGGCACCTGGTAA
AGAACGTGAATTTGTGGCAGCCATTAGCCTCGACGGTTTGTTTACCAACT
ATGCCGATTCTGTTCGTGGTCGCTTCAGCATTTCAGCAGATTCTGCGAAG
AATACCGTGTACTTACAGATGAACTCACTGAAACCTGAGGATACCGCCGT
TTATTATTGTGCGGCATTGCCGGCGACTTCTGGCGACTATGGGGGTCAGG
GCACACAAGTCACGGTCGCAAGCGGCGGAAGCTCTGGGGAACAGAAACTG
ATTTCAGAAG
DCHVLWR#LDGFF#LPSVCT#evqlvesggglvq
agdslrlscaasgDCHVLWRmgwfrqapgkerefvaaisLDGFFtnyads
vrgrfsisadsakntvylqmnslkpedtavyycaaLPSVCTdywgqgtqv
tvss#AGGAGATATACCATGGAAGTTCAACTGGTTGAATCTGGTGGCGGT
TTAGTTCAAGCCGGTGATAGCCTTCGTCTGAGCTGCGCCGCAAGCGGAGA
TTGTCACGTTCTCTGGCGTATGGGTTGGTTTCGCCAGGCACCTGGTAAAG
AACGTGAATTTGTGGCAGCCATTAGCCTCGACGGTTTTTTTACCAACTAT
GCCGATTCTGTTCGTGGTCGCTTCAGCATTTCAGCAGATTCTGCGAAGAA
TACCGTGTACTTACAGATGAACTCACTGAAACCTGAGGATACCGCCGTTT
ATTATTGTGCGGCACTGCCTAGTGTGTGTACCGACTATTGGGGTCAGGGC
ACACAAGTCACGGTCTCAAGCGGCGGAAGCTCTGGTGAACAGAAACTGAT
TTCAGAAG
DCHVLWR#LDGLF#LPSTPECYAL#evqlvesgggl
vqagdslrlscaasgDCHVLWRmgwfrqapgkerefvaaisLDGLFtnya
dsvrgrfsisadsakntvylqmnslkpedtavyycatLPSTPECYALgyw
gqgtqvtvss#AGGAGATATACCATGGAAGTTCAACTGGTTGAATCTGGT
GGCGGTTTAGTTCAAGCCGGTGATAGCCTTCGTCTGAGCTGCGCCGCAAG
CGGAGATTGTCACGTTCTCTGGCGTATGGGTTGGTTTCGCCAGGCACCTG
GTAAAGAACGTGAATTTGTGGCAGCCATTAGCCTCGACGGTTTGTTTACC
AACTATGCCGATTCTGTTCGTGGTCGCTTCAGCATTTCAGCAGATTCTGC
GAAGAATACCGTGTACTTACAGATGAACTCACTGAAACCTGAGGATACCG
CCGTTTATTATTGTGCGACACTGCCTAGCACCCCTGAGTGTTATGCCTTG
GGCTATTGGGGTCAGGGCACACAAGTCACGGTCTCAAGCGGCGGAAGCTC
TGGTGAACAGAAACTGATTTCAGAAG
DCHVLWR#LDGLF#MPFFevqlvesggglvqagdslrlscaasgDCHVLW
Rmgwfrqapgkerefva
aisLDGLFtnyadsvrgrfsisadsakntvclqmnslkpedtavyycaaM
PFFdywgqgtqvtvss#AAGGAGATATACCATGGAAGTTCAACTGGTTGA
ATCTGGTGGCGGTTTAGTTCAAGCCGGTGATAGCCTTCGTCTGAGCTGCG
CCGCAAGCGGAGATTGTCACGTTCTCTGGCGTATGGGTTGGTTTCGCCAG
GCACCTGGTAAAGAACGTGAATTTGTGGCAGCCATTAGCCTCGACGGTTT
GTTTACCAACTATGCCGATTCTGTTCGTGGTCGCTTCAGCATTTCAGCAG
ATTCTGCGAAGAATACCGTGTGCTTACAGATGAACTCACTGAAACCTGAG
GATACCGCCGTTTATTATTGTGCGGCAATGCCTTTTTTTGACTATTGGGG
TCAGGGCACACAAGTCACGGTCTCAAGCGGCGGAAGCTCTGGTGAACAGA
AACTGATTTCAGAAG
DCHVLWR#LDGLF#MSQPTL#evqlvesg
gglvqagdslrlscaasgDCHVLWRmgwfrqapgkerefvaaisLDGLFt
nyadsvrgrfsisadsakntvylqmnslkpedtavyycaaMSQPTLdywg
qgtqvtvss#ATATACCATGGAAGTTCAACTGGTTGAATCTGGTGGCGGT
TTAGTTCAAGCCGGTGATAGCCTTCGTCTGAGCTGCGCCGCAAGCGGAGA
TTGTCACGTTCTCTGGCGTATGGGTTGGTTTCGCCAGGCACCTGGTAAAG
AACGTGAATTTGTGGCAGCCATTAGCCTCGACGGTTTGTTTACCAACTAT
GCCGATTCTGTTCGTGGTCGCTTCAGCATTTCAGCAGATTCTGCGAAGAA
TACCGTGTACTTACAGATGAACTCACTGAAACCTGAGGATACCGCCGTTT
ATTATTGTGCGGCAATGAGTCAGCCTACCTTGGACTATTGGGGTCAGGGC
ACACAAGTCACGGTCTCAAGCGGCGGAAGCTCTGGTGAACAGAAACTGAT
TTCAGAAG
DCHVLWR#LDGLF#MPFF#evqlvesggglvqagds
lrIncaasgDCHVLWRmgwfrqapgkerefvaaisLDGLFtnyadsvrgr
fsisadsakntvylqmnslkpedtavyycaaMPFFdywgqgtqvtvss#G
AAGGAGATATACCATGGAAGTTCAACTGGTTGAATCTGGTGGCGGTTTAG
TTCAAGCCGGTGATAGCCTTCGTCTGAACTGCGCCGCAAGCGGAGATTGT
CACGTTCTCTGGCGTATGGGTTGGTTTCGCCAGGCACCTGGTAAAGAACG
TGAATTTGTGGCAGCCATTAGCCTCGACGGTTTGTTTACCAACTATGCCG
ATTCTGTTCGTGGTCGCTTCAGCATTTCAGCAGATTCTGCGAAGAATACC
GTGTACTTACAGATGAACTCACTGAAACCTGAGGATACCGCCGTTTATTA
TTGTGCGGCAATGCCTTTTTTTGACTATTGGGGTCAGGGCACACAAGTCA
CGGTCTCAAGCGGCGGAAGCTCTGGTGAACAGAAACTGATTTCAGAAG
DCHVLWR#LDGLF#MPFF#evqlvesggglvqagdslrlscaasgD
CHVLWRmgwfrqapgkerefvaaisLDGLFtnyadsvrgrfsisadsakn
tvylqmnsInpedtavyycaaMPFFdywgqgtqvtvss#AGATATACCAT
GGAAGTTCAACTGGTTGAATCTGGTGGCGGTTTAGTTCAAGCCGGTGATA
GCCTTCGTCTGAGCTGCGCCGCAAGCGGAGATTGTCACGTTCTCTGGCGT
ATGGGTTGGTTTCGCCAGGCACCTGGTAAAGAACGTGAATTTGTGGCAGC
CATTAGCCTCGACGGTTTGTTTACCAACTATGCCGATTCTGTTCGTGGTC
GCTTCAGCATTTCAGCAGATTCTGCGAAGAATACCGTGTACTTACAGATG
AACTCACTGAACCCTGAGGATACCGCCGTTTATTATTGTGCGGCAATGCC
TTTTTTTGACTATTGGGGTCAGGGCACACAAGTCACGGTCTCAAGCGGCG
GAAGCTCTGGTGAACAGAAACTGATTTCAGAAG
DCQVLWR#LDG
LF#MPFF#evqlvesggglvqagdslrlscaasgDCQVLWRmgwfrqapg
kerefvaaisLDGLFtnyadsvrgrfsisadsakntvylqmnslkpedta
vyycaaMPFFdywgqgtqvtvss#AGGAGATATACCATGGAAGTTCAACT
GGTTGAATCTGGTGGCGGTTTAGTTCAAGCCGGTGATAGCCTTCGTCTGA
GCTGCGCCGCAAGCGGAGATTGTCAAGTTCTCTGGCGTATGGGTTGGTTT
CGCCAGGCACCTGGTAAAGAACGTGAATTTGTGGCAGCCATTAGCCTCGA
CGGTTTGTTTACCAACTATGCCGATTCTGTTCGTGGTCGCTTCAGCATTT
CAGCAGATTCTGCGAAGAATACCGTGTACTTACAGATGAACTCACTGAAA
CCTGAGGATACCGCCGTTTATTATTGTGCGGCAATGCCTTTTTTTGACTA
TTGGGGTCAGGGCACACAAGTCACGGTCTCAAGCGGCGGAAGCTCTGGTG
AACAGAAACTGATTTCAGAAG
DCHVLWR#LDGLF#MPFF#evql
vesggglvqagdslrlscaasgDCHVLWRmgwfrqapgkerefvaaisLD
GLFtnyadsvrgrfsisadsakntvylqmnslkpedtavyycaaMPFFdy
wcqgtqvtvss#GAAGGAGATATACCATGGAAGTTCAACTGGTTGAATCT
GGTGGCGGTTTAGTTCAAGCCGGTGATAGCCTTCGTCTGAGCTGCGCCGC
AAGCGGAGATTGTCACGTTCTCTGGCGTATGGGTTGGTTTCGCCAGGCAC
CTGGTAAAGAACGTGAATTTGTGGCAGCCATTAGCCTCGACGGTTTGTTT
ACCAACTATGCCGATTCTGTTCGTGGTCGCTTCAGCATTTCAGCAGATTC
TGCGAAGAATACCGTGTACTTACAGATGAACTCACTGAAACCTGAGGATA
CCGCCGTTTATTATTGTGCGGCAATGCCTTTTTTTGACTATTGGTGTCAG
GGCACACAAGTCACGGTCTCAAGCGGCGGAAGCTCTGGTGAACAGAAACT
GATTTCAGAAG
DCRVLWR#LDGLF#LPATSG#evqlvesggglv
qagdslrlscaasgDCRVLWRmgwfrqapgkerefvaaisLDGLFtnyad
svrgrfsisadsakntvylqmnslkpedtavyycaaLPATSGdywgqgtq
vtvss#AGATATACCATGGAAGTTCAACTGGTTGAATCTGGTGGCGGTTT
AGTTCAAGCCGGTGATAGCCTTCGTCTGAGCTGCGCCGCAAGCGGAGATT
GTCGCGTTCTCTGGCGTATGGGTTGGTTTCGCCAGGCACCTGGTAAAGAA
CGTGAATTTGTGGCAGCCATTAGCCTCGACGGTTTGTTTACCAACTATGC
CGATTCTGTTCGTGGTCGCTTCAGCATTTCAGCAGATTCTGCGAAGAATA
CCGTGTACTTACAGATGAACTCACTGAAACCTGAGGATACCGCCGTTTAT
TATTGTGCGGCATTGCCGGCGACTTCTGGCGACTATTGGGGTCAGGGCAC
ACAAGTCACGGTCTCAAGCGGCGGAAGCTCTGGTGAACAGAAACTGATTT
CAGAAG
DCHVLWR#LDGLF#HHFHPGGMD#evqlfesggglvqa
gdslrlscaasgDCHVLWRmgwfrqapgkerefvaaisLDGLFtnyadsv
rgrfsisadsakntvylqmnslkpedtavyycnaHHFHPGGMDdywgqgt
qvtvss#AGATATACCATGGAAGTTCAACTGTTTGAATCTGGTGGCGGTT
TAGTTCAAGCCGGTGATAGCCTTCGTCTGAGCTGCGCCGCAAGCGGAGAT
TGTCACGTTCTCTGGCGTATGGGTTGGTTTCGCCAGGCACCTGGTAAAGA
ACGTGAATTTGTGGCAGCCATTAGCCTCGACGGTTTGTTTACCAACTATG
CCGATTCTGTTCGTGGTCGCTTCAGCATTTCAGCAGATTCTGCGAAGAAT
ACCGTGTACTTACAGATGAACTCACTGAAACCTGAGGATACCGCCGTTTA
TTATTGTAATGCACACCATTTTCATCCTGGTGGTATGGATGACTATTGGG
GTCAGGGCACACAAGTCACGGTCTCAAGCGGCGGAAGCTCTTGTGAACAG
AAACTGATTTCAGAAG
DCHVLWR#LDGLF#MPFF#evqlvesgg
glvqagdslrlscaasgDCHVLWRmgwfrqapgkerefvaaisLDGLFtn
yadsvrgrfsisadsakntvylqmnsrkpedtavyycaaMPFFdywgqgt
qvtvss#ATACCATGGAAGTTCAACTGGTTGAATCTGGTGGCGGTTTAGT
TCAAGCCGGTGATAGCCTTCGTCTGAGCTGCGCCGCAAGCGGAGATTGTC
ACGTTCTCTGGCGTATGGGTTGGTTTCGCCAGGCACCTGGTAAAGAACGT
GAATTTGTGGCAGCCATTAGCCTCGACGGTTTGTTTACCAACTATGCCGA
TTCTGTTCGTGGTCGCTTCAGCATTTCAGCAGATTCTGCGAAGAATACCG
TGTACTTACAGATGAACTCACGGAAACCTGAGGATACCGCCGTTTATTAT
TGTGCGGCAATGCCTTTTTTTGACTATTGGGGTCAGGGCACACAAGTCAC
GGTCTCAAGCGGCGGAAGCTCTGGTGAACAGAAACTGATTTCAGAAG
0
DCHVLWR#LDGLF#LPATSG#evrlvesggglvqagdslrlscaasg
DCHVLWRmgwfrqapgkerefvaaisLDGLFtnyadsvrgrfsisadsak
ntvylqmnslkpedtavyycatLPATSGdywgqgtqvtvss#AGGAGATA
TACCATGGAAGTTCGACTGGTTGAATCTGGTGGCGGTTTAGTTCAAGCCG
GTGATAGCCTTCGTCTGAGCTGCGCCGCAAGCGGAGATTGTCACGTTCTC
TGGCGTATGGGTTGGTTTCGCCAGGCACCTGGTAAAGAACGTGAATTTGT
GGCAGCCATTAGCCTCGACGGTTTGTTTACCAACTATGCCGATTCTGTTC
GTGGTCGCTTCAGCATTTCAGCAGATTCTGCGAAGAATACCGTGTACTTA
CAGATGAACTCACTGAAACCTGAGGATACCGCCGTTTATTATTGTGCGAC
ATTGCCGGCGACTTCTGGCGACTATTGGGGTCAGGGCACACAAGTCACGG
TCTCAAGCGGCGGAAGCTCTGGTGAACAGAAACTGATTTCAGAAG
DCHVLWR#LDGLF#MPFF#evqlvesggglvqdgdslrlscaasgDCHV
LWRmgwfrqapgkerefvaaisLDGLFtnyadsvrgrfsisadsakntvy
lqmnslkpedtavyycaaMPFFdywgqgtqvtvss#ATATACCATGGAAG
TTCAACTGGTTGAATCTGGTGGTGGTTTAGTTCAAGACGGTGATAGCCTT
CGTCTGAGCTGCGCCGCAAGCGGAGATTGTCACGTTCTCTGGCGTATGGG
TTGGTTTCGCCAGGCACCTGGTAAAGAACGTGAATTTGTGGCAGCCATTA
GCCTCGACGGTTTGTTTACCAACTATGCCGATTCTGTTCGTGGTCGCTTC
AGCATTTCAGCAGATTCTGCGAAGAATACCGTGTACTTACAGATGAACTC
ACTGAAACCTGAGGATACCGCCGTTTATTATTGTGCGGCAATGCCTTTTT
TTGACTATTGGGGTCAGGGCACACAAGTCACGGTCTCAAGCGGCGGAAGC
TCTGGTGAACAGAAACTGATTTCAGAAG
DCHVLWR#LDGLF#MP
FF#evqlvesggglvqagdslrlscaasgDCHVLWRmgwfrqapgkeref
vaaisLDGLFtnyadsvrgrfsisadsakntvylqmnslkpedtavyyca
aMPFFdywgqgtqvtass#ATACCATGGAAGTTCAACTGGTTGAATCTGG
TGGCGGTTTAGTTCAAGCCGGTGATAGCCTTCGTCTGAGCTGCGCCGCAA
GCGGAGATTGTCACGTTCTCTGGCGTATGGGTTGGTTTCGCCAGGCACCT
GGTAAAGAACGTGAATTTGTGGCAGCCATTAGCCTCGACGGTTTGTTTAC
CAACTATGCCGATTCTGTTCGTGGTCGCTTCAGCATTTCAGCAGATTCTG
CGAAGAATACCGTGTACTTACAGATGAACTCACTGAAACCTGAGGATACC
GCCGTTTATTATTGTGCGGCAATGCCTTTTTTTGACTATTGGGGTCAGGG
CACACAAGTCACGGCCTCAAGCGGCGGAAGCTTTGGTGAACAGAAACTGA
TTTCAGAAG
DCHVLWR#LDGLF#MPFF#evqlvesggglvqagd
slrlscatsgDCHVLWRmgwfrqapgkerefvaaisLDGLFtnyadsvrg
rfsisadsakntvylqmnslkpedtavyycaaMPFFdywgqgtqvtvss#
AGATATACCATGGAAGTTCAACTGGTTGAATCTGGTGGCGGTTTAGTTCA
AGCCGGTGATAGCCTTCGTCTGAGCTGCGCCACAAGCGGAGATTGTCACG
TTCTCTGGCGTATGGGTTGGTTTCGCCAGGCACCTGGTAAAGAACGTGAA
TTTGTGGCAGCCATTAGCCTCGACGGTTTGTTTACCAACTATGCCGATTC
TGTTCGTGGTCGCTTCAGCATTTCAGCAGATTCTGCGAAGAATACCGTGT
ACTTACAGATGAACTCACTGAAACCTGAGGATACCGCCGTTTATTATTGT
GCGGCAATGCCTTTTTTTGACTATTGGGGTCAGGGCACACAAGTCACGGT
CTCAAGCGGCGGAAGCTCTGGTGAACAGAAACTGATTTCAGAAG
DCHVLWR#LDGLF#MPFF#evqlvdsggglvhagdrlrlscaasgDCHVL
WRmgwfrqapgkerefvaaisLDGLFtnyadsvrgrfsisadsakntvyl
emnslkpedtavyycaaMPFFdywgqgtqvtvss#GAAGGAGATATACCA
TGGAAGTTCAACTGGTTGACTCTGGTGGCGGTTTAGTTCACGCCGGTGAT
CGCCTTCGTCTGAGCTGCGCCGCAAGCGGAGATTGTCACGTTCTCTGGCG
TATGGGTTGGTTTCGCCAGGCACCTGGTAAAGAACGTGAATTTGTGGCAG
CCATTAGCCTCGACGGTTTGTTTACCAACTATGCCGATTCTGTTCGTGGT
CGCTTCAGCATTTCAGCAGATTCTGCGAAGAATACCGTGTACTTAGAGAT
GAACTCACTGAAACCTGAGGATACCGCCGTTTATTATTGTGCGGCAATGC
CTTTTTTTGACTATTGGGGTCAGGGCACACAAGTCACGGTCTCAAGCGGC
GGAAGCTCTGGTGAACAGAAACTGATTTCAGAAG
DCHVLWR#LD
GLF#LPATSG#evqlvesggglvqagdslrlscaasgDCHVLWRmgwfrq
apgkerefvaaisLDGLFtnyadsvrgrfsisadsakntvylqmnslkpe
dtavyycaaLPATSGdywgqdtqvtvss#ATACCATGGAAGTTCAACTGG
TTGAATCTGGTGGCGGTTTAGTTCAAGCCGGTGATAGCCTTCGTCTGAGC
TGCGCCGCAAGCGGAGATTGTCACGTTCTCTGGCGTATGGGTTGGTTTCG
CCAGGCACCTGGTAAAGAACGTGAATTTGTGGCAGCCATTAGCCTCGACG
GTTTGTTTACCAACTATGCCGATTCTGTTCGTGGTCGCTTCAGCATTTCA
GCAGATTCTGCGAAGAATACCGTGTACTTACAGATGAACTCACTGAAACC
TGAGGATACCGCCGTTTATTATTGTGCGGCATTGCCGGCGACTTCTGGCG
ACTATTGGGGTCAGGACACACAAGTCACGGTCTCAAGCGGCGGAAGCTCT
GGTGAACAGAAACTGATTTCAGAAG
DCNVLWR#LDVLF#MPFF#
evqlvesggglvqagdslrlscaasgDCNVLWRmgwfrqapgkerefvaa
isLDVLFtnyadsvrgrfsisadsakntvylqmnslkpedtavyycaaMP
FFdywgqgtqvtvss#AGATATACCATGGAAGTTCAACTGGTTGAATCTG
GTGGCGGTTTAGTTCAAGCCGGTGATAGCCTTCGTCTGAGCTGCGCCGCA
AGCGGAGATTGTAACGTTCTCTGGCGTATGGGTTGGTTTCGCCAGGCACC
TGGTAAAGAACGTGAATTTGTGGCAGCCATTAGCCTCGACGTTTTGTTTA
CCAACTATGCCGATTCTGTTCGTGGTCGCTTCAGCATTTCAGCAGATTCT
GCGAAGAATACCGTGTACTTACAGATGAACTCACTGAAACCTGAGGATAC
CGCCGTTTATTATTGTGCGGCAATGCCTTTTTTTGACTATTGGGGTCAGG
GCACACAAGTCACGGTCTCAAGCGGCGGAAGCTCTGGTGAACAGAAACTG
ATTTCAGAAG
DCHVLWR#LDGLF#MPFF#evqlvesggglvqag
dslrlscaasgDCHVLWRmgwfrqapgkerefvaaisLDGLFtnyadsvr
grfsisadsakntvylqmnslkpegtavyycaaMPFFdywgqgtqvtvss
ACCATGGAAGTTCAACTGGTTGAATCTGGTGGCGGTTTAGTTCAAGCCG
GTGATAGCCTTCGTCTGAGCTGCGCCGCAAGCGGAGATTGTCACGTTCTC
TGGCGTATGGGTTGGTTTCGCCAGGCACCTGGTAAAGAACGTGAATTTGT
GGCAGCCATTAGCCTCGACGGTTTGTTTACCAACTATGCCGATTCTGTTC
GTGGTCGCTTCAGCATTTCAGCAGATTCTGCGAAGAATACCGTGTACTTA
CAGATGAACTCACTGAAACCTGAGGGTACCGCCGTTTATTATTGTGCGGC
AATGCCTTTTTTTGACTATTGGGGTCAGGGCACACAAGTCACGGTCTCAA
GCGGCGGAAGCTCTGGTGAACAGAAACTGATTTCAGAAG
DCHVL
WR#LDGLF#TVPSHNVGGAHVL#evqlvesggglvqagdslrlscaasgD
CHVLWRmgwfrqapgkerefvaaisLDGLFtnyadsvrgrfsisadsakn
tvylqmnslkpedtavyycnaTVPSHNVGGAHVLeywgqgtqvtvss#AT
ACCATGGAAGTTCAACTGGTTGAATCTGGTGGCGGTTTAGTTCAAGCCGG
TGATAGCCTTCGTCTGAGCTGCGCCGCAAGCGGAGATTGTCACGTTCTCT
GGCGTATGGGTTGGTTTCGCCAGGCACCTGGTAAAGAACGTGAATTTGTG
GCAGCCATTAGCCTCGACGGTTTGTTTACCAACTATGCCGATTCTGTTCG
TGGTCGCTTCAGCATTTCAGCAGATTCTGCGAAGAATACCGTGTACTTAC
AGATGAACTCACTGAAACCTGAGGATACCGCCGTTTATTATTGTAATGCA
ACTGTTCCTTCTCATAACGTCGGGGGTGCGCATGTTCTCGAGTATTGGGG
TCAGGGCACACAAGTCACGGTCTCAAGCGGCGGAAGCTCTGGTGAACAGA
AACTGCTTTCAGAAG
DCHVLWR#LDGLF#LPATSG#evqlvesg
gglvqagdslrlscaasgDCHVLWRmdwfrqapgkerefvaaisLDGLFt
nyadsvrgrfsisadsakntvylqmnslkpedtavyycaaLPATSGdywg
qgtqvtvss#ATATACCATGGAAGTTCAACTGGTTGAATCTGGTGGCGGT
TTAGTTCAAGCCGGTGATAGCCTTCGTCTGAGCTGCGCCGCAAGCGGAGA
TTGTCACGTTCTCTGGCGTATGGATTGGTTTCGCCAGGCACCTGGTAAAG
AACGTGAATTTGTGGCAGCCATTAGCCTCGACGGTTTGTTTACCAACTAT
GCCGATTCTGTTCGTGGTCGCTTCAGCATTTCAGCAGATTCTGCGAAGAA
TACCGTGTACTTACAGATGAACTCACTGAAACCTGAGGATACCGCCGTTT
ATTATTGTGCGGCATTGCCGGCGACTTCTGGCGACTATTGGGGTCAGGGC
ACACAAGTCACGGTCTCAAGCGGCGGAAGCTCTGGTGAACAGAAACTGAT
TTCAGAAG
DCHVLWR#LDGLF#MPFF#evqlvesggglvqagds
lrlscaasgDCHVLWRmgwfrqapgkerefvaaisLDGLFtnyadsvrgr
fsisadsakntvylqmnslkpedtavyycvaMPFFdywgqgtqvtvss#A
TATACCATGGAAGTTCAACTGGTTGAATCTGGTGGCGGTTTAGTTCAAGC
CGGTGATAGCCTTCGTCTGAGCTGCGCCGCAAGCGGAGATTGTCACGTTC
TCTGGCGTATGGGTTGGTTTCGCCAGGCACCTGGTAAAGAACGTGAATTT
GTGGCAGCCATTAGCCTCGACGGTTTGTTTACCAACTATGCCGATTCTGT
TCGTGGTCGCTTCAGCATTTCAGCAGATTCTGCGAAGAATACCGTGTACT
TACAGATGAACTCACTGAAACCTGAGGATACCGCCGTTTATTATTGTGTG
GCAATGCCTTTTTTTGACTATTGGGGTCAGGGCACACAAGTCACGGTCTC
AAGCGGCGGAAGCTCTGGTGAACAGAAACTGATTTCAGAAG
DCH
VLWR#LDGLF#MPFF#evqlvesggglvqagdslrlscaasgDCHVLWRm
gwfrqapgkerefvaaisLDGLFtnyadsvrgrfsisadsakntvylqmn
slkpedtavyycaaMPFFdywgqgtqvtgss#GGAGATATACCATGGAAG
TTCAACTGGTTGAATCTGGTGGCGGTTTAGTTCAAGCCGGTGATAGCCTT
CGTCTGAGCTGCGCCGCAAGCGGAGATTGTCACGTTCTCTGGCGTATGGG
TTGGTTTCGCCAGGCACCTGGTAAAGAACGTGAATTTGTGGCAGCCATTA
GCCTCGACGGTTTGTTTACCAACTATGCCGATTCTGTTCGTGGTCGCTTC
AGCATTTCAGCAGATTCTGCGAAGAATACCGTGTACTTACAGATGAACTC
ACTGAAACCTGAGGATACCGCCGTTTATTATTGTGCGGCAATGCCTTTTT
TTGACTATTGGGGTCAGGGCACACAAGTCACGGGCTCAAGCGGCGGAAGC
TCTGGTGAACAGAAACTGATTTCAGAAG
DGHVLWR#LDGLF#MP
FF#evqlvesggglvqagdslrlscaasgDGHVLWRmgwfrqapgkeref
vaaisLDGLFtnyadsvrgrfsisadsakntvylqmnslkpedtavyyca
aMPFFdywgqgtqvtvss#AAGGAGATATACCATGGAAGTTCAACTGGTT
GAATCTGGTGGCGGTTTAGTTCAAGCCGGTGATAGCCTTCGTCTGAGCTG
CGCCGCAAGCGGAGATGGTCACGTTCTCTGGCGTATGGGTTGGTTTCGCC
AGGCACCTGGTAAAGAACGTGAATTTGTGGCAGCCATTAGCCTCGACGGT
TTGTTTACCAACTATGCCGATTCTGTTCGTGGTCGCTTCAGCATTTCAGC
AGATTCTGCGAAGAATACCGTGTACTTACAGATGAACTCACTGAAACCTG
AGGATACCGCCGTTTATTATTGTGCGGCAATGCCTTTTTTTGACTATTGG
GGTCAGGGCACACAAGTCACGGTCTCAAGCGGCGGAAGCTCTGGTGAACA
GAAACTGATTTCAGAAG
DRHVLWR#LDGLF#LPSVCT#evqlve
sggglvqagdslrlscatsgDRHVLWRmgwfrqapgkerefvaaisLDGL
FtnyadsvrgrfsisadsakntvylqmnslkpedtavyycaaLPSVCTdy
wgqgtqvtvss#GGAGATATACCATGGAAGTTCAACTGGTTGAATCTGGT
GGCGGTTTAGTTCAAGCCGGTGATAGCCTTCGTCTGAGCTGCGCCACAAG
CGGAGATCGTCACGTTCTCTGGCGTATGGGTTGGTTTCGCCAGGCACCTG
GTAAAGAACGTGAATTTGTGGCAGCCATTAGCCTCGACGGTTTGTTTACC
AACTATGCCGATTCTGTTCGTGGTCGCTTCAGCATTTCAGCAGATTCTGC
GAAGAATACCGTGTACTTACAGATGAACTCACTGAAACCTGAGGATACCG
CCGTTTATTATTGTGCGGCACTGCCTAGTGTGTGTACCGACTATTGGGGT
CAGGGCACACAAGTCACGGTCTCAAGCGGCGGAAGCTCTGGTGAACAGAA
ACTGATTTCAGAAG
DCHVLWR#LDGLF#HHFHPGGMD#evqlve
sggglvqagdslrlscaasgDCHVLWRmgwfrqapgkerefvaaisLDGL
FtnyadsvrgrfsisadsakntmylqmnslkpedtavyycnaHHFHPGGM
Ddywgqgtqvtvss#ATATACCATGGAAGTTCAACTGGTTGAATCTGGTG
GCGGTTTAGTTCAAGCCGGTGATAGCCTTCGTCTGAGCTGCGCCGCAAGC
GGAGATTGTCACGTTCTCTGGCGTATGGGTTGGTTTCGCCAGGCACCTGG
TAAAGAACGTGAATTTGTGGCAGCCATTAGCCTCGACGGTTTGTTTACCA
ACTATGCCGATTCTGTTCGTGGTCGCTTCAGCATTTCAGCAGATTCTGCG
AAGAATACCATGTACTTACAGATGAACTCACTGAAACCTGAGGATAGTGA
ACAGAAACTGATTTCAGAAG
DCHVLWR#LDGLF#LPATSG#evq
lvesggglvqagdslrlscaasgDCHVLWRmgwfrqapgkerefvaaisL
DGLFtnyadsvrgrfsisadsakntvylqmnslkpedtavyycaaLPATS
Gdywvqgtqvtvss#AGGAGATATACCATGGAAGTTCAACTGGTTGAATC
TGGTGGCGGTTTAGTTCAAGCCGGTGATAGCCTTCGTCTGAGCTGCGCCG
CAAGCGGAGATTGTCACGTTCTCTGGCGTATGGGTTGGTTTCGCCAGGCA
CCTGGTAAAGAACGTGAATTTGTGGCAGCCATTAGCCTCGACGGTTTGTT
TACCAACTATGCCGATTCTGTTCGTGGTCGCTTCAGCATTTCAGCAGATT
CTGCGAAGAATACCGTGTACTTACAGATGAACTCACTGAAACCTGAGGAT
ACCGCCGTTTATTATTGTGCGGCATTGCCGGCGACTTCTGGCGACTATTG
GGTTCAGGGCACACAAGTCACGGTCTCAAGCGGCGGAAGCTCTGGTGAAC
AGAAACTGATTTCAGAAG
DCHVLWS#LDGLF#MPFF#evqlves
ggglvqagdslrlscaasgDCHVLWSmgwfrqapgkerefvaaisLDGLF
tnyadsvrgrfsisadsakntvylqmnslkpedtavyycaaMPFFdywgq
gtqvtvss#GGAGATATACCATGGAAGTTCAACTGGTTGAATCTGGTGGC
GGTTTAGTTCAAGCCGGTGATAGCCTTCGTCTGAGCTGCGCCGCAAGCGG
AGATTGTCACGTTCTCTGGAGTATGGGTTGGTTTCGCCAGGCACCTGGTA
AAGAACGTGAATTTGTGGCAGCCATTAGCCTCGACGGTTTGTTTACCAAC
TATGCCGATTCTGTTCGTGGTCGCTTCAGCATTTCAGCAGATTCTGCGAA
GAATACCGTGTACTTACAGATGAACTCACTGAAACCTGAGGATACCGCCG
TTTATTATTGTGCGGCAATGCCTTTTTTTGACTATTGGGGTCAGGGCACA
CAAGTCACGGTCTCAAGCGGCGGAAGCTCTGGTGAACAGAAACTGATTTC
AGAAG
DCHVLWR#LDGLF#MPFF#evqlvesggglvqagdslrl
scaasgDCHVLWRmgwfrqapgkerefvaaisLDGLFtnyadsvrgrfsi
sadsakntvylqmnslkpedtavyycaaMPFFdywgqgtqvtvsr#GAGA
TATACCATGGAAGTTCAACTGGTTGAATCTGGTGGCGGTTTAGTTCAAGC
CGGTGATAGCCTTCGTCTGAGCTGCGCCGCAAGCGGAGATTGTCACGTTC
TCTGGCGTATGGGTTGGTTTCGCCAGGCACCTGGTAAAGAACGTGAATTT
GTGGCAGCCATTAGCCTCGACGGTTTGTTTACCAACTATGCCGATTCTGT
TCGTGGTCGCTTCAGCATTTCAGCAGATTCTGCGAAGAATACCGTGTACT
TACAGATGAACTCACTGAAACCTGAGGATACCGCCGTTTATTATTGCGCG
GCAATGCCTTTTTTTGACTATTGGGGTCAGGGCACACAAGTCACGGTCTC
ACGCGGCGGAAGCTCTGGTGAACAGAAACTGATTTCAGAAG
DCH
VLWR#LDGLF#MPFF#evqlvesggglvqagdslrlscaasgDCHVLWRm
gwfrqapgkerefvaaisLDGLFtnyadsvrgrfsisadsakntvylqmn
slkpedtavyycaaMPFFdywgqgtqvtfss#ACCATGGAAGTTCAACTG
GTTGAATCTGGTGGCGGTTTAGTTCAAGCCGGTGATAGCCTTCGTCTGAG
CTGCGCCGCAAGCGGAGATTGTCACGTTCTCTGGCGTATGGGTTGGTTTC
GCCAGGCACCTGGTAAAGAACGTGAATTTGTGGCAGCCATTAGCCTCGAC
GGTTTGTTTACCAACTATGCCGATTCTGTTCGTGGTCGCTTCAGCATTTC
AGCAGATTCTGCGAAGAATACCGTGTACTTACAGATGAACTCACTAAAAC
CTGAGGATACCGCCGTTTATTATTGTGCGGCAATGCCTTTTTTTGACTAT
TGGGGTCAGGGCACACAAGTCACGTTCTCAAGCGGCGGAAGCTCTGATGA
ACAGAAACTGATTTCAGAAG
DCHVLWR#LDGLF#MPFF#evqlv
esggglvqagdslrlscaasgDCHVLWRmgwfrqapgkerefvaaisLDG
LFtnyadsvrgrfsisadsakntvylqmnslkpedtavyycaaMPFFdhw
gqgtqvtvss#AAGGAGATATACCATGGAAGTTCAACTGGTTGAATCTGG
TGGCGGTTTAGTTCAAGCCGGTGATAGCCTTCGTCTGAGCTGCGCCGCAA
GCGGAGATTGTCACGTTCTCTGGCGTATGGGTTGGTTTCGCCAGGCACCT
GGTAAAGAACGTGAATTTGTGGCAGCCATTAGCCTCGACGGTTTGTTTAC
CAACTATGCCGATTCTGTTCGTGGTCGCTTCAGCATTTCAGCAGATTCTG
CGAAGAATACCGTGTACTTACAGATGAACTCACTGAAACCTGAGGATACC
GCCGTTTATTATTGTGCGGCAATGCCTTTTTTTGACCATTGGGGTCAGGG
CACACAAGTCACGGTCTCAAGCGGCGGAAGCTCTGGTGAACAGAAACTGA
TTTCAGAAG
DCHVLWR#LDGLF#HHFHPGGMD#evqlvesgggl
vqaggsIrlscaasgDCHVLWRmgwfrqapgkerefvaaisLDGLFtnya
dsvrgrfsisadsakntvylqmnslkpedtavyycnaHHFHPGGMDdywg
qgtqvtvss#AAGGAGATATACCATGGAAGTTCAACTGGTTGAATCTGGT
GGCGGTTTAGTTCAAGCCGGTGGTAGCCTTCGTCTGAGCTGCGCCGCAAG
CGGAGATTGTCACGTTCTCTGGCGTATGGGTTGGTTTCGCCAGGCACCTG
GTAAAGAACGTGAATTTGTGGCAGCCATTAGCCTCGACGGTTTGTTTACC
AACTATGCCGATTCTGTTCGTGGTCGCTTCAGCATTTCAGCAGATTCTGC
GAAGAATACCGTGTACTTACAGATGAACTCACTGAAACCTGGCTCTGGTG
AACAGAAACTGATTTCAGAAG
DCHVLWR#LDGLF#MPFF#evql
vesggglvqagdslrlscaasgDCHVLWRmgwfrqapgkerefvaaisLD
GLFtnyadsvrgrfsisadsakntvylqmnslkpedtavyycaaMPFFay
wvqgtqvtvss#AGATATACCATGGAAGTTCAACTGGTTGAATCTGGTGG
CGGTTTAGTTCAAGCCGGTGATAGCCTTCGTCTGAGCTGCGCCGCAAGCG
GAGATTGTCACGTTCTCTGGCGTATGGGTTGGTTTCGCCAGGCACCTGGT
AAAGAACGTGAATTTGTGGCAGCCATTAGCCTCGACGGTTTGTTTACCAA
CTATGCCGATTCTGTTCGTGGTCGCTTCAGCATTTCAGCAGATTCTGCGA
AGAATACCGTGTACTTACAGATGAACTCACTGAAACCTGAGGATACCGCC
GTTTATTATTGTGCGGCAATGCCTTTTTTTGCCTATTGGGTTCAGGGCAC
ACAAGTCACGGTCTCAAGCGGCGGAAGCTCTGGTGAACAGAAACTGATTT
CAGAAG
DCHVLWR#LDGLF#LPKRTV#qvqlvesggalvqagds
lrlscaasgDCHVLWRmgwfrqtpgkerefvaaisLDGLFtnyadsvrgr
fsisadsakntvylqmnslkpedtavyycaaLPGATTGTCACGTTCTCTG
GCGTATGGGTTGGTTTCGCCAGACACCTGGTAAAGAACGTGAATTTGTGG
CAGCCATTAGCCTCGACGGTTTGTTTACCAACTATGCCGATTCTGTTCGT
GGTCGCTTCAGCATTTCAGCAGATTCTGCGAAGAATACCGTGTACTTACA
GATGAACTCACTGAAACCTGAGGATACCGCCGTTTATTATTGTGCGGCAC
TGCCTAAGCGGACTGTGGACTATTGGGGTCAGGGCACACAAGTCACGGTC
TCAAGCGGCGGAAGCTCTGGTGAACAGAAACTGATTTCAGAAG
D
CHVLWR#LDGLF#MPFF#evqlvesggglvqagdslrlscaasgDCHVLW
RmgwfrqapgkerefvaaisLDGLFtnyadsvrgrfsisadpakntvylq
mnslkpedtavyycaaMPFFdywgqgtqvtvss#ACCATGGAAGTTCAAC
TGGTTGAATCTGGTGGCGGTTTAGTTCAAGCCGGTGATAGCCTTCGTCTG
AGCTGCGCCGCAAGCGGAGATTGTCACGTTCTCTGGCGTATGGGTTGGTT
TCGACAGGCACCTGGTAAAGAACGTGAATTTGTGGCAGCCATTAGCCTCG
ACGGTTTGTTTACCAACTATGCCGATTCTGTTCGTGGTCGCTTCAGCATT
TCAGCAGATCCTGCGAAGAATACCGTGTACTTACAGATGAACTCACTGAA
ACCTGAGGATACCGCCGTTTATTATTGTGCGGCAATGCCTTTTTTTGACT
ATTGGGGTCAGGGCACACAAGTCACGGTCTCAAGCGGCGGAAGCTCTGGT
GAACAGAAACTGATTTCAGAAG
DCHVLWR#LDGLF#LPATSG#e
vqlvesggglvqvgdslrlscaasgDCHVLWRmgwfrqapgkerefvaai
sLDGLFtnyadsvrgrfsisadsakntvylqmnslkpedtavyycaaLPA
TSGdywgqgtqvtvss#GAAGGAGATATACCATGGAAGTTCAACTGGTTG
AATCTGGTGGCGGTTTAGTTCAAGTCGGTGATAGCCTTCGTCTGAGCTGC
GCCGCAAGCGGAGATTGTCACGTTCTCTGGCGTATGGGTTGGTTTCGCCA
GGCACCTGGTAAAGAACGTGAATTTGTGGCAGCCATTAGCCTCGACGGTT
TGTTTACCAACTATGCCGATTCTGTTCGTGGTCGCTTCAGCATTTCAGCA
GATTCTGCGAAGAATACCGTGTACTTACAGATGAACTCACTGAAACCTGA
GGATACCGCCGTTTATTATTGTGCGGCATTGCCGGCGACTTCTGGCGACT
ATTGGGGTCAGGGCACACAAGTCACGGTCTCAAGCGGCGGAAGCTCTGGT
GAACAGAAACTGATTTCAGAAG
DCHVLWR#LDGLF#MPFF#evq
lvesggglvqagdslrlscaasgDCHVLWRmgwfrqapgkerefvaaisL
DGLFtnyadsvcgrfsisadsakntvylqmnslkpedtavyycaaMPFFd
ywgqgtqvtvss#AAGGAGATATACCATGGAAGTTCAACTGGTTGAATCT
GGTGGCGGTTTAGTTCAAGCCGGTGATAGCCTTCGTCTGAGCTGCGCCGC
AAGCGGAGATTGTCACGTTCTCTGGCGTATGGGTTGGTTTCGCCAGGCAC
CTGGTAAAGAACGTGAATTTGTGGCAGCCATTAGCCTCGACGGTTTGTTT
ACCAACTATGCCGATTCTGTTTGTGGTCGCTTCAGCATTTCAGCAGATTC
TGCGAAGAATACCGTGTACTTACAGATGAACTCACTGAAACCTGAGGATA
CCGCCGTTTATTATTGTGCGGCAATGCCTTTTTTTGACTATTGGGGTCAG
GGCACACAAGTCACGGTCTCAAGCGGCGGAAGCTCTGGTGAACAGAAACT
GATTTCAGAAG
DCHVLWR#LDGLF#MPFF#evqlvesggglvqa
gdslrlscaasgDCHVLWRmgwfrqapgkerefvaaisLDGLFtnyadsv
rgrfsisadsakntvylqmnslkpedtavyycaaMPFFdywgrgtqvtvs
s#AAGGAGATATACCATGGAAGTTCAACTGGTTGAATCTGGTGGCGGTTT
AGTTCAAGCCGGTGATAGCCTTCGTCTGAGCTGCGCCGCAAGCGGAGATT
GTCACGTTCTCTGGCGTATGGGTTGGTTTCGCCAGGCACCTGGTAAAGAA
CGTGAATTTGTGGCAGCCATTAGCCTCGACGGTTTGTTTACCAACTATGC
CGATTCTGTTCGTGGTCGCTTCAGCATTTCAGCAGATTCTGCGAAGAATA
CCGTGTACTTACAGATGAACTCACTGAAACCTGAGGATACCGCCGTTTAT
TATTGTGCGGCAATGCCTTTTTTTGACTATTGGGGTCGGGGCACACAAGT
CACGGTCTCAAGCGGCGGAAGCTCTGGTGAACAGAAACTGATTTCAGAAG
DCHVLWR#LDGLF#CTRFRA#evqlvesggglvqagdslrlsca
asgDCHVLWRmgwfrqapgkerefvaaisLDGLFtnyadsvrgrfsisad
sakntvylqmnslkpedtavyycaaCTRFRAdywgqgtqvtvss#AAGGA
GATATACCATGGAAGTTCAACTGGTTGAATCTGGTGGCGGTTTAGTTCAA
GCCGGCGATAGCCTTCGTCTGAGCTGCGCCGCAAGCGGAGATTGTCACGT
TCTCTGGCGTATGGGTTGGTTTCGCCAGGCACCTGGTAAAGAACGTGAAT
TTGTGGCAGCCATTAGCCTCGACGGTTTGTTTACCAACTATGCCGATTCT
GTTCGTGGTCGCTTCAGCATTTCAGCAGATTCTGCGAAGAATACCGTGTA
CTTACAGATGAACTCACTGAAACCTGAGGATACCGCCGTTTATTATTGTG
CGGCATGTACCAGGTTCAGGGCCGACTATTGGGGTCAGGGCACACAAGTC
ACGGTCTCAAGCGGCGGAAGCTCTGGTGAACAGAAACTGATTTCAGAAG
DCHVLWR#LDGLF#LPATSG#evqlvesggglvkagdslrlscaa
sgDCHVLWRmgwfrqapgkerefvaaisLDGLFtnyadsvrgrfsisads
akntvylqmnslkpedtavyycaaLPATSGaywgqgtqvtvss#GGAGAT
ATACCATGGAAGTTCAACTGGTTGAATCTGGTGGCGGTTTAGTTAAAGCC
GGTGATAGCCTTCGTCTGAGCTGCGCCGCAAGCGGAGATTGTCACGTTCT
CTGGCGTATGGGTTGGTTTCGCCAGGCACCTGGTAAAGAACGTGAATTTG
TGGCAGCCATTAGCCTCGACGGTTTGTTTACCAACTATGCCGATTCTGTT
CGTGGTCGCTTCAGCATTTCAGCAGATTCTGCGAAGAATACCGTGTACTT
ACAGATGAACTCACTGAAACCTGAGGATACCGCCGTTTATTATTGTGCGG
CATTGCCGGCGACTTCTGGCGCCTATTGGGGTCAGGGCACACAAGTCACG
GTCTCAAGCGGCGGAAGCTCTGGTGAACAGAAACTGATTTCAGAAG
DCHVLWR#LDGLF#MPFF#evqlvesggglvqagdrlrlscaasgDCH
VLWRmgwfrqapgkerefvaaisLDGLFtnyadsvrgrfsisadsakntv
ylqmnslkpedtavyycaaMPFFdywgqgtqvtvss#GAAGGAGATATAC
CATGGAAGTTCAACTGGTTGAATCTGGTGGCGGTTTAGTTCAAGCCGGTG
ATCGCCTTCGTCTGAGCTGCGCCGCAAGCGGAGATTGTCACGTTCTCTGG
CGTATGGGTTGGTTTCGCCAGGCACCTGGTAAAGAACGTGAATTTGTGGC
AGCCATTAGCCTCGACGGTTTGTTTACCAACTATGCCGATTCTGTTCGTG
GTCGCTTCAGCATTTCAGCAGATTCTGCGAAGAATACCGTGTACTTACAG
ATGAACTCACTGAAACCTGAGGATACCGCCGTTTATTATTGTGCGGCAAT
GCCTTTTTTTGACTATTGGGGTCAGGGCACACAAGTCACGGTCTCAAGCG
GCGGAAGCTCTGGTGAAAAGAAACTGATTTCAGAAGCCAA
DCHV
LWR#LDGLF#MPFF#evqlvesggglvqagdslrlscaasgDCHVLWRmg
wfrqapgkerefaaaisLDGLFtnyadsvrgrfsisadsakntvylqmns
lkpedtavyycaaMPFFdywgqgtqvtvss#ATACCATGGAAGTTCAACT
GGTTGAATCTGGTGGCGGTTTAGTTCAAGCCGGTGATAGCCTTCGTCTGA
GCTGCGCCGCAAGCGGAGATTGTCACGTTCTCTGGCGTATGGGTTGGTTT
CGCCAGGCACCTGGTAAAGAACGTGAATTTGCGGCAGCCATTAGCCTCGA
CGGTTTGTTTACCAACTATGCCGATTCTGTTCGTGGTCGCTTCAGCATTT
CAGCAGATTCTGCGAAGAATACCGTGTACTTACAGATGAACTCACTGAAA
CCTGAGGATACCGCCGTTTATTATTGTGCGGCAATGCCTTTTTTTGACTA
TTGGGGTCAGGGCACACAAGTCACGGTCTCAAGCGGCGGAAGCTCTGGTG
AACAGAAACTGATTTCAGAAGCCAA
DCHVLWR#LDGLF#HNFHP
GGMD#evqlvesggglvqagdslrlscaasgDCHVLWRmgwfrqapgker
efvaaisLDGLFtnyadsvrgrfsisadsakntvylqmnslkpedtavyy
cnaHNFHPGGMDdywgqgtqvtvss#AGATATACCATGGAAGTTCAACTG
GTTGAATCTGGTGGCGGTTTAGTTCAAGCCGGTGATAGCCTTCGTCTGAG
CTGCGCCGCAAGCGGAGATTGTCACGTTCTCTGGCGTATGGGTTGGTTTC
GCCAGGCACCTGGTAAAGAACGTGAATTTGTGGCAGCCATTAGCCTCGAC
GGTTTGTTTACCAACTATGCCGATTCTGTTCGTGGTCGCTTCAGCATTTC
AGCAGATTCTGCGAAGAATACCGTGTACTTACAGATGAACTCACTGAAAC
CTGAGGATACCGCCGTTTATTATTGTAATGCACACAATTTTCATCCTGGT
GGTATGGATGACTATTGGGGTCAGGGCACACAAGTCACGGTCTCAAGCGG
CGGAAGCTCTGGTGAACAGAAACTGATTTCAGAAGCCAA
DCHVL
SR#LDGLF#TIYGVY#evqlvesggglvqagdslrlscaasgDCHVLSRm
gwfrqapgkerefvaaisLDGLFtnyadsvrgrfgisadsakntvylqmn
slkpedtavyycaaTIYGVYeywgqgtqvtvss#AGGAGATATACCATGG
AAGTTCAACTGGTTGAATCTGGTGGCGGTTTAGTTCAAGCCGGTGATAGC
CTTCGTCTGAGCTGCGCCGCAAGCGGAGATTGTCACGTTCTCTCGCGTAT
GGGTTGGTTTCGCCAGGCACCTGGTAAAGAACGTGAATTTGTGGCAGCCA
TTAGCCTCGACGGTTTGTTTACCAACTATGCCGATTCTGTTCGTGGTCGC
TTCGGCATTTCAGCAGATTCTGCGAAGAATACCGTGTACTTACAGATGAA
CTCACTGAAACCTGAGGATACCGCCGTTTATTATTGTGCGGCAACTATCT
ATGGTGTCTATGAGTATTGGGGTCAGGGCACACAAGTCACGGTCTCAAGC
GGCGGAAGCTCTGGTGAACAGAAACTGATTTCAGAAGCCAA
DCH
VLWR#LDGLF#MPFF#evqlvesggglvqagdslrlscaasgDCHVLWRm
gwfrqapgkerefvaaisLDGLFtnyadsvrgrfsisadsakntvylqmn
slkpedtavyycaaMPFFdywgqgtqgtvss#ACCATGGAAGTTCAACTG
GTTGAATCTGGTGGCGGTTTAGTTCAAGCCGGTGATAGCCTTCGTCTGAG
CTGCGCCGCAAGCGGAGATTGTCACGTTCTCTGGCGTATGGGTTGGTTTC
GCCAGGCACCTGGTAAAGAACGTGAATTTGTGGCAGCCATTAGCCTCGAC
GGTTTGTTTACCAACTATGCCGATTCTGTTCGTGGTCGCTTCAGCATTTC
AGCAGATTCTGCGAAGAATACCGTGTACTTACAGATGAACTCACTGAAAC
CTGAGGATACCGCCGTTTATTATTGTGCGGCAATGCCTTTTTTTGACTAT
TGGGGTCAGGGCACACAAGGCACGGTCTCAAGCGGCGGAAGCTCTGGTGA
ACAGAAACTGATTTCAGAAGCCAA
DCHVLWR#LDGLF#LPATSGevqlvesggglvqagdslrlscaasgDCHV
LWRmgwfrqapgkerefva
aisLDGLFtnyadsvrgrfsisadsakntvylqmnslkpedtavyycaaL
PATSGdywgqgtqgtvss#GGAGATATACCATGGAAGTTCAACTGGTTGA
ATCTGGTGGCGGTTTAGTTCAAGCCGGTGATAGCCTTCGTCTGAGCTGCG
CCGCAAGCGGAGATTGTCACGTTCTCTGGCGTATGGGTTGGTTTCGCCAG
GCACCTGGTAAAGAACGTGAATTTGTGGCAGCCATTAGCCTCGACGGTTT
GTTTACCAACTATGCCGATTCTGTTCGTGGTCGCTTCAGCATTTCAGCAG
ATTCTGCGAAGAATACCGTGTACTTACAGATGAACTCACTGAAACCTGAG
GATACCGCCGTTTATTATTGTGCGGCATTGCCGGCGACTTCTGGCGACTA
TTGGGGTCAGGGCACACAAGGTACGGTCTCAAGCGGCGGAAGCTCTGGTG
AACAGAAACTGATTTCAGAAGCCAA
DCHVLWR#LDGLF#MPFF#
evqlvesggglvhagdslrlscaasgDCHVLWRmgwfrqapgkerefvaa
isLDGLFtnyadsvrgrfsisadsakntvylqmnslkpedtavyycaaMP
FFdywaqgthvtvss#GAAGGAGATATACCATGGAAGTTCAACTGGTTGA
ATCTGGTGGCGGTTTAGTTCACGCCGGTGATAGCCTTCGTCTGAGCTGCG
CCGCAAGCGGAGATTGTCACGTTCTCTGGCGTATGGGTTGGTTTCGCCAG
GCACCTGGTAAAGAACGTGAATTTGTGGCAGCCATTAGCCTCGACGGTTT
GTTTACCAACTATGCCGATTCTGTTCGTGGTCGCTTCAGCATTTCAGCAG
ATTCTGCGAAGAATACCGTGTACTTACAGATGAACTCACTGAAACCTGAG
GATACCGCCGTTTATTATTGTGCGGCAATGCCTTTTTTTGACTATTGGGC
TCAGGGCACACATGTCACGGTCTCAAGCGGCGGAAGCTCTGGTGCACAGA
AACTGATCTCAGAAGCCAA
DCHVLWR#LDGLF#MPFF#qvqlqe
sggglvqagdslrlscaasgDCHVLWRmgwfrqapgkerefvaaisLDGL
FtnyadsvrgrfsisadsakntvylqmnslkpedtavyycaaMPFFdywg
qgtqvtvss#ATATACCATGCAGGTTCAACTGCAAGAATCTGGTGGCGGT
TTAGTTCAAGCCGGTGATAGCCTTCGTCTGAGCTGCGCCGCAAGCGGAGA
TTGTCACGTTCTCTGGCGTATGGGTTGGTTTCGCCAGGCACCTGGTAAAG
AACGTGAATTTGTGGCAGCCATTAGCCTCGACGGTTTGTTTACCAACTAT
GCCGATTCTGTTCGTGGTCGCTTCAGCATTTCAGCAGATTCTGCGAAGAA
TACCGTGTACTTACAGATGAACTCACTGAAACCTGAGGATACCGCCGTTT
ATTATTGTGCGGCAATGCCTTTTTTTGACTATTGGGGTCAGGGCACACAA
GTCACGGTCTCAAGCGGCGGAAGCTCTGGTGAACAGAAACTGATTTCAGA
AGCCAA
DCHVLWR#LDGLF#LPATSG#evqlvesggglvqagds
lrlscaasgDCHVLWRmgwfrqapgkereivaaisLDGLFtnyadsvrgr
fsisadsakntvylqmnslkpedtavyycaaLPATSGdcwgqgtqvtvss
ACCATGGAAGTTCAACTGGTTGAATCTGGTGGCGGTTTAGTTCAAGCCG
GTGATAGCCTTCGTCTGAGCTGCGCCGCAAGCGGAGATTGTCACGTTCTC
TGGCGTATGGGTTGGTTTCGCCAGGCACCTGGTAAAGAACGTGAAATTGT
GGCAGCCATTAGCCTCGACGGTTTGTTTACCAACTATGCCGATTCTGTTC
GTGGTCGCTTCAGCATTTCAGCAGATTCTGCGAAGAATACCGTGTACTTA
CAGATGAACTCACTGAAACCTGAGGATACCGCCGTTTATTATTGTGCGGC
ATTGCCGGCGACTTCTGGCGACTGTTGGGGTCAGGGCACACAAGTCACGG
TCTCAAGCGGCGGAAGCTCTGGTGAACAGAAACTGATTTCAGAAGCCAA
DCHVLWR#LDGLF#LTSPLSDSS#evqlfesggglvqagdslrls
caasgDCHVLWRmgwfrqapgkerefvaaisLDGLFtnyadsvrgrfsis
adsakntvylqmnslkpedtavyycaaLTSPLSDSSdywgqgtqvtvss#
ATATACCATGGAAGTTCAACTGTTTGAATCTGGTGGCGGTTTAGTTCAAG
CCGGTGATAGCCTTCGTCTGAGCTGCGCCGCAAGCGGAGATTGTCACGTT
CTCTGGCGTATGGGTTGGTTTCGCCAGGCACCTGGTAAAGAACGTGAATT
TGTGGCAGCCATTAGCCTCGACGGTTTGTTTACCAACTATGCCGATTCTG
TTCGTGGTCGCTTCAGCATTTCAGCAGATTCTGCGAAGAATACCGTGTAC
TTACAGATGAACTCACTGAAACCTGAGGACACCGCCGTTTATTATTGTGC
GGCATTGACGTCTCCGCTTTCGGATTCGTCCGACTATTGGGGTCAGGGCA
CACAAGTCACGGTCTCAAGCGGCGGAAGCTCTGGTGAACAGAAACTGATT
TCAGAAGCCAA
DCHVLWR#LDGLF#MPFF#evqlvesggglvqa
gdslrlscaasgDCHVLWRmgwfrqapgkerefvaaisLDGLFtnyadsv
rgrfsisadsakntvylqmnslkpedtavyycaaMPFFdywgqgtqvtvs
i#ATATACCATGGAAGTTCAACTGGTTGAATCTGGTGGCGGTTTAGTTCA
AGCCGGTGATAGCCTTCGTCTGAGCTGCGCCGCAAGCGGAGATTGTCACG
TTCTCTGGCGTATGGGTTGGTTTCGCCAGGCACCTGGTAAAGAACGTGAA
TTTGTGGCAGCCATTAGCCTCGACGGTTTGTTTACCAACTATGCCGATTC
TGTTCGTGGTCGCTTCAGCATTTCAGCAGATTCTGCGAAGAATACCGTGT
ACTTACAGATGAACTCACTGAAACCTGAGGATACCGCCGTTTATTATTGT
GCGGCAATGCCTTTTTTTGACTATTGGGGTCAGGGCACACAAGTCACGGT
CTCAATCGGCGGAAGCTCTGGTGAACAGAAACTGATTTCAGAAGCCAA
DCHVLWR#LDGLF#MPFF#evqlvesggglvqtgdslrlscaasgD
CHVLWRmgwfrqapgkerefvaaisLDGLFtnyadsvrgrfsisadsakn
tvylqmnslkpedtavyycaaMPFFdywgqgtqvtvss#GGAGATATACC
ATGGAAGTTCAACTGGTTGAATCTGGTGGCGGTTTAGTTCAAACCGGTGA
TAGCCTTCGTCTGAGCTGCGCCGCAAGCGGAGATTGTCACGTTCTCTGGC
GTATGGGTTGGTTTCGCCAGGCACCTGGTAAAGAACGTGAATTTGTGGCA
GCCATTAGCCTCGACGGTTTGTTTACCAACTATGCCGATTCTGTTCGTGG
TCGCTTCAGCATTTCAGCAGATTCTGCGAAGAATACCGTGTACTTACAGA
TGAACTCACTGAAACCTGAGGATACCGCCGTTTATTATTGTGCGGCAATG
CCTTTTTTTGACTATTGGGGTCAGGGCACACAAGTCACGGTCTCAAGCGG
CGGAAGCTCTGGTGAACAGAAACTGATTTCAGAAGCCAA
DCHIL
WR#LDGLF#LPSVCT#evqlvesggglvqagdslrlscaasgDCHILWRm
gwfrqapgkerefvaaisLDGLFtnyadsvrgrfsisadsakntvylqmn
slkpedtavyycaaLPSVCTdywgqgtqgtvss#ATATACCATGGAAGTT
CAACTGGTTGAATCTGGTGGCGGTTTAGTTCAAGCCGGTGATAGCCTTCG
TCTGAGCTGCGCCGCAAGCGGAGATTGTCACATTCTCTGGCGTATGGGTT
GGTTTCGCCAGGCACCTGGTAAAGAACGTGAATTTGTGGCAGCCATTAGC
CTCGACGGTTTGTTTACCAACTATGCCGATTCTGTTCGTGGTCGCTTCAG
CATTTCAGCAGATTCTGCGAAGAATACCGTGTACTTACAGATGAACTCAC
TGAAACCTGAGGATACCGCCGTTTATTATTGTGCGGCACTGCCTAGTGTG
TGTACCGACTATTGGGGGCAGGGCACACAAGGCACGGTCTCAAGCGGCGG
AAGCTCTGGTGAACAGAAACTGATTTCAGAAGCCAA
DCHVLWR#
LDGLF#MPFF#evqlvesggglvqagdslrlscaasgDCHVLWRmgwfrq
apgkerefvaaisLDGLFtnyadsvrghfsisadsakntvylqmnslkpe
dtavyycaaMPFFdywgqgtqvtvss#AGGAGATATACCATGGAAGTTCA
ACTGGTTGAATCTGGTGGCGGTTTAGTTCAAGCCGGTGATAGCCTTCGTC
TGAGCTGCGCCGCAAGCGGAGATTGTCACGTTCTCTGGCGTATGGGTTGG
TTTCGCCAGGCACCTGGTAAAGAACGTGAATTTGTGGCAGCCATTAGCCT
CGACGGTTTGTTTACCAACTATGCCGATTCTGTTCGTGGTCACTTCAGCA
TTTCAGCAGATTCTGCGAAGAATACCGTGTACTTACAGATGAACTCACTG
AAACCTGAGGATACCGCCGTTTATTATTGTGCGGCAATGCCTTTTTTTGA
CTATTGGGGTCAGGGCACACAAGTCACGGTCTCAAGCGGCGGAAGCTCTG
GTGAACAGAAACTGATTTCAGAAGCCAA
DFHVLWR#LDGLF#LP
ATSG#evqlvesggglvqagdslrlscaasgDFHVLWRmgwfrqapgker
efvaaisLDGLFtnyadsvrgrfsisadsakntvylqmnslkpedtavyy
caaLPATSGdywgqgtqvtvss#GGAGATATACCATGGAAGTTCAACTGG
TTGAATCTGGTGGCGGTTTAGTTCAAGCCGGTGATAGCCTTCGTCTGAGC
TGCGCCGCAAGCGGAGATTTTCACGTTCTCTGGCGTATGGGTTGGTTTCG
CCAGGCACCTGGTAAAGAACGTGAATTTGTGGCAGCCATTAGCCTCGACG
GTTTGTTTACCAACTATGCCGATTCTGTTCGTGGTCGCTTCAGCATTTCA
GCAGATTCTGCGAAGAATACCGTGTACTTACAGATGAACTCACTGAAACC
TGAGGATACCGCCGTTTATTATTGTGCGGCATTGCCGGCGACTTCTGGCG
ACTATTGGGGTCAGGGCACACAAGTCACGGTCTCAAGCGGCGGAAGCTCT
GGTGAACAGAAACTGATTTCAGAAGCCAA
DCHVLWR#LDGLF#M
PFF#evqlvesggglvqagdslrlscaasgDCHVLWRmgwfrqapgkere
fvvaisLDGLFtnyadsvrgrfsisadsakntvylqmnslkpedtavyyc
aaMPFFdywgqgtqvtvss#GAAGGAGATATACCATGGAAGTTCAACTGG
TTGAATCTGGTGGCGGTTTAGTTCAAGCCGGTGATAGCCTTCGTCTGAGC
TGCGCCGCAAGCGGAGATTGTCACGTTCTCTGGCGTATGGGTTGGTTTCG
CCAGGCACCTGGTAAAGAACGTGAATTTGTGGTAGCCATTAGCCTCGACG
GTTTGTTTACCAACTATGCCGATTCTGTTCGTGGTCGCTTCAGCATTTCA
GCAGATTCTGCGAAGAATACCGTGTACTTACAGATGAACTCACTGAAACC
TGAGGATACCGCCGTTTATTATTGTGCGGCAATGCCTTTTTTTGACTATT
GGGGTCAGGGCACACAAGTCACGGTCTCAAGCGGCGGAAGCTCTGGTGAA
CAGAAACTGATTTCAGAAGCCAA
DCHVLWR#LDGLF#MPFF#ev
qlvesggglvqagdslrlscaasgDCHVLWRmgwfrqapgkerefvaais
LDGLFtnyadsvrgrfsisadsaknavylqmnslkpedtavyycaaMPFF
dywgqgtqvtvss#ACCATGGAAGTTCAACTGGTTGAATCTGGTGGCGGT
TTAGTTCAAGCCGGTGATAGCCTTCGTCTGAGCTGCGCCGCAAGCGGAGA
TTGTCACGTTCTCTGGCGTATGGGTTGGTTTCGCCAGGCACCTGGTAAAG
AACGTGAATTTGTGGCAGCCATTAGCCTCGACGGTTTGTTTACCAACTAT
GCCGATTCTGTTCGTGGTCGCTTCAGCATTTCAGCAGATTCTGCGAAGAA
TGCCGTGTACTTACAGATGAACTCACTGAAACCTGAGGATACCGCCGTTT
ATTATTGTGCGGCAATGCCTTTTTTTGACTATTGGGGTCAGGGCACACAA
GTCACGGTCTCAAGCGGCGGAAGCTCTGGTGAACAGAAACTGATTTCAGA
AGCCAA
DCHVLWR#LDGLF#LPATSG#evqlvesggglvqagds
lrlscaasgDCHVLWRmgwfrqapgkerefvaaisLDGLFtnyadsvrgr
fsisadsakntvylqmnllkpedtavyycaaLPATSGdywgqgtqvtvss
GGAGATATACCATGGAAGTTCAACTGGTTGAATCTGGTGGCGGTTTAGT
TCAAGCCGGTGATAGCCTTCGTCTGAGCTGCGCCGCAAGCGGAGATTGTC
ACGTTCTCTGGCGTATGGGTTGGTTTCGCCAGGCACCTGGTAAAGAACGT
GAATTTGTGGCAGCCATTAGCCTCGACGGTTTGTTTACCAACTATGCCGA
TTCTGTTCGTGGTCGCTTCAGCATTTCAGCAGATTCTGCGAAGAATACCG
TGTACTTACAGATGAACTTACTGAAACCTGAGGATACCGCCGTTTATTAT
TGTGCGGCATTGCCGGCGACTTCTGGCGACTATTGGGGTCAGGGCACACA
AGTCACGGTCTCAAGCGGCGGAAGCTCTGGTGAACAGAAACTGATTTCAG
AAGCCAA
DCHVLWR#LDGLF#MPFF#evqlvesggglvqdgdsv
rlscaasgDCHVLWRmgwfrqapgkerefvaaisLDGLFtnyadsvrgrf
sisadsakntvylqmnslkpedtavyycaaMPFFdywgqgtqvtvss#GA
AGGAGATATACCATGGAAGTTCAACTGGTTGAATCTGGTGGCGGTTTAGT
TCAAGACGGTGATAGCGTTCGTCTGAGCTGCGCCGCAAGCGGAGATTGTC
ACGTTCTCTGGCGTATGGGTTGGTTTCGCCAGGCACCTGGTAAAGAACGT
GAATTTGTGGCAGCCATTAGCCTCGACGGTTTGTTTACCAACTATGCCGA
TTCTGTTCGTGGTCGCTTCAGCATTTCAGCAGATTCTGCGAAGAATACCG
TGTACTTACAGATGAACTCACTGAAACCTGAGGATACCGCCGTTTATTAT
TGTGCGGCAATGCCTTTTTTTGACTATTGGGGTCAGGGCACACAAGTCAC
GGTCTCAAGCGGCGGAAGCTCTGGTGAACAGAAACTGATTTCAGAAGCCA
A
DCHVLWR#LVGLF#MPFF#evqlvesggglvqagdslrlscaa
sgDCHVLWRmgwfrqapgkerefvaaisLVGLFtnyvdsvrgrfsisads
akntvylqmnslkpedtavyycaaMPFFdywgqgtqvtvss#ATATACCA
TGGAAGTTCAACTGGTTGAATCTGGTGGCGGTTTAGTTCAAGCCGGTGAT
AGCCTTCGTCTGAGCTGCGCCGCAAGCGGAGATTGTCACGTTCTCTGGCG
TATGGGTTGGTTTCGCCAGGCACCTGGTAAAGAACGTGAATTTGTGGCAG
CCATTAGCCTCGTCGGTTTGTTTACCAACTATGTCGATTCTGTTCGTGGT
CGCTTCAGCATTTCAGCAGATTCTGCGAAGAATACCGTGTACTTACAGAT
GAACTCACTGAAACCTGAGGATACCGCCGTTTATTATTGTGCGGCAATGC
CTTTTTTTGACTATTGGGGTCAGGGCACACAAGTCACGGTCTCAAGCGGC
GGAAGCTCTGGTGAACAGAAACTGATTTCAGAAGCCAA
DCHVLW
R#LDGLF#HHFHPGGMD#evqlvesggglvqagdrlrlscaasgDCHVLW
RmgwfrqapgkerefvaaisLDGLFtnyadsvrgrfsisadsakntvylq
mnslkpedtavyycnaHHFHPGGMDdywgqgtqvtvss#GAAGGAGATAT
ACCATGGAAGTTCAACTGGTTGAATCTGGTGGCGGTTTAGTTCAAGCCGG
TGATCGCCTTCGTCTGAGCTGCGCCGCAAGCGGAGATTGTCACGTTCTCT
GGCGTATGGGTTGGTTTCGCCAGGCACCTGGTAAAGAACGTGAATTTGTG
GCAGCCATTAGCCTCGACGGTTTGTTTACCAACTATGCCGATTCTGTTCG
TGGTCGCTTCAGCATTTCAGCAGATTCTGCGAAGAATACCGTGTACTTAC
AGATGAACTCACTGAAACCTAGCTCTGGTGAACAGAAACTGATTTCAGAA
GCCAA
DCHVLWR#LDGLF#LPATSG#evqlvesggglvqagdsl
rlscaasgDCHVLWRmgwfrqapgkerefvaaisLDGLFtnyadsvrgrf
sisadsakntvylqmnslkpedtavyycaaLPATSGdywgqgtqvtfss#
AGGAGATATACCATGGAAGTTCAACTGGTTGAATCTGGTGGCGGTTTAGT
TCAAGCCGGTGATAGCCTTCGTCTGAGCTGCGCCGCAAGCGGAGATTGTC
ACGTTCTCTGGCGTATGGGTTGGTTTCGCCAGGCACCTGGTAAAGAACGT
GAATTTGTGGCAGCCATTAGCCTCGACGGTTTGTTTACCAACTATGCCGA
TTCTGTTCGTGGTCGCTTCAGCATTTCAGCAGATTCTGCGAAGAATACCG
TGTACTTACAGATGAACTCACTGAAACCTGAGGATACCGCCGTTTATTAT
TGTGCGGCATTGCCGGCGACTTCTGGCGACTATTGGGGTCAGGGCACACA
AGTCACGTTCTCAAGCGGCGGAAGCTCTGGTGAACAGAAACTGATTTCAG
AAGCCAA
DCHVLWR#ASYRY#WPILSA#evqlvesggglvqagd
slrlscaasgDCHVLWRmgwfrqapgkerefvaaitASYRYtdyadsvrg
rfsisadsakntvylqmnslkpedtavyycaaWPILSAdywgqgtqvtvs
s#GGAGATATACCATGGAAGTTCAACTGGTTGAATCTGGTGGCGGTTTAG
TTCAAGCCGGTGATAGCCTTCGTCTGAGCTGCGCCGCAAGCGGAGATTGT
CACGTTCTCTGGCGTATGGGTTGGTTTCGCCAGGCACCTGGTAAAGAACG
TGAATTTGTGGCAGCCATTACCGCGTCTTACCGTTACACCGACTATGCCG
ATTCTGTTCGTGGTCGCTTCAGCATTTCAGCAGATTCTGCGAAGAATACC
GTGTACTTACAGATGAACTCACTGAAACCTGAGGATACCGCCGTTTATTA
TTGTGCGGCATGGCCCATTCTGTCCGCTGACTATTGGGGTCAGGGCACAC
AAGTCACGGTCTCAAGCGGCGGAAGCTCTGGTGAACAGAAACTGATTTCA
GAAGCCAA
DCHVLWR#LDGLF#LLATSG#evqlvesggglvqag
dslrlscaasgDCHVLWRmgwfrqapgkerefvaaisLDGLFtnyadsvr
grfsisadsakntvylqmnslkpedtavyycaaLLATSGdywgqgtqvtv
ss#ATATACCATGGAAGTTCAACTGGTTGAATCTGGTGGCGGTTTAGTTC
AAGCCGGTGATAGCCTTCGTCTGAGCTGCGCCGCAAGCGGAGATTGTCAC
GTTCTCTGGCGTATGGGTTGGTTTCGCCAGGCACCTGGTAAAGAACGTGA
ATTTGTGGCAGCCATTAGCCTCGACGGTTTGTTTACCAACTATGCCGATT
CTGTTCGTGGTCGCTTCAGCATTTCAGCAGATTCTGCGAAGAATACCGTG
TACTTACAGATGAACTCACTGAAACCTGAGGATACCGCCGTTTATTATTG
TGCGGCATTGCTGGCGACTTCTGGCGACTATTGGGGTCAGGGCACACAAG
TCACGGTCTCAAGCGGCGGAAGCTCTGGTGAACAGAAACTGATTTCAGAA
GCCAA
DCHVLWR#LDGLF#MPFF#evqlvesggglvhagdslrl
scaasgDCHVLWRmgwfrqapgkerefvaaisLDGLFtnyadsvrgrfsi
sadsakntvylqmnslkpedtavyycaaMPFFdywgqgtqvtvss#GAAG
GAGATATACCATGGAAGTTCAACTGGTTGAATCTGGTGGCGGTTTAGTTC
ACGCCGGTGATAGCCTTCGTCTGAGCTGCGCCGCAAGCGGAGATTGTCAC
GTTCTCTGGCGTATGGGTTGGTTTCGCCAGGCACCTGGTAAAGAACGTGA
ATTTGTGGCAGCCATTAGCCTCGACGGTTTGTTTACCAACTATGCCGATT
CTGTTCGTGGTCGCTTCAGCATTTCAGCAGATTCTGCGAAGAATACCGTG
TACTTACAGATGAACTCACTGAAACCTGAGGATACCGCCGTTTATTATTG
TGCGGCAATGCCTTTTTTTGACTATTGGGGTCAGGGCACACAAGTCACGG
TCTCAAGCGGCGGAAGCTCTGGTGAACAGAAACTGATTTCAGAAGCCAA
DCHVLWR#LDGLF#MPFF#evqlvesggglvqagdslrlrcaasg
DCHVLWRmgwfrqapgkerefvaaisLDGLFtnyadsvrgrfsisadsak
ntvylqmnslkpedtavyycaaMPFFdywgqgtqvtvss#AGGAGATATA
CCATGGAAGTTCAACTGGTTGAATCTGGTGGCGGTTTAGTTCAAGCCGGT
GATAGCCTTCGTCTGCGCTGCGCCGCAAGCGGAGATTGTCACGTTCTCTG
GCGTATGGGTTGGTTTCGCCAGGCACCTGGTAAAGAACGTGAATTTGTGG
CAGCCATTAGCCTCGACGGTTTGTTTACCAACTATGCCGATTCTGTTCGT
GGTCGCTTCAGCATTTCAGCAGATTCTGCGAAGAATACCGTGTACTTACA
GATGAACTCACTGAAACCTGAGGATACCGCCGTTTATTATTGTGCGGCAA
TGCCTTTTTTTGACTATTGGGGTCAGGGCACACAAGTCACGGTCTCAAGC
GGCGGAAGCTCTGGTGAACAGAAACTGATTTCAGAAGCCAA
DCH
VLWR#LDGLF#VQFNGTAVA#evqlvesggglvqagdslrlscaasgDCH
VLWRmgwfrqapgkerefvaaisLDGLFtnyadsvrcrfsisadsakntv
ylqmnslkpedtavyycnaVQFNGTAVAdywgqgtqvtfss#ACCATGGA
AGTTCAACTGGTTGAATCTGGTGGCGGTTTAGTTCAAGCCGGTGATAGCC
TTCGTCTGAGCTGCGCCGCAAGCGGAGATTGTCACGTTCTCTGGCGTATG
GGTTGGTTTCGCCAGGCACCTGGTAAAGAACGTGAATTTGTGGCAGCCAT
TAGCCTCGACGGTTTGTTTACCAACTATGCCGATTCTGTTCGTTGTCGCT
TCAGCATTTCAGCAGATTCTGCGAAGAATACCGTGTACTTACAGATGAAC
TCACTGAAACCTGAGGATACCGCCGTTTATTATTGTAATGCAGTGCAGTT
TAACGGGACGGCGGTTGCGGACTATTGGGGTCAGGGCACACAAGTCACGT
TCTCAAGCGGCGGAAGCTCTGGTGAACAGAAACTGATTTCAGAAGCCAA
DCHVLWR#LDGLF#MPFF#evqlvesggglvqagdslrlscaasg
DCHVLWRmgwfrqapskerefvaaisLDGLFtnyadsvrgrfsisadsak
ntvylqmnslkpedtavyycaaMPFFdywgqgtqvtvss#ACCATGGAAG
TTCAACTGGTTGAATCTGGTGGCGGTTTAGTTCAAGCCGGTGATAGCCTT
CGTCTGAGCTGCGCCGCAAGCGGAGATTGTCACGTTCTCTGGCGTATGGG
TTGGTTTCGCCAGGCACCTAGTAAAGAACGTGAATTTGTGGCAGCCATTA
GCCTCGACGGTTTGTTTACCAACTATGCCGATTCTGTTCGTGGTCGCTTC
AGCATTTCAGCAGATTCTGCGAAGAATACCGTGTACTTACAGATGAACTC
ACTGAAACCTGAGGATACCGCCGTTTATTATTGTGCGGCAATGCCTTTTT
TTGACTATTGGGGTCAGGGCACACAAGTCACGGTCTCAAGCGGCGGAAGC
TCTGGTGAACAGAAACTGATTTCAGAAGCCAA
DCHVLWR#LDGL
F#MPFF#evrlvesggglvqagdslrlscaaggDCHVLWRmgwfrqapgk
erefvaaisLDGLFtnyadsvrgrfsisadsakntvylqmnslkpedtav
yycaaMPFFdywgqgtqvtvss#ATATACCATGGAAGTTCGACTGGTTGA
ATCTGGTGGCGGTTTAGTTCAAGCCGGTGATAGCCTTCGTCTGAGCTGCG
CCGCAGGCGGAGATTGTCACGTTCTCTGGCGTATGGGTTGGTTTCGCCAG
GCACCTGGTAAAGAACGTGAATTTGTGGCAGCCATTAGCCTCGACGGTTT
GTTTACCAACTATGCCGATTCTGTTCGTGGTCGCTTCAGCATTTCAGCAG
ATTCTGCGAAGAATACCGTGTACTTACAGATGAACTCACTGAAACCTGAG
GATACCGCCGTTTATTATTGTGCGGCAATGCCTTTTTTTGACTATTGGGG
TCAGGGCACACAAGTCACGGTCTCAAGCGGCGGAAGCTCTGGTGAACAGA
AACTGATTTCAGAAGCCAA
DCHVLWR#LDGLF#LPATSG#evql
vesggglvhagdrlrlscaasgDCHVLWRmgwfrqapgkerefvaaisLD
GLFtnyadsvrgrfsisadsakntvylqmnslkpedtavyycaaLPATSG
dywgqgtqvtvss#GAAGGAGATATACCATGGAAGTTCAACTGGTTGAAT
CTGGTGGCGGTTTAGTTCACGCCGGTGATCGCCTTCGTCTGAGCTGCGCC
GCAAGCGGAGATTGTCACGTTCTCTGGCGTATGGGTTGGTTTCGCCAGGC
ACCTGGTAAAGAACGTGAATTTGTGGCAGCCATTAGCCTCGACGGTTTGT
TTACCAACTATGCCGATTCTGTTCGTGGTCGCTTCAGCATTTCGGCAGAT
TCTGCGAAGAATACCGTGTACTTACAGATGAACTCACTGAAACCTGAGGA
TACCGCCGTTTATTATTGTGCGGCATTGCCGGCGACTTCTGGCGACTATT
GGGGTCAGGGCACACAAGTCACGGTCTCAAGCGGCGGAAGCTCTGGTGAA
CAGAAACTGATTTCAGAAGCCAA
DCHVLWR#LDGLF#MPFF#ev
qlvesggglvqagdslrlscaasgDCHVLWRmgwfrqapakerefvaais
LDGLFtnyadsvrgrfsisadsakntvylqmnslkpedtavyycaaMPFF
dywgqgtqvtvss#ATATACCATGGAAGTTCAACTGGTTGAATCTGGTGG
CGGTTTAGTTCAAGCCGGTGATAGCCTTCGTCTGAGCTGCGCCGCAAGCG
GAGATTGTCACGTTCTCTGGCGTATGGGTTGGTTTCGCCAGGCACCTGCT
AAAGAACGTGAATTTGTGGCAGCCATTAGCCTCGACGGTTTGTTTACCAA
CTATGCCGATTCTGTTCGTGGTCGCTTCAGCATTTCAGCAGATTCTGCGA
AGAATACCGTGTACTTACAGATGAACTCACTGAAACCTGAGGATACCGCC
GTTTATTATTGTGCGGCAATGCCTTTTTTTGACTATTGGGGTCAGGGCAC
ACAAGTCACGGTCTCAAGCGGCGGAAGCTCTGGTGAACAGAAACTGATTT
CAGAAGCCAA
DCHVLWR#LDGLF#HHFHPGGMD#evqlvesggg
lvqagdslrlscaasgDCHVLWRmgwfrqapgkerefvaaisLDGLFtny
adsvrgrfsisadsakntvylqmnslkpedtavyycnaHHFHPGGMDdyw
gqgtqvavss#ATACCATGGAAGTTCAACTGGTTGAATCTGGTGGCGGTT
TAGTTCAAGCCGGTGATAGCCTTCGTCTGAGCTGCGCCGCAAGCGGAGAT
TGTCACGTTCTCTGGCGTATGGGTTGGTTTCGCCAGGCACCTGGTAAAGA
ACGTGAATTTGTGGCAGCCATTAGCCTCGACGGTTTGTTTACCAACTATG
CCGATTCTGTTCGTGGTCGCTTCAGCATTTCAGCAGATTCTGCGAAGAAT
ACCGTGTACTTACAGATGAACTCACTGAAACCTGAGGATACCGAACAGAA
ACTGATTTCAGAAGCCAA
DCHVLWR#LDGLF#MPFF#evqlves
ggglvqagdslrlscaasgDCHVLWRmgwfrqapgkerefvaaisLDGLF
tnyvdsvrgrfsisadsakntvylqmnslkpedtavyycaaMPFFdywgl
gtqvtvss#GGAGATATACCATGGAAGTTCAACTGGTTGAATCTGGTGGC
GGTTTAGTTCAAGCCGGTGATAGCCTTCGTCTGAGCTGCGCCGCAAGCGG
AGATTGTCACGTTCTCTGGCGTATGGGTTGGTTTCGCCAGGCACCTGGTA
AAGAACGTGAATTTGTGGCAGCCATTAGCCTCGACGGTTTGTTTACCAAC
TATGTCGATTCTGTTCGTGGTCGCTTCAGCATTTCAGCAGATTCTGCGAA
GAATACCGTGTACTTACAGATGAACTCACTGAAACCTGAGGATACCGCCG
TTTATTATTGTGCGGCAATGCCTTTTTTTGACTATTGGGGTCTGGGCACA
CAAGTCACGGTCTCAAGCGGCGGAAGCTCTGGTGAACAGAAACTGATTTC
AGAAGCCAA
DCHVLWR#LDGLF#HHFHPGGMD#evqlvesgggl
vhagdslrlscaasgDCHVLWRmgwfrqapgkerefvaaisLDGLFtnya
dsvrgrfsisadsakntvylqmnslkpedtavyycnaHHFHPGGMDdywg
qgtqvtvss#GAAGGAGATATACCATGGAAGTTCAACTGGTTGAATCTGG
TGGCGGTTTAGTTCACGCCGGTGATAGCCTTCGTCTGAGCTGCGCCGCAA
GCGGAGATTGTCACGTTCTCTGGCGTATGGGTTGGTTTCGCCAGGCACCT
GGTAAAGAACGTGAATTTGTGGCAGCCATTAGCCTCGACGGTTTGTTTAC
CAACTATGCCGATTCTGTTCGTGGTCGCTTCAGCATTTCAGCAGATTCTG
CGAAGAATACCGTGTACTTACAGATGAACTCACTGAAACCTGAGGATACC
GCCGTTTATTATTGTAATGCACACCATTTTCATCCTGGTGGTATGGATGA
CTATTGGGGTCAGGGCACACAAGTCACGGTCTCAAGCGGCGGAAGCTCTG
GTGAACAGAAACTGATTTCAGAAGCCAA
DCHVLWR#LDGLF#IP
FF#evqlvesggglvqagdslrlscaasgDCHVLWRmgwfrqapgkeref
vaaisLDGLFtnyadsvrgrfsisadsakntvylqmnslkpedtavyyca
alPFFdywgqgtqvtvss#ATATACCATGGAAGTTCAACTGGTTGAATCT
GGTGGCGGTTTAGTTCAAGCCGGTGATAGCCTTCGTCTGAGCTGCGCCGC
AAGCGGAGATTGTCACGTTCTCTGGCGTATGGGTTGGTTTCGCCAGGCAC
CTGGTAAAGAACGTGAATTTGTGGCAGCCATTAGCCTCGACGGTTTGTTT
ACCAACTATGCCGATTCTGTTCGTGGTCGCTTCAGCATTTCAGCAGATTC
TGCGAAGAATACCGTGTACTTACAGATGAACTCACTGAAACCTGAGGATA
CCGCCGTTTATTATTGTGCGGCAATTCCTTTTTTTGACTATTGGGGTCAG
GGCACACAAGTCACGGTCTCAAGCGGCGGAAGCTCTGGTGAACAGAAACT
GATTTCAGAAGCCAA
DCHVLWR#LDGLF#MPFF#evqlvesggg
lvqagdslrlgcaasgDCHVLWRmgwfrqapgkerefvaaisLDGLFtny
adsvrgrfsisadsakntvylqmnslkpedtavyycaaMPFFdywgqgtq
vtvss#ATACCATGGAAGTTCAACTGGTTGAATCTGGTGGCGGTTTAGTT
CAAGCCGGTGATAGCCTTCGTTTGGGCTGCGCCGCAAGCGGAGATTGTCA
CGTTCTCTGGCGTATGGGTTGGTTTCGCCAGGCACCTGGTAAAGAACGTG
AATTTGTGGCAGCCATTAGCCTCGACGGTTTGTTTACCAACTATGCCGAT
TCTGTTCGTGGTCGCTTCAGCATTTCAGCAGATTCTGCGAAGAATACCGT
GTACTTACAGATGAACTCACTGAAACCTGAGGATACCGCCGTTTATTATT
GTGCGGCAATGCCTTTTTTTGACTATTGGGGTCAGGGCACACAAGTCACG
GTCTCAAGCGGCGGAAGCTCTGGTGAACAGAAACTGATTTCAGAAGCCAA
DCHVLWR#LDGLF#LPSVCT#evqlvesggglvqagdslrlsca
asgDCHVLWRmgwfrqapgkerefvaaisLDGLFtnyadsvrgrfsisad
sakntvylqinslkpedtavyycaaLPSVCTdywvhctqvtvss#GAAGG
AGATATACCATGGAAGTTCAACTGGTTGAATCTGGTGGCGGTTTAGTTCA
AGCCGGTGATAGCCTTCGTCTGAGCTGCGCCGCAAGCGGAGATTGTCACG
TTCTCTGGCGTATGGGTTGGTTTCGCCAGGCACCTGGTAAAGAACGTGAA
TTTGTGGCAGCCATTAGCCTCGACGGTTTGTTTACCAACTATGCCGATTC
TGTTCGTGGTCGCTTCAGCATTTCAGCAGATTCTGCGAAGAATACCGTGT
ACTTACAGATTAACTCACTGAAACCTGAGGATACCGCCGTTTATTATTGT
GCGGCACTGCCTAGTGTGTGTACCGACTATTGGGTTCATTGCACACAAGT
CACGGTCTCAAGCGGCGGAAGCTCTGGTGAACAGAAACTGATTTCAGAAG
CCAA
DCHVLWR#LDGLF#LPSVCT#evqlvesggglvqagdslr
lscaasgDCHVLWRmgwfrqapgkerefvaaisLDGLFtnyadsvrgrfs
isadsakntvylqmnslkpedtavyycaaLPSVCTdywgkgtqvtvss#A
CCATGGAAGTTCAACTGGTTGAATCTGGTGGCGGTTTAGTTCAAGCCGGT
GATAGCCTTCGTCTGAGCTGCGCCGCAAGCGGAGATTGTCACGTTCTCTG
GCGTATGGGCTGGTTTCGCCAGGCACCTGGTAAAGAACGTGAATTTGTGG
CAGCCATTAGCCTCGACGGTTTGTTTACCAACTATGCCGATTCTGTTCGT
GGTCGCTTCAGCATTTCAGCAGATTCTGCGAAGAATACCGTGTACTTACA
GATGAACTCACTGAAACCTGAGGATACCGCCGTTTATTATTGTGCGGCAC
TGCCTAGTGTGTGTACCGACTATTGGGGGAAGGGCACACAAGTCACGGTC
TCAAGCGGCGGAAGCTCTGGTGAACAGAAAATGATTTCAGAAGCCAA
0
DCHVLWR#LDGLF#MPFF#evqlvesggglvqagdslrlscaasgDC
HVLWRmgwfrqapgkerefvaaisLDGLFtnyadsvrgrfsisadsaknt
vyfqmnslkpedtavyycaaMPFFdywgqgtqvtvss#AAGGAGATATAC
CATGGAAGTTCAACTGGTTGAATCTGGTGGCGGTTTAGTTCAAGCCGGTG
ATAGCCTTCGTCTGAGCTGCGCCGCAAGCGGAGATTGTCACGTTCTCTGG
CGTATGGGTTGGTTTCGCCAGGCACCTGGTAAAGAACGTGAATTTGTGGC
AGCCATTAGCCTCGACGGTTTGTTTACCAACTATGCCGATTCTGTTCGTG
GTCGCTTCAGCATTTCAGCAGATTCTGCGAAGAATACCGTGTACTTTCAG
ATGAACTCACTGAAACCTGAGGATACCGCCGTTTATTATTGTGCGGCAAT
GCCTTTTTTTGACTATTGGGGTCAGGGCACACAAGTCACGGTCTCAAGCG
GCGGAAGCTCTGGTGAACAGAAACTGATTTCAGAAGCCAA
DCHV
LWR#LDGLF#LPATSG#evqlvesggglvqagdslrlscaasgDCHVLWR
mgwfrqapgkerefvaaisLDGLFtnyadsvrgrfsisadsakntvylqi
nslkpedtavyycaaLPATSGdywgqgtqvtvss#GGAGATATACCATGG
AAGTTCAACTGGTTGAATCTGGTGGCGGTTTAGTTCAAGCCGGTGATAGC
CTTCGTCTGAGCTGCGCCGCAAGCGGAGATTGTCACGTTCTCTGGCGTAT
GGGTTGGTTTCGCCAGGCACCCGGTAAAGAACGTGAATTTGTGGCAGCCA
TTAGCCTCGACGGTTTGTTTACCAACTATGCCGATTCTGTTCGTGGTCGC
TTCAGCATTTCAGCAGATTCTGCGAAGAATACCGTGTACTTACAGATTAA
CTCACTGAAACCTGAGGATACCGCCGTTTATTATTGTGCGGCATTGCCGG
CGACTTCTGGCGACTATTGGGGTCAGGGCACACAAGTCACGGTCTCAAGC
GGCGGAAGCTCTGGTGAACAGAAACTGATTTCAGAAGCCAA
DCH
VLWR#LDGLF#MSQPTL#qvklqesggglvqagdslrlscaasgDCHVLW
RmgwfrqapgkerefvaaisLDGLFtnyadsvrgrfsisadsakntvylq
mnslkpedtavyycaaMSQPTLdywgqgtqvtvss#AGGAGATATACCAT
GCAGGTTAAACTGCAAGAATCTGGTGGCGGTTTAGTTCAAGCCGGTGATA
GCCTTCGTCTGAGCTGCGCCGCAAGCGGAGATTGTCACGTTCTCTGGCGT
ATGGGTTGGTTTCGCCAGGCACCTGGTAAAGAACGTGAATTTGTGGCAGC
CATTAGCCTCGACGGTTTGTTTACCAACTATGCCGATTCTGTTCGTGGTC
GCTTCAGCATTTCAGCAGATTCTGCGAAGAATACCGTGTACTTACAGATG
AACTCACTGAAACCTGAGGATACCGCCGTTTATTATTGTGCGGCAATGAG
TCAGCCTACCTTGGACTATTGGGGTCAGGGCACACAAGTCACGGTCTCAA
GCGGCGGAAGCTCTGGTGAACAGAAACTGATTTCAGAAGCCAA
D
CHVLWR#LDGLF#MPFF#evqlvesggglvqagdslrlscaasgDCHVLW
RmgwfrrapgkerefvaaisLDGLFtnyadsvrgrfsisadsakntvylq
mnslkpedtavyycaaMPFFdywgqgtqvtvss#GAAGGAGATATACCAT
GGAAGTTCAACTGGTTGAATCTGGTGGCGGTTTAGTTCAAGCCGGTGATA
GCCTTCGTCTGAGCTGCGCCGCAAGCGGAGATTGTCACGTTCTCTGGCGT
ATGGGTTGGTTTCGCCGGGCACCTGGTAAAGAACGTGAATTTGTGGCAGC
CATTAGCCTCGACGGTTTGTTTACCAACTATGCCGATTCTGTTCGTGGTC
GCTTCAGCATTTCAGCAGATTCTGCGAAGAATACCGTGTACTTACAGATG
AACTCACTGAAACCTGAGGATACCGCCGTTTATTATTGTGCGGCAATGCC
TTTTTTTGACTATTGGGGTCAGGGCACACAAGTCACGGTCTCAAGCGGCG
GAAGCTCTGGTGAACAGAAACTGATTTCAGAAGCCAA
DCHVLWRLDGLF#MPFF#evqrvesggglvkagdslslscaasgDCHVLW
Rmgwfr
qapgkerefvaaisLDGLFtnyadsvrgrfsisadsakntvylqmnslkp
edtavyycaaMPFFdywgqgtqvtvss#GGAGATATACCATGGAAGTTCA
ACGGGTTGAATCTGGTGGCGGTTTAGTTAAAGCCGGTGATAGCCTTAGTC
TGAGCTGCGCCGCAAGCGGAGATTGTCACGTTCTCTGGCGTATGGGTTGG
TTTCGCCAGGCACCTGGTAAAGAACGTGAATTTGTGGCAGCCATTAGCCT
CGACGGTTTGTTTACCAACTATGCCGATTCTGTTCGTGGTCGCTTCAGCA
TTTCAGCAGATTCTGCGAAGAATACCGTGTACTTACAGATGAACTCACTG
AAACCTGAGGATACCGCCGTTTATTATTGTGCGGCAATGCCTTTTTTTGA
CTATTGGGGTCAGGGCACACAAGTCACGGTCTCAAGCGGCGGAAGCTCTG
GTGAACAGAAACTGATTTCAGAAGCCAA
DCHVLWR#LDGLF#LP
ATSG#evqlvesggglvqdgdslrlscaasgDCHVLWRmgwfrqapgker
efvaaisLDGLFtnyadsvrgrfsisadsakntvylqmnslkpedtavyy
caaLPATSGdywgqgtqvtvss#ATATACCATGGAAGTTCAACTGGTTGA
ATCTGGTGGCGGTTTAGTTCAAGACGGTGATAGCCTTCGTCTGAGCTGCG
CCGCAAGCGGAGATTGTCACGTTCTCTGGCGTATGGGTTGGTTTCGCCAG
GCACCTGGTAAAGAACGTGAATTTGTGGCAGCCATTAGCCTCGACGGTTT
GTTTACCAACTATGCCGATTCTGTTCGTGGTCGCTTCAGCATTTCAGCAG
ATTCTGCGAAGAATACCGTGTACTTACAGATGAACTCACTGAAACCTGAG
GATACCGCCGTTTATTATTGTGCGGCATTGCCGGCGACTTCTGGCGACTA
TTGGGGTCAGGGCACACAAGTCACGGTCTCAAGCGGCGGAAGCTCTGGTG
AACAGAAACTGATTTCAGAAGCCAA
DCHVLWR#LDGLF#LPATS
G#evqlvesggglvqagdslrlscaasgDCHVLWRmgwfrqapgkerefv
aaisLDGLFtnyvdsvrgrfsisadsakntvylqmnslkpedtavyycaa
LPATSGdywgqgtqgtvss#ATACCATGGAAGTTCAACTGGTTGAATCTG
GTGGCGGTTTAGTTCAAGCCGGTGATAGCCTTCGTCTGAGCTGCGCCGCA
AGCGGAGATTGTCACGTTCTCTGGCGTATGGGTTGGTTTCGCCAGGCACC
TGGTAAAGAACGTGAATTTGTGGCAGCCATTAGCCTCGACGGTTTGTTTA
CCAACTATGTCGATTCTGTTCGTGGTCGCTTCAGCATTTCAGCAGATTCT
GCGAAGAATACCGTGTACTTACAGATGAACTCACTGAAACCTGAGGATAC
CGCCGTTTATTATTGTGCGGCATTGCCGGCGACTTCTGGCGACTATTGGG
GTCAGGGCACACAAGGCACGGTCTCAAGCGGCGGAAGCTCTGGTGAACAG
AAACTGATTTCAGAAGCCAA
DCHVLWR#LDGLF#MPFF#evqlv
esggglvqagdslrlscaasgDCHVLWRmgwfrqapgkerefvaaisLDG
LFtnyadsvrgrfsisadstkntvylqmnslkpedtavyycaaMPFFdyw
gqgtqgtvss#ATATACCATGGAAGTTCAACTGGTTGAATCTGGTGGCGG
TTTAGTTCAAGCCGGTGATAGCCTTCGTCTGAGCTGCGCCGCAAGCGGAG
ATTGTCACGTTCTCTGGCGTATGGGTTGGTTTCGCCAGGCACCTGGTAAA
GAACGTGAATTTGTGGCAGCCATTAGCCTCGACGGTTTGTTTACCAACTA
TGCCGATTCTGTTCGTGGTCGCTTCAGCATTTCAGCAGATTCTACGAAGA
ATACCGTGTACTTACAGATGAACTCACTGAAACCTGAGGATACCGCCGTT
TATTATTGTGCGGCAATGCCTTTTTTTGACTATTGGGGTCAGGGCACACA
AGGCACGGTCTCAAGCGGCGGAAGCTCTGGTGAACAGAAACTGATTTCAG
AAGCCAA
DCHVLWR#LDGLF#MPFF#qvqlvesggglvqagdsl
rlscaasgDCHVLWRmgwfrqapgkerefvaaisLDGLFtnyadsvrgrf
sisadsakntvylqmnslkpedtavyycaaMPFFdywgqgtqvtvss#AG
ATATACCATGCAGGTTCAACTGGTTGAATCTGGTGGCGGTTTAGTTCAAG
CCGGTGATAGCCTTCGTCTGAGCTGCGCCGCAAGCGGAGATTGTCACGTT
CTCTGGCGTATGGGTTGGTTTCGCCAGGCACCTGGTAAAGAACGTGAATT
TGTGGCAGCCATTAGCCTCGACGGTTTGTTTACCAACTATGCCGATTCTG
TTCGTGGTCGCTTCAGCATTTCAGCAGATTCTGCGAAGAATACCGTGTAC
TTACAGATGAACTCACTGAAACCTGAGGATACCGCCGTTTATTATTGTGC
GGCAATGCCTTTTTTTGACTATTGGGGTCAGGGCACACAAGTCACGGTCT
CAAGCGGCGGAAGCTCTGGTGAACAGAAACTGATTTCAGAAGCCAA
DCHVLWR#LDGLF#LPATSG#evqlvesggglvqagdslrlscaasgD
CHVLWRmgwfrqapgkehefvaaisLDGLFtnyadsvrgrfsisadsakn
tvylqmnslkpedtavyycaaLPATSGdywgqgtqgtvss#ATATACCAT
GGAAGTTCAACTGGTTGAATCTGGTGGCGGTTTAGTTCAAGCCGGTGATA
GCCTTCGTCTGAGCTGCGCCGCAAGCGGAGATTGTCACGTTCTCTGGCGT
ATGGGTTGGTTTCGCCAGGCACCTGGTAAAGAACATGAATTTGTGGCAGC
CATTAGCCTCGACGGTTTGTTTACCAACTATGCCGATTCTGTTCGTGGTC
GCTTCAGCATTTCAGCAGATTCTGCGAAGAATACCGTGTACTTACAGATG
AACTCACTGAAACCTGAGGATACCGCCGTTTATTATTGTGCGGCATTGCC
GGCGACTTCTGGCGACTATTGGGGTCAGGGCACACAAGGCACGGTCTCAA
GCGGCGGAAGCTCTGGTGAACAGAAACTGATTTCAGAAGCCAA
D
CHVLWR#LDGLF#LPSVCS#evqlvesggglvqagdslrlscdasgDCHV
LWRmgwfrqapgkerefvaaisLDGLFtnyadsvrgrfsisadsakntvy
lqmnslkpedtavyycaaLPSVCSdywgqgtqdtvss#ATACCATGGAAG
TTCAACTGGTTGAATCTGGTGGCGGTTTAGTTCAAGCCGGTGATAGCCTT
CGTCTGAGCTGCGACGCAAGCGGAGATTGTCACGTTCTCTGGCGTATGGG
TTGGTTTCGCCAGGCACCTGGTAAAGAACGTGAATTTGTGGCAGCCATTA
GCCTCGACGGTTTGTTTACCAACTATGCCGATTCTGTTCGTGGTCGCTTC
AGCATTTCAGCAGATTCTGCGAAGAATACCGTGTACTTACAGATGAACTC
ACTGAAACCTGAGGATACCGCCGTTTATTATTGTGCGGCACTGCCTAGTG
TGTGTTCCGACTATTGGGGGCAGGGCACACAAGACACGGTCTCAAGCGGC
GGAAGCTCTGGTGAACACAAACTGATTTCAGAAGCCAA
DCHVLW
R#LDGLF#MPFF#evqlvesggglvkagdslrlscaasgDCHVLWRmgwf
rqapgkerefvaaisLDGLFtnyadsvrgrfsisadsakntvylqmnslk
pedtavyycaaMPFFdywgqgtqgtvss#AGGAGATATACCATGGAAGTT
CAACTGGTTGAATCTGGTGGCGGTTTAGTTAAAGCCGGTGATAGCCTTCG
TCTGAGCTGCGCCGCAAGCGGAGATTGTCACGTTCTCTGGCGTATGGGTT
GGTTTCGCCAGGCACCTGGTAAAGAACGTGAATTTGTGGCAGCCATTAGC
CTCGACGGTTTGTTTACCAACTATGCCGATTCTGTTCGTGGTCGCTTCAG
CATTTCAGCAGATTCTGCGAAGAATACCGTGTACTTACAGATGAACTCAC
TGAAACCTGAGGATACCGCCGTTTATTATTGTGCGGCAATGCCTTTTTTT
GACTATTGGGGTCAGGGCACACAAGGCACGGTCTCAAGCGGCGGAAGCTC
TGGTGAACAGAAACTGATTTCAGAAGCCAA
DCHVLWR#LDGLF#
LPATSG#evqlvesggglvqagdslrlscaasgDCHVLWRmgwfrqapgk
erefvaaisLDGLFtnyadtvrgrfsisadsakntvylqmnslkpedtav
yycaaLPATSGdywgqgtqgpvss#ATACCATGGAAGTTCAACTGGTTGA
ATCTGGTGGCGGTTTAGTTCAAGCCGGTGATAGCCTTCGTCTGAGCTGCG
CCGCAAGCGGAGATTGTCACGTTCTCTGGCGTATGGGTTGGTTTCGCCAG
GCACCTGGTAAAGAACGTGAATTTGTGGCAGCCATTAGCCTCGACGGTTT
GTTTACCAACTATGCCGATACTGTTCGTGGTCGCTTCAGCATTTCAGCAG
ATTCTGCGAAGAATACCGTGTACTTACAGATGAACTCACTGAAACCTGAG
GATACCGCCGTTTATTATTGTGCGGCATTGCCGGCGACTTCTGGCGACTA
TTGGGGTCAGGGCACACAAGGCCCGGTCTCAAGCGGCGGAAGCCCTGGTG
AACAGAAACTGATTTCAGAAGCCAA
DCHVLWR#LDGLF#MPFF#
evqlvesggglvqagdslrlscaasgDCHVLWRmgwfrqapgkerefvaa
isLDGLFtnyadsvrgrfsisadsakntvylqmnslkpkdtavyycaaMP
FFdywgqgtqvtvss#GAAGGAGATATACCATGGAAGTTCAACTGGTTGA
ATCTGGTGGCGGTTTAGTTCAAGCCGGTGATAGCCTTCGTCTGAGTTGCG
CCGCAAGCGGAGATTGTCACGTTCTCTGGCGTATGGGTTGGTTTCGCCAG
GCACCTGGTAAAGAACGTGAATTTGTGGCAGCCATTAGCCTCGACGGTTT
GTTTACCAACTATGCCGATTCTGTTCGTGGTCGCTTCAGCATTTCAGCAG
ATTCTGCGAAGAATACCGTGTACTTACAGATGAACTCACTGAAACCTAAG
GATACCGCCGTTTATTATTGTGCGGCAATGCCTTTTTTTGACTATTGGGG
TCAGGGCACACAAGTCACGGTCTCAAGCGGCGGAAGCTCTGGTGAACAGA
AACTGATTTCAGAAGCCAA
DCHVLWR#LDGLF#LPKRTV#qvql
vesggalvqagdslrlscaasgDCHVLWRmgwfrqapgkerefvaaisLD
GLFtnyadsvrgrfsisadsakntvylqmnslkpedtavyycaaLPKRTV
dywgqgtqgtvss#ATATACCATGCAGGTTCAACTGGTTGAATCTGGTGG
CGCATTAGTTCAAGCCGGTGATAGCCTTCGTCTGAGCTGCGCCGCAAGCG
GAGATTGTCACGTTCTCTGGCGTATGGGTTGGTTTCGCCAGGCACCTGGT
AAAGAACGTGAATTTGTGGCAGCCATTAGCCTCGACGGTTTGTTTACCAA
CTATGCCGATTCTGTTCGTGGTCGCTTCAGCATTTCAGCAGATTCTGCGA
AGAATACCGTGTACTTACAGATGAACTCACTGAAACCTGAGGATACCGCC
GTTTATTATTGTGCGGCACTGCCTAAGCGGACTGTGGACTATTGGGGTCA
GGGCACACAAGGCACGGTCTCAAGCGGCGGAAGCTCTGGTGAACAGAAAC
TGATTTCAGAAGCCAA
DCHVLWR#LDGLF#LPKRTV#qvqlves
ggalvqagdslrlscaasgDCHVLWRmgwfrqapgkerefvaaisLDGLF
inyadsvrgrfsisadsakntvylqmnslkpedtavyycaaLPKRTVdyw
gqgtqvtvss#ACCATGCAGGTTCAACTGGTTGAATCTGGTGGCGCATTA
GTTCAAGCCGGTGATAGCCTTCGTCTGAGCTGCGCCGCAAGCGGAGATTG
TCACGTTCTCTGGCGTATGGGTTGGTTTCGCCAGGCACCTGGTAAAGAAC
GTGAATTTGTGGCAGCCATTAGCCTCGACGGTTTGTTTATCAACTATGCC
GATTCTGTTCGTGGTCGCTTCAGCATTTCAGCAGATTCTGCGAAGAATAC
CGTGTACTTACAGATGAACTCACTGAAACCTGAGGATACCGCCGTTTATT
ATTGTGCGGCACTGCCTAAGCGGACTGTGGACTATTGGGGTCAGGGCACA
CAAGTCACGGTCTCAAGCGGCGGAAGCTCTGGTGAACAGAAACTGATTTC
AGAAGCCAA
DCHVLWR#LDGLF#MPFF#evqlvesggglvqagd
glrlscaasgDCHVLWRmgwfrqapgkerefvaaisLDGLFtnyadsvrg
rfsisadsakntvylqmnslkpedtavyycaaMPFFdywgqgtqvtvss#
ATACCATGGAAGTTCAACTGGTTGAATCTGGTGGCGGTTTAGTTCAAGCC
GGTGATGGCCTTCGTCTGAGCTGCGCCGCAAGCGGAGATTGTCACGTTCT
CTGGCGTATGGGTTGGTTTCGCCAGGCACCTGGTAAAGAACGTGAATTTG
TGGCAGCCATTAGCCTCGACGGTTTGTTTACCAACTATGCCGATTCTGTT
CGTGGTCGCTTCAGCATTTCAGCAGATTCTGCGAAGAATACCGTGTACTT
ACAGATGAACTCACTGAAACCTGAGGATACCGCCGTTTATTATTGTGCGG
CAATGCCTTTTTTTGACTATTGGGGTCAGGGCACACAAGTCACGGTCTCA
AGCGGCGGAAGCTCTGGTGAACAGAAACTGATTTCAGAAGCCAA
DCHVLWR#LDGLF#HHFHPGGMD#evllvesggglvqagdslrlscaasg
DCHVLWRmgwfrqapgkerefvaaisLDGLFtnyadsvrgrfsisadsak
ntvylqmnslkpedtavyycnaHHFHPGGMDdywgqgtqvtvss#GAAGG
AGATATACCATGGAAGTTCTACTGGTTGAATCTGGTGGCGGTTTAGTTCA
AGCCGGTGATAGCCTTCGTCTGAGCTGCGCCGCAAGCGGAGATTGTCACG
TTCTCTGGCGTATGGGTTGGTTTCGCCAGGCACCTGGTAAAGAACGTGAA
TTTGTGGCAGCCATTAGCCTCGACGGTTTGTTTACCAACTATGCCGATTC
TGTTCGTGGTCGCTTCAGCATTTCAGCAGATTCTGCGAAGAATACCGTGT
ACTTACAGATGAACTCACTGAAACCTGAGGATACCGCCGTTTATTATTGT
AATGCACACCATTTTCATCCTGGTGGTATGGATGACTATTGGGGTCAGGG
CACACAAGTCACGGTCTCAAGCGGCGGAAGCTCTGGTGAACAGAAACTGA
TTTCAGAAGCCAA
DCHVLWR#LDGLF#MPFF#evqlvesggglv
qagdslrlscaasgDCHVLWRmgwfrqapgkerefvaaisLDGLFtnyad
svrgrfsisadsakntvylqmnslkpentavyycaaMPFFdywgqgtqvt
vss#GGAGATATACCATGGAAGTTCAACTGGTTGAATCTGGTGGCGGTTT
AGTTCAAGCCGGTGATAGCCTTCGTCTGAGCTGCGCCGCAAGCGGAGATT
GTCACGTTCTCTGGCGTATGGGTTGGTTTCGCCAGGCACCTGGTAAAGAA
CGTGAATTTGTGGCAGCCATTAGCCTCGACGGTTTGTTTACCAACTATGC
CGATTCTGTTCGTGGTCGCTTCAGCATTTCAGCAGATTCTGCGAAGAATA
CCGTGTACTTACAGATGAACTCACTGAAACCTGAGAATACCGCCGTTTAT
TATTGTGCGGCAATGCCTTTTTTTGACTATTGGGGTCAGGGCACACAAGT
CACGGTCTCAAGCGGCGGAAGCTCTGGTGAACAGAAACTGATTTCAGAAG
CCAA
DCHVLWR#LDGLF#LPSVCl#evqlvesggglvqagdslr
lscaasgDCHVLWRmgwfrqapgkerefvaaisLDGLFtnyadsvrgrfs
isadsakntvylqmnslkpedtavyycaaLPSVCldywgqgtqvtvss#A
TACCATGGAAGTTCAACTGGTTGAATCTGGTGGCGGTTTAGTTCAAGCCG
GTGATAGCCTTCGTCTGAGCTGCGCCGCAAGCGGAGATTGTCACGTTCTC
TGGCGTATGGGTTGGTTTCGCCAGGCACCTGGTAAAGAACGTGAATTTGT
GGCAGCCATTAGCCTCGACGGTTTGTTTACCAACTATGCCGATTCTGTTC
GTGGTCGCTTCAGCATTTCAGCAGATTCTGCGAAGAATACCGTGTACTTA
CAGATGAACTCACTGAAACCTGAGGATACCGCCGTTTATTATTGTGCGGC
ACTGCCTAGTGTGTGTATCGACTATTGGGGTCAGGGCACACAAGTCACGG
TCTCAAGCGGCGGAAGCTCTGGTGAACAGAAACTGATTTCAGAAGCCAA
DCHVLWR#LDGLF#MPFF#evqlvesggglvqagdslrlscaasg
DCHVLWRmgwfrqapgkerefvaaisLDGLFtnyadsvrgrfsisadsak
ntvylqmnslkpedtavyycaaMPFFyywgqgtqvtvss#GAAGGAGATA
TACCATGGAAGTTCAACTGGTTGAATCTGGTGGCGGTTTAGTTCAAGCCG
GTGATAGCCTTCGTCTGAGCTGCGCCGCAAGCGGAGATTGTCACGTTCTC
TGGCGTATGGGTTGGTTTCGCCAGGCACCTGGTAAAGAACGTGAATTTGT
GGCAGCCATTAGCCTCGACGGTTTGTTTACCAACTATGCCGATTCTGTTC
GTGGTCGCTTCAGCATTTCAGCAGATTCTGCGAAGAATACCGTGTACTTA
CAGATGAACTCACTGAAACCTGAGGATACCGCCGTTTATTATTGTGCGGC
AATGCCTTTTTTTTACTATTGGGGTCAGGGCACACAAGTCACGGTCTCAA
GCGGCGGAAGCTCTGGTGAACAGAAACTGATTTCAGAAGCCAA
D
CHVLWR#LDGLF#HHFHPGGMD#evqlvesggglvqagdslrlscaasgD
CHVLWRmgwfrqapgkerefvaaisLDGLFtnyadsvrgrfsfsadsakn
tvylqmnslkpedtavyycnaHHFHPGGMDdywgqgtqvtvss#ACCATG
GAAGTTCAACTGGTTGAATCTGGTGGCGGTTTAGTTCAAGCCGGTGATAG
CCTTCGTCTGAGCTGCGCCGCAAGCGGAGATTGTCACGTTCTCTGGCGTA
TGGGTTGGTTTCGCCAGGCACCTGGTAAAGAACGTGAATTTGTGGCAGCC
ATTAGCCTCGACGGTTTGTTTACCAACTATGCCGATTCTGTTCGTGGTCG
CTTCAGCTTTTCAGCAGATTCTGCGAAGAATACCGTGTACTTACAGATGA
ACTCACTGAAACCTGAGGATACCGCCGTTTATTATTGTAATGCACACCAT
TTTCATCCTGGTGGTATGGATGACTATTGGGGTCAGGGCACACAAGTCAC
GGTCTCAAGCGGCGGAAGCTCTGGTGAACAGAAACTGATTTCAGAAGCCA
A
DCHVLWR#LDGLF#HHFHPGGMD#evqlvesggglvhagdrlr
lscaasgDCHVLWRmgwfrqapgkerefvaaisLDGLFtnyadsvrgrfs
isadsakntvylqmnslkpedtavyycnaHHFHPGGMDdywgqgtqvtvs
s#GAAGGAGATATACCATGGAAGTTCAACTGGTTGAATCTGGTGGCGGTT
TAGTTCACGCCGGTGATCGCCTTCGTCTGAGCTGCGCCGCAAGCGGAGAT
TGTCACGTTCTCTGGCGTATGGGTTGGTTTCGCCAGGCACCTGGTAAAGA
ACGTGAATTTGTGGCAGCCATTAGCCTCGACGGTTTGTTTACCAACTATG
CCGATTCTGTTCGTGGTCGCTTCAGCATTTCAGCAGATTCTGCGAAGAAT
ACCGTGTACTTACAGATGAACTCACTGAAACCTAGCTCTGGTGAACAGAA
ACTGATTTCAGAAGCCAA
DCHVLWR#LDGLF#MPFF#evqlves
ggglvqagdslslscaasgDCHVLWRmgwfrqapgkerefvaaisLDGLF
tnyadsvrgrfsisadsakntvylqmnslkpedtavyycaaMPFFdywgq
gtqvtvss#GGAGATATACCATGGAAGTTCAACTGGTTGAATCTGGTGGC
GGTTTAGTTCAAGCCGGTGATAGCCTTAGTCTGAGCTGCGCCGCAAGCGG
AGATTGTCACGTTCTCTGGCGTATGGGTTGGTTTCGCCAGGCACCTGGTA
AAGAACGTGAATTTGTGGCAGCCATTAGCCTCGACGGTTTGTTTACCAAC
TATGCCGATTCTGTTCGTGGTCGCTTCAGCATTTCAGCAGATTCTGCGAA
GAATACCGTGTACTTACAGATGAACTCACTGAAACCTGAGGATACCGCCG
TTTATTATTGTGCGGCAATGCCTTTTTTTGACTATTGGGGTCAGGGCACA
CAAGTCACGGTCTCAAGCGGCGGAAGCTCTGGTGAACAGAAACTGATTTC
AGAAGCCAA
DCHVLWR#LDGLF#MPFF#evqlvesggglvqagd
slrlscaasgDCHVLWRmgwfrqapgkerefvaaisLDGLFtnyadsvrg
rfsisadsakntvylqmnslkpedtavyycaaMPFFdywghgtqvtvss#
ATACCATGGAAGTTCAACTGGTTGAATCTGGTGGCGGTTTAGTTCAAGCC
GGTGATAGCCTTCGTCTGAGCTGCGCCGCAAGCGGAGATTGTCACGTTCT
CTGGCGTATGGGTTGGTTTCGCCAGGCACCTGGTAAAGAACGTGAATTTG
TGGCAGCCATTAGCCTCGACGGTTTGTTTACCAACTATGCCGATTCTGTT
CGTGGTCGCTTCAGCATTTCAGCAGATTCTGCGAAGAATACCGTGTACTT
ACAGATGAACTCACTGAAACCTGAGGATACCGCCGTTTATTATTGTGCGG
CAATGCCTTTTTTTGACTATTGGGGGCATGGCACACAAGTCACGGTCTCA
AGCGGCGGAAGCTCTGGTGAACAGAAACTGATTTCAGAAGCCAA
DCHVLWR#LDGLF#HHFHPGGMD#evqlvqsggglvqagdslrlscaasg
DCHVLWRmgwfrqapgkerefvaaisLDGLFtnyadsvrgrfsisadsak
ntvylqmnslkpedtavyycnaHHFHPGGMDdywgqgtqvtvss#GAAGG
AGATATACCATGGAAGTTCAACTGGTTCAATCTGGTGGCGGTTTAGTTCA
AGCCGGTGATAGCCTTCGTCTGAGCTGCGCCGCAAGCGGAGATTGTCACG
TTCTCTGGCGTATGGGTTGGTTTCGCCAGGCACCTGGTAAAGAACGTGAA
TTTGTGGCAGCCATTAGCCTCGACGGTTTGTTTACCAACTATGCCGATTC
TGTTCGTGGTCGCTTCAGCATTTCAGCAGATTCTGCGAAGAATACCGTGT
ACTTACAGATGAACTCACTGAAACCTAGCTCTGGTGAACAGAAACTGATT
TCAGAAGCCAA
DCHVLWR#LDGLF#MPFF#evqlvesggglvqa
gdslrlscaasgDCHVLWRmgwfrqapgkerefvaaisLDGLFtnyadsv
rgrfsistdsakntvylqmnslkpedtavyycaaMPFFdywgqgtqvtvs
s#GGAGATATACCATGGAAGTTCAACTGGTTGAATCTGGTGGCGGTTTAG
TTCAAGCCGGTGATAGCCTTCGTCTGAGCTGCGCCGCAAGCGGAGATTGT
CACGTTCTCTGGCGTATGGGTTGGTTTCGCCAGGCACCTGGTAAAGAACG
TGAATTTGTGGCAGCCATTAGCCTCGACGGTTTGTTTACCAACTATGCCG
ATTCTGTTCGTGGTCGCTTCAGCATTTCAACAGATTCTGCGAAGAATACC
GTGTACTTACAGATGAACTCACTGAAACCTGAGGATACCGCCGTTTATTA
TTGTGCGGCAATGCCTTTTTTTGACTATTGGGGTCAGGGCACACAAGTCA
CGGTCTCAAGCGGCGGAAGCTCTGGTGAACAGAAACTGATTTCAGAAGCC
AA
DCHVLWR#LDGLF#MPFF#evqlvesgggsvqagdslrlsca
asgDCHVLWRmgwfrqapgkerefvaaisLDGLFtnyadsvrgrfsisad
sakntvylqmnslkpedtavyycaaMPFFdywgqgtqvtvss#GGAGATA
TACCATGGAAGTTCAACTGGTTGAATCTGGTGGCGGTTCAGTTCAAGCCG
GTGATAGCCTTCGTCTGAGCTGCGCCGCAAGCGGAGATTGTCACGTTCTC
TGGCGTATGGGTTGGTTTCGCCAGGCACCTGGTAAAGAACGTGAATTTGT
GGCAGCCATTAGCCTCGACGGTTTGTTTACCAACTATGCCGATTCTGTTC
GTGGTCGCTTCAGCATTTCAGCAGATTCTGCGAAGAATACCGTGTACTTA
CAGATGAACTCACTGAAACCTGAGGATACCGCCGTTTATTATTGTGCGGC
AATGCCTTTTTTTGACTATTGGGGTCAGGGCACACAAGTCACGGTCTCAA
GCGGCGGAAGCTCTGGTGAACAGAAACTGATTTCAGAAGCCAA
D
CHVLWR#LDGLF#LIPRPT#evqlvesggglvqagdslrlscaasgDCHV
LWRmgwfrqapgkerefvaaisLDGLFtnyadsvrgrfsisadsakntvy
lqmnslkpedtavyycaaLIPRPTdywgqctqvtvss#AAGGAGATATAC
CATGGAAGTTCAACTGGTTGAATCTGGTGGCGGTTTAGTTCAAGCCGGTG
ATAGCCTTCGTCTGAGCTGCGCCGCAAGCGGAGATTGTCACGTTCTCTGG
CGTATGGGTTGGTTTCGCCAGGCACCTGGTAAAGAACGTGAATTTGTGGC
AGCCATTAGCCTCGACGGTTTGTTTACCAACTATGCCGATTCTGTTCGTG
GTCGCTTCAGCATTTCAGCAGATTCTGCGAAGAATACCGTGTACTTACAG
ATGAACTCACTGAAACCTGAGGATACCGCCGTTTATTATTGTGCGGCACT
TATCCCGCGTCCGACCGACTATTGGGGTCAGTGCACACAAGTCACGGTCT
CAAGCGGCGGAAGCTCTGGTGAACAGAAACTGATTTCAGAAGCCAA

TABLE 5
Sequences belonging to cluster SR8. Each line in the table represents one sequence,
both segments and full length of the sequence are shown. Shown items are divided by “#” and in
the order from start to end of each line is: CDR1 amino acid sequence, CDR2 amino acid sequence,
CDR3 amino acid sequence, full-length amino acid sequence with CDRs capitalized, full-length
DNA sequence.
(SEQ ID NOS: 1421-2030)

DYCMDCF#PYSFK#PLNIGTATIA#evqlvesggglvkagdslrlscaasgDYCMDCFmgwfrqapgkerefvaaitPYSFKtyyadsvkgrftisrddarntvylqmnslkpedtavyycaa
PLNIGTATIAaywgqgtqvtvss#AGGAGATATACCATGGAAGTTCAACTGGTTGAATCTGGTGGCGGTTTAGTTAAAGCCGGTGATAGCCTTCGTCTGAGCTGC
GCCGCAAGCGGAGATTACTGCATGGATTGCTTTATGGGTTGGTTTCGCCAGGCACCTGGTAAAGAACGTGAATTTGTGGCAGCCATTACCCCCTATTCCTTT
AAGACCTACTATGCCGATTCTGTTAAAGGTCGCTTCACTATTTCACGCGATGATGCGCGTAATACCGTGTACTTACAGATGAACTCACTGAAACCTGAGGATA
CCGCCGTTTATTATTGTGCGGCACCCCTCAATATCGGCACCGCGACGATTGCCGCCTATTGGGGTCAGGGCACACAAGTCACGGTCTCAAGCGGCGGAAGC
TCTGGTGAACAGAAACTGATTTCAGAAG
DYCMDCF#PYSFK#NPLDPNWTNS#evqlvesggglvqagdslrlscaasgDYCMDCFmgwfrqapgkerefvaaitPYSFKtyyadsvkgrftisrddarntvylqmnslkpedtavyyc
aaNPLDPNWTNSdywgqgtqvtvss#GGAGATATACCATGGAAGTTCAACTGGTTGAATCTGGTGGCGGTTTAGTTCAAGCCGGTGATAGCCTTCGTCTGAGCT
GCGCCGCAAGCGGAGATTACTGCATGGATTGCTTTATGGGTTGGTTTCGCCAGGCACCTGGTAAAGAACGTGAATTTGTGGCAGCCATTACCCCCTATTCCT
TTAAGACCTACTATGCCGATTCTGTTAAAGGTCGCTTCACTATTTCACGCGATGATGCGCGTAATACCGTGTACTTACAGATGAACTCACTGAAACCTGAGGA
TACCGCCGTTTATTATTGTGCGGCAAACCCTCTGGACCCCAACTGGACTAATTCTGACTATTGGGGTCAGGGCACACAAGTCACGGTCTCAAGCGGCGGAAG
CTCTGGTGAACAGAAACTGATTTCAGAAG
DYCMDCF#PYSFK#DSLILANSQW#evqlvesggglvqagdslrlscaasgDYCMDCFmgwfrqapgkerefvaaitPYSFKtyyadsvkgrftisrddarntvylqmnslkpedtavyyca
aDSLILANSQWdywgqgtqvtvss#AGATATACCATGGAAGTTCAACTGGTTGAATCTGGTGGCGGTTTAGTTCAAGCCGGTGATAGCCTTCGTCTGAGCTGCG
CCGCAAGCGGAGATTACTGCATGGATTGCTTTATGGGTTGGTTTCGCCAGGCACCTGGTAAAGAACGTGAATTTGTGGCAGCCATTACCCCCTATTCCTTTA
AGACCTACTATGCCGATTCTGTTAAAGGTCGCTTCACTATTTCACGCGATGATGCGCGTAATACCGTGTACTTACAGATGAACTCACTGAAACCTGAGGATAC
CGCCGTTTATTATTGTGCGGCAGACAGCCTTATTTTGGCTAATTCTCAGTGGGACTATTGGGGTCAGGGCACACAAGTCACGGTCTCAAGCGGCGGAAGCTC
TGGTGAACAGAAACTGATTTCAGAAG
DYCMDCF#PYSFK#VPNVTWSERA#evqlfesggglvqagdslrlscaasgDYCMDCFmgwfrqapgkerefvaaitPYSFKtyyadsvkgrftisrddarntvylqmnslkpedtavyyc
aaVPNVTWSERAdywgqgtqvtvss#AGATATACCATGGAAGTTCAACTGTTTGAATCTGGTGGCGGTTTAGTTCAAGCCGGTGATAGCCTTCGTCTGAGCTGC
GCCGCAAGCGGAGATTACTGCATGGATTGCTTTATGGGTTGGTTTCGCCAGGCACCTGGTAAAGAACGTGAATTTGTGGCAGCCATTACCCCCTATTCCTTT
AAGACCTACTATGCCGATTCTGTTAAAGGTCGCTTCACTATTTCACGCGATGATGCGCGTAATACCGTGTACTTACAGATGAACTCACTGAAACCTGAGGATA
CCGCCGTTTATTATTGTGCGGCAGTCCCCAATGTGACCTGGTCCGAGAGGGCTGACTATTGGGGTCAGGGCACACAAGTCACGGTCTCAAGCGGCGGAAGC
TCTGGTGAACAGAAACTGATTTCAGAAG
DYCMDCF#PYSFK#PLNIGTATIA#evqlvesggglvqagdslrlscaasgDYCMDCFmgwfrqapgkerefvaaitPYSFKtyyadsvkgrftisrddarntvylqmnslkpedtavyycaa
PLNIGTATIAdywgqgtqvtvss#AGGAGATATACCATGGAAGTTCAACTGGTTGAATCTGGTGGCGGTTTAGTTCAAGCCGGTGATAGCCTTCGTCTGAGCTGC
GCCGCAAGCGGAGATTACTGCATGGATTGCTTTATGGGTTGGTTTCGCCAGGCACCTGGTAAAGAACGTGAATTTGTGGCAGCCATTACCCCCTATTCCTTT
AAGACCTACTATGCCGATTCTGTTAAAGGTCGCTTCACTATTTCACGCGATGATGCGCGTAATACCGTGTACTTACAGATGAACTCACTGAAACCTGAGGATA
CCGCCGTTTATTATTGTGCGGCACCCCTCAATATCGGCACCGCGACGATTGCCGACTATTGGGGTCAGGGCACACAAGTCACGGTCTCAAGCGGCGGAAGC
TCTGGTGAACAGAAACTGATTTCAGAAG
DYCMDCF#PYSFK#PLNIGTATIA#evqlvesggglvqagdslrlscaasgDYCMDCFmgwfrqapgkerefvaaitPYSFKtyyadsvkgrftisrddarntvylqmnslkpedtavyycaa
PLNIGTATIAdywgqgtqvtiss#ACCATGGAAGTTCAACTGGTTGAATCTGGTGGCGGTTTAGTTCAAGCCGGTGATAGCCTTCGTCTGAGCTGCGCCGCAAGC
GGAGATTACTGCATGGATTGCTTTATGGGTTGGTTTCGCCAGGCACCTGGTAAAGAACGTGAATTTGTGGCAGCCATTACCCCCTATTCCTTTAAGACCTACT
ATGCCGATTCTGTTAAAGGTCGCTTCACTATTTCACGCGATGATGCGCGTAATACCGTGTACTTACAGATGAACTCACTGAAACCTGAGGATACCGCCGTTTA
TTATTGTGCGGCACCCCTCAATATCGGCACCGCGACGATTGCCGACTATTGGGGTCAGGGCACACAAGTCACGATCTCAAGCGGCGGAAGCTCTGGTGAAC
AGAAACTGATTTCAGAAG
DYCMDCF#PYSFK#VPNVTWSERA#evqlvesggglvqagdslrlscaasgDYCMDCFmgwfrqapgkerefvaaitPYSFKtyyadsvkgrftisrddarntvylqmnslkpedtavyyc
aaVPNVTWSERAaywgqgtqvtvss#AGATATACCATGGAAGTTCAACTGGTTGAATCTGGTGGCGGTTTAGTTCAAGCCGGTGATAGCCTTCGTCTGAGCTGC
GCCGCAAGCGGAGATTACTGCATGGATTGCTTTATGGGTTGGTTTCGCCAGGCACCTGGTAAAGAACGTGAATTTGTGGCAGCCATTACCCCCTATTCCTTT
AAGACCTACTATGCCGATTCTGTTAAAGGTCGCTTCACTATTTCACGCGATGATGCGCGTAATACCGTGTACTTACAGATGAACTCACTGAAACCTGAGGATA
CCGCCGTTTATTATTGTGCGGCAGTCCCCAATGTGACCTGGTCCGAGAGGGCTGCCTATTGGGGTCAGGGCACACAAGTCACGGTCTCAAGCGGCGGAAGC
TCTGGTGAACAGAAACTGATTTCAGAAG
DYCMDCF#PYSFK#PLNIGTATIA#evqlvesggglvqtgdslrlscaasgDYCMDCFmgwfrqapgkerefvaaitPYSFKtyyadsvkgrftisrddarntvylqmnslkpedtavyycaa
PLNIGTATIAdywgqgtqvtvss#AGATATACCATGGAAGTTCAACTGGTTGAATCTGGTGGCGGTTTAGTTCAAACCGGTGATAGCCTTCGTCTGAGCTGCGCC
GCAAGCGGAGATTACTGCATGGATTGCTTTATGGGTTGGTTTCGCCAGGCACCTGGTAAAGAACGTGAATTTGTGGCAGCCATTACCCCCTATTCCTTTAAG
ACCTACTATGCCGATTCTGTTAAAGGTCGCTTCACTATTTCACGCGATGATGCGCGTAATACCGTGTACTTACAGATGAACTCACTGAAACCTGAGGATACCG
CCGTTTATTATTGTGCGGCACCCCTCAATATCGGCACCGCGACGATTGCCGACTATTGGGGTCAGGGCACACAAGTCACGGTCTCAAGCGGCGGAAGCTCT
GGTGAACAGAAACTGATTTCAGAAG
DYCMDCF#PYSFK#NPLDPNWTNS#evqlvesggglvqagdslrlscaasgDYCMDCFmgwfrqapgkerefvaaitPYSFKtyyadsvkgrftisrddarntvylqmnslkpedtavyyc
aaNPLDPNWTNSaywgqgtqvtvss#ATATACCATGGAAGTTCAACTGGTTGAATCTGGTGGCGGTTTAGTTCAAGCCGGTGATAGCCTTCGTCTGAGCTGCGC
CGCAAGCGGAGATTACTGCATGGATTGCTTTATGGGTTGGTTTCGCCAGGCACCTGGTAAAGAACGTGAATTTGTGGCAGCCATTACCCCCTATTCCTTTAA
GACCTACTATGCCGATTCTGTTAAAGGTCGCTTCACTATTTCACGCGATGATGCGCGTAATACCGTGTACTTACAGATGAACTCACTGAAACCTGAGGATACC
GCCGTTTATTATTGTGCGGCAAACCCTCTGGACCCCAACTGGACTAATTCTGCCTATTGGGGTCAGGGCACACAAGTCACGGTCTCAAGCGGCGGAAGCTCT
GGTGAACAGAAACTGATTTCAGAAG
DYCMDCF#PYSFK#NPLDPNWTNS#evqlvesggglvqagdslrlscaasgDYCMDCFmgwfrqapgkerefvaaitPYSFKtyyadsvkgrftisrddarntvylqmnslkpedtavyyc
aaNPLDPNWTNSdywcqgtqvtvss#AAGGAGATATACCATGGAAGTTCAACTGGTTGAATCTGGTGGCGGTTTAGTTCAAGCCGGTGATAGCCTTCGACTGA
GCTGCGCCGCAAGCGGAGATTACTGCATGGATTGCTTTATGGGTTGGTTTCGCCAGGCACCTGGTAAAGAACGTGAATTTGTGGCAGCCATTACCCCCTATT
CCTTTAAGACCTACTATGCCGATTCTGTTAAAGGTCGCTTCACTATTTCACGCGATGATGCGCGTAATACCGTGTACTTACAGATGAACTCACTGAAACCTGA
GGATACCGCCGTTTATTATTGTGCGGCAAACCCTCTGGACCCCAACTGGACTAATTCTGACTATTGGTGTCAGGGCACACAAGTCACGGTCTCAAGCGGCGG
AAGCTCTGGTGAACAGAAACTGATTTCAGAAG
DYCMDCF#PYSFK#NPLDPNWTNS#evqlvesggglvqagdslrlscaaggDYCMDCFmgwfrqapgkerefvaaitPYSFKtyyadsvkgrftisrddarntvylqmnslkpedtavyy
caaNPLDPNWTNSdywgqgtqvtvss#AGATATACCATGGAAGTTCAACTGGTTGAATCTGGTGGCGGTTTAGTTCAAGCCGGTGATAGCCTTCGTCTGAGCTG
CGCCGCAGGCGGAGATTACTGCATGGATTGCTTTATGGGTTGGTTTCGCCAGGCACCTGGTAAAGAACGTGAATTTGTGGCAGCCATTACCCCCTATTCCTT
TAAGACCTACTATGCCGATTCTGTTAAAGGTCGCTTCACTATTTCACGCGATGATGCGCGTAATACCGTGTACTTACAGATGAACTCACTGAAACCTGAGGAT
ACCGCCGTTTATTATTGTGCGGCAAACCCTCTGGACCCCAACTGGACTAATTCTGACTATTGGGGTCAGGGCACACAAGTCACGGTCTCAAGCGGCGGAAG
CTCTGGTGAACAGAAACTGATTTCAGAAG
DYCMDCF#PYSFK#SMHLNNISIS#evqlvesggglvqagdslrlscaasgDYCMDCFmgwfrqapgkerefvaaitPYSFKtyyadsvkgrftisrddarntvylqmnslkpedtavyyca
aSMHLNNISISdywgqgtqvtvss#AGGAGATATACCATGGAAGTTCAACTGGTTGAATCTGGTGGCGGTTTAGTTCAAGCCGGTGATAGCCTTCGTCTGAGCTG
CGCCGCAAGCGGAGATTACTGCATGGATTGCTTTATGGGTTGGTTTCGCCAGGCACCTGGTAAAGAACGTGAATTTGTGGCAGCCATTACCCCCTATTCCTT
TAAGACCTACTATGCCGATTCTGTTAAAGGTCGCTTCACTATTTCACGCGATGATGCGCGTAATACCGTGTACTTACAGATGAACTCACTGAAACCTGAGGAT
ACCGCCGTTTATTATTGTGCGGCATCTATGCACCTGAACAATATCAGCATTAGTGACTATTGGGGTCAGGGCACACAAGTCACGGTCTCAAGCGGCGGAAG
CTCTGGTGAACAGAAACTGATTTCAGAAG
DYCMDCF#PYSFK#SANILHLSVI#evqlvesggglvqagdslrlscaasgDYCMDCFmgwfrqapgkerefvaaitPYSFKtyyadsvkgrftisrddarntvylqmnslkpedtavyycaa
SANILHLSVInywgqgtqvtvss#ATACCATGGAAGTTCAACTGGTTGAATCTGGTGGCGGTTTAGTTCAAGCCGGTGATAGCCTTCGTCTGAGCTGCGCCGCAA
GCGGAGATTACTGCATGGATTGCTTTATGGGTTGGTTTCGCCAGGCACCTGGTAAAGAACGTGAATTTGTGGCAGCCATTACCCCCTATTCCTTTAAGACCTA
CTATGCCGATTCTGTTAAAGGTCGCTTCACTATTTCACGCGATGATGCGCGTAATACCGTGTACTTACAGATGAACTCACTGAAACCTGAGGATACCGCCGTT
TATTATTGTGCGGCAAGCGCGAACATTCTCCATTTGTCTGTTATCAACTATTGGGGTCAGGGCACACAAGTCACGGTCTCAAGCGGCGGAAGCTCTGGTGAA
CAGAAACTGATTTCAGAAG
DYCMDCF#PYSFK#LLPLDGFETS#evqlvesggglvqagdslrlscaasgDYCMDCFmgwfrqapgkerefvaaitPYSFKtyyadsvkgrftisrddarntvylqmnslkpedtavyycaa
LLPLDGFETSdywgqgtqvtvss#ACCATGGAAGTTCAACTGGTTGAATCTGGTGGCGGTTTAGTTCAAGCCGGTGATAGCCTTCGTCTGAGCTGCGCCGCAAGC
GGAGATTACTGCATGGATTGCTTTATGGGTTGGTTTCGCCAGGCACCTGGTAAAGAACGTGAATTTGTGGCAGCCATTACCCCCTATTCCTTTAAGACCTACT
ATGCCGATTCTGTTAAAGGTCGCTTCACTATTTCACGCGATGATGCGCGTAATACCGTGTACTTACAGATGAACTCACTGAAACCTGAGGATACCGCCGTTTA
TTATTGTGCGGCACTTCTCCCCCTGGATGGTTTTGAGACTTCGGACTATTGGGGTCAGGGCACACAAGTCACGGTCTCAAGCGGCGGAAGCTCTGGTGAAC
AGAAACTGATTTCAGAAG
DYCMDCF#PYSFK#NPLDPNWTNS#evqlvesggglvqagdslrlscaasgDYCMDCFmgwfrqapgkerefvaaitPYSFKtyyadsvkgrstisrddarntvylqmnslkpedtavyy
caaNPLDPNWTNSaywghgtqvtvss#GGAGATATACCATGGAAGTTCAACTGGTTGAATCTGGTGGCGGTTTAGTTCAAGCCGGTGATAGCCTTCGTCTGAGC
TGCGCCGCAAGCGGAGATTACTGCATGGATTGCTTTATGGGTTGGTTTCGCCAGGCACCTGGTAAAGAACGTGAATTTGTGGCAGCCATTACCCCCTATTCC
TTTAAGACCTACTATGCCGATTCTGTTAAAGGTCGCTCCACTATTTCACGCGATGATGCGCGTAATACCGTGTACTTACAGATGAACTCACTGAAACCTGAGG
ATACCGCCGTTTATTATTGTGCGGCAAACCCTCTGGACCCCAACTGGACTAATTCTGCCTATTGGGGTCACGGCACACAAGTCACGGTCTCAAGCGGCGGAA
GCTCTGGTGAACAGAAACTGATTTCAGAAG
DYCMDCF#PYSFK#LLPLDGFETS#evqlvesggglvqagdrlrlscaasgDYCMDCFmgwfrqapgkerefvaaitPYSFKtyyadsvkgrftisrdgarntvylqmnslkpedtavyycaa
LLPLDGFETSdywgqgtqvtvss#ATACCATGGAAGTTCAACTGGTTGAATCTGGTGGCGGTTTAGTTCAAGCCGGTGATAGGCTTCGTCTGAGCTGCGCCGCAA
GCGGAGATTACTGCATGGATTGCTTTATGGGTTGGTTTCGCCAGGCACCTGGTAAAGAACGTGAATTTGTGGCAGCCATTACCCCCTATTCTTTTAAGACCTA
CTATGCCGATTCTGTTAAAGGTCGCTTCACTATTTCACGCGATGGTGCGCGTAATACCGTGTACTTACAGATGAACTCACTGAAACCTGAGGATACCGCCGTT
TATTATTGTGCGGCACTTCTCCCCCTGGATGGTTTTGAGACTTCGGACTATTGGGGTCAGGGCACACAAGTCACGGTCTCAAGCGGCGGAAGCTCTGGTGAA
CAGAAACTGATTTCAGAAG
DYCMDCF#PYSFK#TYYSTTCLLF#evqlvesggglvqagdslrlscaasgDYCMDCFmgwfrqapgkerefvaaitPYSFKtyyadsvkgrftisrddarntvylqmnslkpedtavyycar
TYYSTTCLLFdywgqgtqvtvss#ATATACCATGGAAGTTCAACTGGTTGAATCTGGTGGCGGTTTAGTTCAAGCCGGTGATAGCCTTCGTCTGAGCTGCGCCGCA
AGCGGAGATTACTGCATGGATTGCTTTATGGGTTGGTTTCGCCAGGCACCTGGTAAAGAACGTGAATTTGTGGCAGCCATTACCCCCTATTCCTTTAAGACCT
ACTATGCCGATTCTGTTAAAGGTCGCTTCACTATTTCACGCGATGATGCGCGTAATACCGTGTACTTACAGATGAACTCACTGAAACCTGAGGATACCGCCGT
TTATTATTGTGCGCGTACGTACTACAGCACCACCTGTTTGCTGTTCGACTATTGGGGTCAGGGCACACAAGTCACGGTCTCAAGCGGCGGAAGCTCTGGTGA
ACAGAAACTGATTTCAGAAG
DYCMDCF#PYSFK#PLNIGTVTIA#evqlvesggglvqagdslrlscaasgDYCMDCFmgwfrqapgkerefvaaitPYSFKtyyadsvkgrftisrddarntvylqmnslkpedtavyycaa
PLNIGTVTIAdywgqgtqvtvss#GAAGGAGATATACCATGGAAGTTCAACTGGTTGAATCTGGTGGCGGTTTAGTTCAAGCCGGTGATAGCCTTCGTCTGAGCT
GCGCCGCAAGCGGAGATTACTGCATGGATTGCTTTATGGGTTGGTTTCGCCAGGCACCTGGTAAAGAACGTGAATTTGTGGCAGCCATTACCCCCTATTCCT
TTAAGACCTACTATGCCGATTCTGTTAAAGGTCGCTTCACTATTTCACGCGATGATGCGCGTAATACCGTGTACTTACAGATGAACTCACTGAAACCTGAGGA
TACCGCCGTTTATTATTGTGCGGCACCCCTCAATATCGGCACCGTGACGATTGCCGACTATTGGGGTCAGGGCACACAAGTCACGGTCTCAAGCGGCGGAA
GCTCTGGTGAACAGAAACTGATTTCAGAAG
DYCMDCF#PYSFK#QVSLVTHGDL#evqlvesggglvqagdslrlscaasgDYCMDCFmgwfrqapgkerefvaaitPYSFKtyyadsvkgrftisrddarntvylqmnslkpedtavyyc
aaQVSLVTHGDLdswgqgtqvtvss#ATACCATGGAAGTTCAACTGGTTGAATCTGGTGGCGGTTTAGTTCAAGCCGGTGATAGCCTTCGTCTGAGCTGCGCCGC
AAGCGGAGATTACTGCATGGATTGCTTTATGGGTTGGTTTCGCCAGGCACCTGGTAAAGAACGTGAATTTGTGGCAGCCATTACCCCCTATTCCTTTAAGAC
CTACTATGCCGATTCTGTTAAAGGTCGCTTCACTATTTCACGCGATGATGCGCGTAATACCGTGTACTTACAGATGAACTCACTGAAACCTGAGGATACCGCC
GTTTATTATTGTGCGGCACAGGTCTCCCTTGTTACCCATGGGGATCTGGACTCTTGGGGTCAGGGCACACAAGTCACGGTCTCAAGCGGCGGAAGCTCTGG
TGAACAGAAACTGATTTCAGAAG
DYCMDCF#PYSFK#NPLDPNWTNS#evqlvesggglvqagdslhlscaasgDYCMDCFmgwfrqapgkerefvaaitPYSFKtyyadsvkgrftisrddarntvylqmnslkpedtavyy
caaNPLDPNWTNSdywgqgtqvtvss#ATATACCATGGAAGTTCAACTGGTTGAATCTGGTGGCGGTTTAGTTCAAGCCGGTGATAGCCTTCATCTGAGCTGCG
CCGCAAGCGGAGATTACTGCATGGATTGCTTTATGGGTTGGTTTCGCCAGGCACCTGGTAAAGAACGTGAATTTGTGGCAGCCATTACCCCCTATTCCTTTA
AGACCTACTATGCCGATTCTGTTAAAGGTCGCTTCACTATTTCACGCGATGATGCGCGTAATACCGTGTACTTACAGATGAACTCACTGAAACCTGAGGATAC
CGCCGTTTATTATTGTGCGGCAAACCCTCTGGACCCCAACTGGACTAATTCTGACTATTGGGGTCAGGGCACACAAGTCACGGTCTCAAGCGGCGGAAGCTC
TGGTGAACAGAAACTGATTTCAGAAG
DYCMDCF#PYSFK#SANILHLSVI#evqlvesggglvkagdslrlscaasgDYCMDCFmgwfrqapgkerefvaaitPYSFKtyyadsvkgrftisrddarntvylqmnslkpedtavyycaa
SANILHLSVInywgqgtqvtvss#AGGAGATATACCATGGAAGTTCAACTGGTTGAATCTGGTGGCGGTTTAGTTAAAGCCGGTGATAGCCTTCGTCTGAGCTGC
GCCGCAAGCGGAGATTACTGCATGGATTGCTTTATGGGTTGGTTTCGCCAGGCACCTGGTAAAGAACGTGAATTTGTGGCAGCCATTACCCCCTATTCCTTT
AAGACCTACTATGCCGATTCTGTTAAAGGTCGCTTCACTATTTCACGCGATGATGCGCGTAATACCGTGTACTTACAGATGAACTCACTGAAACCTGAGGATA
CCGCCGTTTATTATTGTGCGGCAAGCGCGAACATTCTCCATTTGTCTGTTATCAACTATTGGGGTCAGGGCACACAAGTCACGGTCTCAAGCGGCGGAAGCT
CTGGTGAACAGAAACTGATTTCAGAAG
DYCMDCF#PYSFK#SSCLGALLHL#evqlvesggglvqasdslrlscaasgDYCMDCFmgwfrqapgkerefvaaitPYSFKtyyadsvkgrftisrddarntvylqmnslkpedtavyycaa
SSCLGALLHLdywgqgtqvtvss#ATATACCATGGAAGTTCAACTGGTTGAATCTGGTGGCGGTTTAGTTCAAGCCAGTGATAGCCTTCGTCTGAGCTGCGCCGC
AAGCGGAGATTACTGCATGGATTGCTTTATGGGTTGGTTTCGTCAGGCACCTGGTAAAGAACGTGAATTTGTGGCAGCCATTACCCCCTATTCCTTTAAGAC
CTACTATGCCGATTCTGTTAAAGGTCGCTTCACTATTTCACGCGATGATGCGCGTAATACCGTGTACTTACAGATGAACTCACTGAAACCTGAGGATACCGCC
GTTTATTATTGTGCGGCATCGTCTTGCTTGGGTGCTCTCCTTCATTTGGACTATTGGGGTCAGGGCACACAAGTCACGGTCTCAAGCGGCGGAAGCTCTGGT
GAACAGAAACTGATTTCAGAAG
DYCMDCF#PYSFK#CLPNAH#evqlvesggglvqagdslrlscaasgDYCMDCFmgwfrqapgkerefvaaitPYSFKtyyadsvkgrftisrddarntvylqmnslkpedtavyycaaCLP
NAHdywgqgtqvtvss#ATATGCCATGGAAGTTCAACTGGTTGAATCTGGTGGCGGTTTAGTTCAAGCCGGTGATAGCCTTCGTCTGAGCTGCGCCGCAAGCG
GAGATTACTGCATGGATTGCTTTATGGGTTGGTTTCGCCAGGCACCTGGTAAAGAACGTGAATTTGTGGCAGCCATTACCCCCTATTCCTTTAAGACCTACTA
TGCCGATTCTGTTAAAGGTCGCTTCACTATTTCACGCGATGATGCGCGTAATACCGTGTACTTACAGATGAACTCACTGAAACCTGAGGATACCGCCGTTTAT
TATTGTGCGGCATGCCTCCCCAATGCTCATGACTATTGGGGTCAGGGCACACAAGTCACGGTCTCAAGCGGCGGAAGCTCTGGTGAACAGAAACTGATTTC
AGAAG
DYCMDCF#PYSFK#QIRKFSVFW#evqlvesggglvqagdslrlscaasgDYCMDCFmgwfrqapgkerefvaaitPYSFKtyyadsvkgrftisrddarntvylqmnslkpedtavyycaa
QIRKFSVFWdywgqgtqvtvss#ATATACCATGGAAGTTCAACTGGTTGAATCTGGTGGCGGTTTAGTTCAAGCCGGTGATAGCCTTCGTCTGAGCTGCGCCGC
AAGCGGAGATTACTGCATGGATTGCTTTATGGGTTGGTTTCGCCAGGCACCTGGTAAAGAACGTGAATTTGTGGCAGCCATTACCCCCTATTCCTTTAAGAC
CTACTATGCCGATTCTGTTAAAGGTCGCTTCACTATTTCACGCGATGATGCGCGTAATACCGTGTACTTACAGATGAACTCACTGAAACCTGAGGATACCGCC
GTTTATTATTGTGCGGCACAGATTCGCAAGTTTAGTGTGTTTTGGGACTATTGGGGTCAGGGCACACAAGTCACGGTCTCAAGCGGCGGAAGCTCTGGTGA
ACAGAAACTGATTTCAGAAG
DYCMDCF#PYSFK#QVSLVTHGDL#evqlvksggglvqagdslrlscaasgDYCMDCFmgwfrqapgkerefvaaitPYSFKtyyadsvkgrftisrddarntvylqmnslkpedtavyyca
aQVSLVTHGDLdswgqgtqvtvss#AGATATACCATGGAAGTTCAACTGGTTAAATCTGGTGGCGGTTTAGTTCAAGCCGGTGATAGCCTTCGTCTGAGCTGCGC
CGCAAGCGGAGATTACTGCATGGATTGCTTTATGGGTTGGTTTCGCCAGGCACCTGGTAAAGAACGTGAATTTGTGGCAGCCATTACCCCCTATTCCTTTAA
GACCTACTATGCCGATTCTGTTAAAGGTCGCTTCACTATTTCACGCGATGATGCGCGTAATACCGTGTACTTACAGATGAACTCACTGAAACCTGAGGATACC
GCCGTTTATTATTGTGCGGCACAGGTCTCCCTTGTTACCCATGGGGATCTGGACTCTTGGGGTCAGGGCACACAAGTCACGGTCTCAAGCGGCGGAAGCTCT
GGTGAACAGAAACTGATTTCAGAAG
DYCMDCF#PYSFK#NPLDPNWTNS#evqlvesggglvhagdslrlscaasgDYCMDCFmgwfrqapgkerefvaaitPYSFKtyyadsvkgrftisrddarntvylqmnslkpedtavyyc
aaNPLDPNWTNSdywgqgtqvtvss#GAAGGAGATATACCATGGAAGTTCAACTGGTTGAATCTGGTGGCGGTTTAGTTCACGCCGGTGATAGCCTTCGTCTGA
GCTGCGCCGCAAGCGGAGATTACTGCATGGATTGCTTTATGGGTTGGTTTCGCCAGGCACCTGGTAAAGAACGTGAATTTGTGGCAGCCATTACCCCCTATT
CCTTTAAGACCTACTATGCCGATTCTGTTAAAGGTCGCTTCACTATTTCACGCGATGATGCGCGTAATACCGTGTACTTACAGATGAACTCACTGAAACCTGA
GGATACCGCCGTTTATTATTGTGCGGCAAACCCTCTGGACCCCAACTGGACTAATTCTGACTATTGGGGTCAGGGCACACAAGTCACGGTCTCAAGCGGCG
GAAGCTCTGGTGAACAGAAACTGATTTCAGAAG
DYCMDCF#PYSFK#CRTTTCYGF#evqlvesggglvqagdslrlscaasgDYCMDCFmgwfrqapgkerefvaaitPYSFKtyyadsvkgrftisrddarntvylqmnslkpedtavyycat
CRTTTCYGFdywgqgtqvtvss#ATATACCATGGAAGTTCAACTGGTTGAATCTGGTGGCGGTTTAGTTCAAGCCGGTGATAGCCTTCGTCTGAGCTGCGCCGCA
AGCGGAGATTACTGCATGGATTGCTTTATGGGTTGGTTTCGCCAGGCACCTGGTAAAGAACGTGAATTTGTGGCAGCCATTACCCCCTATTCCTTTAAGACCT
ACTATGCCGATTCTGTTAAAGGTCGCTTCACTATTTCACGCGATGATGCGCGTAATACCGTGTACTTACAGATGAACTCACTGAAACCTGAGGATACCGCCGT
TTATTATTGTGCGACATGTAGGACCACTACGTGTTATGGTTTTGACTATTGGGGTCAGGGCACACAAGTCACGGTCTCAAGCGGCGGAAGCTCTGGTGAAC
AGAAACTGATTTCAGAAG
DYCMDCF#PYSFK#NPLDPNWTNS#evqlvesggvlvqagdslrlscaasgDYCMDCFmgwfrqapgkerefvaaitPYSFKtyyadsvkgrftisrddarntvylqmnslkpedtavyyc
aaNPLDPNWTNSdywgqgtqvtvss#AGGAGATATACCATGGAAGTTCAACTGGTTGAATCTGGTGGCGTTTTAGTTCAAGCCGGTGATAGCCTTCGTCTGAGC
TGCGCCGCAAGCGGAGATTACTGCATGGATTGCTTTATGGGTTGGTTTCGCCAGGCACCTGGTAAAGAACGTGAATTTGTGGCAGCCATTACCCCCTATTCC
TTTAAGACCTACTATGCCGATTCTGTTAAAGGTCGCTTCACTATTTCACGCGATGATGCGCGTAATACCGTGTACTTACAGATGAACTCACTGAAACCTGAGG
ATACCGCCGTTTATTATTGTGCGGCAAACCCTCTGGACCCCAACTGGACTAATTCTGACTATTGGGGTCAGGGCACACAAGTCACGGTCTCAAGCGGCGGAA
GCTCTGGTGAACAGAAACTGATTTCAGAAG
DYCMDCF#PYSFK#WLTTQPFCGW#evqlvesggglvqagdslrlscaasgDYCMDCFmgwfrqapgkerefvaaitPYSFKtyyadsvrgrfsisadsakntvylqmnslkpedtavyy
caaWLTTQPFCGWnywgqgtqvtvss#ACCATGGAAGTTCAACTGGTTGAATCTGGTGGCGGTTTAGTTCAAGCCGGTGATAGCCTTCGTCTGAGCTGCGCCGC
AAGCGGAGATTACTGCATGGATTGCTTTATGGGTTGGTTTCGCCAGGCACCTGGTAAAGAACGTGAATTTGTGGCAGCCATTACCCCCTATTCCTTTAAGAC
CTACTATGCCGATTCTGTTCGTGGTCGCTTCAGCATTTCAGCAGATTCTGCGAAGAATACCGTGTACTTACAGATGAACTCACTGAAACCTGAGGATACCGCC
GTTTATTATTGTGCGGCATGGCTGACCACTCAGCCGTTCTGCGGTTGGAACTATTGGGGTCAGGGCACACAAGTCACGGTCTCAAGCGGCGGAAGCTCTGG
TGAACAGAAACTGATTTCAGAAG
DYCMDCF#PYSFK#GICAPSNTLGFVL#evqlvesggglvqagdslrlscaasgDYCMDCFmgwfrqapgkerefvaaitPYSFKtyyadsvkgrftisrddarntvylqmnslkpedtavy
ycaaGICAPSNTLGFVLgywgqgtqvtvss#GAAGGAGATATACCATGGAAGTTCAACTGGTTGAATCTGGTGGCGGTTTAGTTCAAGCCGGTGATAGCCTTCGTC
TGAGCTGCGCCGCAAGCGGAGATTACTGCATGGATTGCTTTATGGGTTGGTTTCGCCAGGCACCTGGTAAAGAACGTGAATTTGTGGCAGCCATTACCCCCT
ATTCCTTTAAGACCTACTATGCCGATTCTGTTAAAGGTCGCTTCACTATTTCACGCGATGATGCGCGTAATACCGTGTACTTACAGATGAACTCACTGAAACCT
GAGGATACCGCCGTTTATTATTGTGCGGCAGGGATCTGTGCCCCCTCCAATACGCTCGGCTTCGTTCTTGGCTATTGGGGTCAGGGCACACAAGTCACGGTC
TCAAGCGGCGGAAGCTCTGGTGAACAGAAACTGATTTCAGAAG
DYCMDCF#PYSFK#DSLILANSQW#evqlvesggglvhagdrlrlscaasgDYCMDCFmgwfrqapgkerefvaaitPYSFKtyyadsvkgrftisrddarntvylqmnslkpedtavyyca
aDSLILANSQWdywgqgtqvtvss#GAAGGAGATATACCATGGAAGTTCAACTGGTTGAATCTGGTGGCGGTTTAGTTCACGCCGGTGATCGCCTTCGTCTGAG
CTGCGCCGCAAGCGGAGATTACTGCATGGATTGCTTTATGGGTTGGTTTCGCCAGGCACCTGGTAAAGAACGTGAATTTGTGGCAGCCATTACCCCCTATTC
CTTTAAGACCTACTATGCCGATTCTGTTAAAGGTCGCTTCACTATTTCACGCGATGATGCGCGTAATACCGTGTACTTACAGATGAACTCACTGAAACCTGAG
GATACCGCCGTTTATTATTGTGCGGCAGACAGCCTTATTTTGGCTAATTCTCAGTGGGACTATTGGGGTCAGGGCACACAAGTCACGGTCTCAAGCGGCGGA
AGCTCTGGTGAACAGAAACTGATTTCAGAAG
DYCMDCF#PYSFK#PFAPLTVLLA#evqlvesggglvqagdslrlscaasgDYCMDCFmgwfrqapgkerefvaaitPYSFKtyyadsvkgrftisrddarntvylqmnslkpedtavyyca
aPFAPLTVLLAeywgqdtqvtvss#ACCATGGAAGTTCAACTGGTTGAATCTGGTGGCGGTTTAGTTCAAGCCGGTGATAGCCTTCGTCTGAGCTGCGCCGCAAG
CGGAGATTACTGCATGGATTGCTTTATGGGTTGGTTTCGCCAGGCACCTGGTAAAGAACGTGAATTTGTGGCAGCCATTACCCCCTATTCCTTTAAGACCTAC
TATGCCGATTCTGTTAAAGGTCGCTTCACTATTTCACGCGATGATGCGCGTAATACCGTGTACTTACAGATGAACTCACTGAAACCTGAGGATACCGCCGTTT
ATTATTGTGCGGCACCGTTCGCGCCCCTTACCGTTCTTCTCGCGGAGTATTGGGGTCAGGACACACAAGTCACGGTCTCAAGCGGCGGAAGCTCTGGTGAAC
AGAAACTGATTTCAGAAG
DYCMDCF#PYSFR#DSLILANSQW#evqlvesggglvqagdslrlscaasgDYCMDCFmgwfrqapgkerefvaaitPYSFRtyyadsvkgrftisrddarntvylqmnslkpedtavyyc
aaDSLILANSQWdywgqgtqvtvss#ACCATGGAAGTTCAACTGGTTGAATCTGGTGGCGGTTTAGTTCAAGCCGGTGATAGCCTTCGTCTGAGCTGCGCCGCA
AGCGGAGATTACTGCATGGATTGCTTTATGGGTTGGTTTCGCCAGGCACCTGGTAAAGAACGTGAATTTGTGGCAGCCATTACCCCCTATTCCTTTAGGACC
TACTATGCCGATTCTGTTAAAGGTCGCTTCACTATTTCACGCGATGATGCGCGTAATACCGTGTACTTACAGATGAACTCACTGAAACCTGAGGATACCGCCG
TTTATTATTGTGCGGCAGACAGCCTTATTTTGGCTAATTCTCAGTGGGACTATTGGGGTCAGGGCACACAAGTCACGGTCTCAAGCGGCGGAAGCTCTGGTG
AACAGAAACTGCTTTCAGAAG
DYCMDCF#PYSFK#VPNGTWSERA#evqlvesggglvqagdslrlscaasgDYCMDCFmgwfrqapgkerefvaaitPYSFKtyyadsvkgrftisrddarntvylqmnslkpedtavyyc
aaVPNGTWSERAdywgqgtqvtvss#AGATATACCATGGAAGTTCAACTGGTTGAATCTGGTGGCGGTTTAGTTCAAGCCGGTGATAGCCTTCGTCTGAGCTGC
GCCGCAAGCGGAGATTACTGCATGGATTGCTTTATGGGTTGGTTTCGCCAGGCACCTGGTAAAGAACGTGAATTTGTGGCAGCCATTACCCCCTATTCCTTT
AAGACCTACTATGCCGATTCTGTTAAAGGTCGCTTCACTATTTCACGCGATGATGCGCGTAATACCGTGTACTTACAGATGAACTCACTGAAACCTGAGGATA
CCGCCGTTTATTATTGTGCGGCAGTCCCCAATGGGACCTGGTCCGAGAGGGCTGACTATTGGGGTCAGGGCACACAAGTCACGGTCTCAAGCGGCGGAAG
CTCTGGTGAACAGAAACTGATTTCAGAAG
DYCMDCF#PYSFK#NPLDPNWTNS#evqlvesggglvqagdslrlscaaggDYCMDCFmgwfrqapgkerefvaaitPYSFKtyyadsvkgrftisrddarntvylqmnslkpedtavyy
caaNPLDPNWTNSaywgqgtqvtvss#ACCATGGAAGTTCAACTGGTTGAATCTGGTGGCGGTTTAGTTCAAGCCGGTGATAGCCTTCGTCTGAGCTGCGCCGC
AGGCGGAGATTACTGCATGGATTGCTTTATGGGTTGGTTTCGCCAGGCACCTGGTAAAGAACGTGAATTTGTGGCAGCCATTACCCCCTATTCCTTTAAGAC
CTACTATGCCGATTCTGTTAAAGGTCGCTTCACTATTTCACGCGATGATGCGCGTAATACCGTGTACTTACAGATGAACTCACTGAAACCTGAGGATACCGCC
GTTTATTATTGTGCGGCAAACCCTCTGGACCCCAACTGGACTAATTCTGCCTATTGGGGTCAGGGCACACAAGTCACGGTCTCAAGCGGCGGAAGCTCTGGT
GAACAGAAACTGATTTCAGAAG
DYCMDCF#PYSFK#NPLDPSWTNS#evqlvesggglvqagdslrlscaasgDYCMDCFmgwfrqapgkerefvaaitPYSFKtyyadsvkgrftisrddarntvylqmnslkpedtavyyc
aaNPLDPSWTNSdywgqgtqvtvss#AAGGAGATATACCATGGAAGTTCAACTGGTTGAATCTGGTGGCGGTTTAGTTCAAGCCGGTGATAGCCTTCGTCTGAG
CTGCGCCGCAAGCGGAGATTACTGCATGGATTGCTTTATGGGTTGGTTTCGCCAGGCACCTGGTAAAGAACGTGAATTTGTGGCAGCCATTACCCCCTATTC
CTTTAAGACCTACTATGCCGATTCTGTTAAAGGTCGCTTCACTATTTCACGCGATGATGCGCGTAATACCGTGTACTTACAGATGAACTCACTGAAACCTGAG
GATACCGCCGTTTATTATTGTGCGGCAAACCCTCTGGACCCCAGCTGGACTAATTCTGACTATTGGGGTCAGGGCACACAAGTCACGGTCTCAAGCGGCGG
AAGCTCTGGTGAACAGAAACTGATTTCAGAAG
DYCMDCF#PYSFK#VPNVTWSERA#evqlvesggglvqagdslrlscaasgDYCMDCFmgwfrqapgkerefvaaitPYSFKtyyadsvkgrftisrdaarntvylqmnslkpedtavyyc
aaVPNVTWSERAdywgqgtqvtvss#ATACCATGGAAGTTCAACTGGTTGAATCTGGTGGCGGTTTAGTTCAAGCCGGTGATAGCCTTCGTCTGAGCTGCGCCG
CAAGCGGAGATTACTGCATGGATTGCTTTATGGGTTGGTTTCGCCAGGCACCTGGTAAAGAACGTGAATTTGTGGCAGCCATTACCCCCTATTCCTTTAAGA
CCTACTATGCCGATTCTGTTAAAGGTCGCTTCACTATTTCACGCGATGCTGCGCGTAATACCGTGTACTTACAGATGAACTCACTGAAACCTGAGGATACCGC
CGTTTATTATTGTGCGGCAGTCCCCAATGTGACCTGGTCCGAGAGGGCTGACTATTGGGGTCAGGGCACACAAGTCACGGTCTCAAGCGGCGGAAGCTCTG
GTGAACAGAAACTGATTTCAGAAG
DYCMDCF#PYSFK#PLNIGTATIA#evqlvesggglvhagdrlrlscaasgDYCMDCFmgwfrqapgkerefvaaitPYSFKtyyadsvkgrftisrddarntvylqmnslkpedtavyycaa
PLNIGTATIAdywgqgtqvtvss#GAAGGAGATATACCATGGAAGTTCAACTGGTTGAATCTGGTGGCGGTTTAGTTCACGCCGGTGATCGCCTTCGTCTGAGCT
GCGCCGCAAGCGGAGATTACTGCATGGATTGCTTTATGGGTTGGTTTCGCCAGGCACCTGGTAAAGAACGTGAATTTGTGGCAGCCATTACCCCCTATTCCT
TTAAGACCTACTATGCCGATTCTGTTAAAGGTCGCTTCACTATTTCACGCGATGATGCGCGTAATACCGTGTACTTACAGATGAACTCACTGAAACCTGAGGA
TACCGCCGTTTATTATTGTGCGGCACCCCTCAATATCGGCACCGCGACGATTGCCGACTATTGGGGTCAGGGCACACAAGTCACGGTCTCAAGCGGCGGAA
GCTCTGGTGAACAGAAACTGATTTCAGAAG
DYCMDCF#PYSFK#PFAPLTVLLA#evqlvesggglvqagdslrlscaasgDYCMDCFmgwfrqapgkerefvaaitPYSFKtyyadsvkgrftisrddarntvylqmnslkpedtavyyca
aPFAPLTVLLAeywgqgtqvtvss#AGGAGATATACCATGGAAGTTCAACTGGTTGAATCTGGTGGCGGTTTAGTTCAAGCCGGTGATAGCCTTCGTCTGAGCTG
CGCCGCAAGCGGAGATTACTGCATGGATTGCTTTATGGGTTGGTTTCGCCAGGCACCTGGTAAAGAACGTGAATTTGTGGCAGCCATTACCCCCTATTCCTT
TAAGACCTACTATGCCGATTCTGTTAAAGGTCGCTTCACTATTTCACGCGATGATGCGCGTAATACCGTGTACTTACAGATGAACTCACTGAAACCTGAGGAT
ACCGCCGTTTATTATTGTGCGGCACCGTTCGCGCCCCTTACCGTTCTTCTCGCGGAGTATTGGGGTCAGGGCACACAAGTCACGGTCTCAAGCGGCGGAAGC
TCTGGTGAACAGAAACTGATTTCAGAAG
DYCMDCF#PYSFK#VPNVTWSERA#evqlvesggglvqagdslrlscaasgDYCMDCFmgwfrqapgkerefvaaitPYSFKtyyadsvkgrftisrddarntvylqmnslkpedtavyyc
aaVPNVTWSERAdywgqgtqvtvss#AGGAGATATACCATGGAAGTTCAACTGGTTGAATCTGGTGGCGGTTTAGTTCAAGCCGGTGATAGCCTTCGTCTGAGC
TGCGCCGCAAGCGGAGATTACTGCATGGATTGCTTTATGGGTTGGTTTCGCCAGGCACCTGGTAAAGAACGTGAATTTGTGGCAGCCATTACCCCCTATTCC
TTTAAGACCTACTATGCCGATTCTGTTAAAGGTCGCTTCACTATTTCACGCGATGATGCGCGTAATACCGTGTACTTACAGATGAACTCACTGAAACCTGAGG
ATACCGCCGTTTATTATTGTGCGGCAGTCCCCAATGTGACCTGGTCCGAGAGGGCTGACTATTGGGGTCAGGGCACACAAGTCACGGTCTCAAGCGGCGGA
AGCTCTGGTGAACAGAAACTGATTTCAGAAG
DYCMDCF#PYSFK#NPLDPNWTNS#evqlvesggglvqagdslrpscaasgDYCMDCFmgwfrqapgkerefvaaitPYSFKtyyadsvkgrftisrddarntvylqmnslkpedtavyy
caaNPLDPNWTNSdywgqgtqvtvss#AGGAGATATACCATGGAAGTTCAACTGGTTGAATCTGGTGGCGGTTTAGTTCAAGCCGGTGATAGCCTTCGTCCGAG
CTGCGCCGCAAGCGGAGATTACTGCATGGATTGCTTTATGGGTTGGTTTCGCCAGGCACCTGGTAAAGAACGTGAATTTGTGGCAGCCATTACCCCCTATTC
CTTTAAGACCTACTATGCCGATTCTGTTAAAGGTCGCTTCACTATTTCACGCGATGATGCGCGTAATACCGTGTACTTACAGATGAACTCACTGAAACCTGAG
GATACCGCCGTTTATTATTGTGCGGCAAACCCTCTGGACCCCAACTGGACTAATTCTGACTATTGGGGTCAGGGCACACAAGTCACGGTCTCAAGCGGCGGA
AGCTCTGGTGAACAGAAACTGATTTCAGAAG
DYCMDCF#PYSFK#PLNIGTATIA#evqlvesggglvqagdslrlscaasgDYCMDCFmgwfrqapgkerefvaaitPYSFKtyyadsvkgrftisrddarntvylqmnslkpedtavyycat
PLNIGTATIAdywgqgtqvtvss#ATACCATGGAAGTTCAACTGGTTGAATCTGGTGGCGGTTTAGTTCAAGCCGGTGATAGCCTTCGTCTGAGCTGCGCCGCAA
GCGGAGATTACTGCATGGATTGCTTTATGGGTTGGTTTCGCCAGGCACCTGGTAAAGAACGTGAATTTGTGGCAGCCATTACCCCCTATTCCTTTAAGACCTA
CTATGCCGATTCTGTTAAAGGTCGCTTCACTATTTCACGCGATGATGCGCGTAATACCGTGTACTTACAGATGAACTCACTGAAACCTGAGGATACCGCCGTT
TATTATTGTGCGACACCCCTCAATATCGGCACCGCGACGATTGCCGACTATTGGGGTCAGGGCACACAAGTCACGGTCTCAAGCGGCGGAAGCTCTGGTGA
ACAGAAACTGATTTCAGAAG
DYCMDFF#PYSFK#WLTTQPFYGW#evqlvesggglvqagdrIrIncaasgDYCMDFFmgwfrqapgkerefvaaitPYSFKtyyadsvrgrfsisadsakntvylqmnslkpedtavyy
caaWLTTQPFYGWnywgqgtqvtvss#GGAGATATACCATGGAAGTTCAACTGGTTGAATCTGGTGGCGGTTTAGTTCAAGCCGGTGATAGGCTTCGTCTGAAC
TGCGCCGCAAGCGGAGATTACTGCATGGATTTCTTTATGGGTTGGTTTCGCCAAGCACCTGGTAAAGAACGTGAATTTGTGGCCGCCATTACCCCCTATTCCT
TTAAGACCTACTATGCCGATTCTGTTCGTGGTCGCTTCAGCATTTCAGCAGATTCTGCGAAGAATACCGTGTACTTACAGATGAACTCACTGAAACCTGAGGA
TACCGCCGTTTATTATTGTGCGGCATGGCTGACCACTCAGCCGTTCTACGGTTGGAACTATTGGGGTCAGGGCACACAAGTCACGGTCTCAAGCGGCGGAA
GCTCTTGTGAACAGAAACTGATTTCAGAAG
DYCMDCF#PYSFK#TLNIGTATIA#evqlvesggglvqagdslrlscaasgDYCMDCFmgwfrqapgkerefvaaitPYSFKtyyadsvkgrftisrddarntvylqmtslkpedtavyycaa
TLNIGTATIAdywgqgtqvtvss#ACCATGGAAGTTCAACTGGTTGAATCTGGTGGCGGTTTAGTTCAAGCCGGTGATAGCCTTCGTCTGAGCTGCGCCGCAAGC
GGAGATTACTGCATGGATTGCTTTATGGGTTGGTTTCGCCAGGCACCTGGTAAAGAACGTGAATTTGTGGCAGCCATTACCCCCTATTCCTTTAAGACCTACT
ATGCCGATTCTGTTAAAGGTCGCTTCACTATTTCACGCGATGATGCGCGTAATACCGTGTACTTACAGATGACCTCCCTGAAACCTGAGGATACCGCCGTTTA
TTATTGTGCGGCAACCCTCAATATCGGCACCGCGACGATTGCCGACTATTGGGGTCAGGGCACACAAGTCACGGTCTCAAGCGGCGTAAGCTCTGGTGAAC
AGAAACTGATTTCAGAAG
DYCMDCF#PYSFK#VPNVTWSERA#evqlvesggglvqagdsfrlscaasgDYCMDCFmgwfrqapgkerefvaaitPYSFKtyyadsvkgrftisrddarntvylqmnslkpedtavyyc
aaVPNVTWSERAdywgqgtqvtvss#AAGGAGATATACCATGGAAGTTCAACTGGTTGAATCTGGTGGCGGTTTAGTTCAAGCCGGTGATAGCTTTCGTCTGAG
CTGCGCCGCAAGCGGAGATTACTGCATGGATTGCTTTATGGGTTGGTTTCGCCAGGCACCTGGTAAAGAACGTGAATTTGTGGCAGCCATTACCCCCTATTC
CTTTAAGACCTACTATGCCGATTCTGTTAAAGGTCGCTTCACTATTTCACGCGATGATGCGCGTAATACCGTGTACTTACAGATGAACTCACTGAAACCTGAG
GATACCGCCGTTTATTATTGTGCGGCAGTCCCCAATGTGACCTGGTCCGAGAGGGCTGACTATTGGGGTCAGGGCACACAAGTCACGGTCTCAAGCGGCGG
AAGCTCTGGTGAACAGAAACTGATTTCAGAAG
DYCMDCF#PYSFK#PLNIGTATIA#evqlvesggglvqagdslrlscaasgDYCMDCFmgwfrqapgkerefvaaitPYSFKtyyadsvkgrftisrddarntmylqmnslkpedtavyyca
aPLNIGTATIAdywgqgtqvtvss#AGATATACCATGGAAGTTCAACTGGTTGAATCTGGTGGCGGTTTAGTTCAAGCCGGTGATAGCCTTCGTCTGAGCTGCGC
CGCAAGCGGAGATTACTGCATGGATTGCTTTATGGGTTGGTTTCGCCAGGCACCTGGTAAAGAACGTGAATTTGTGGCAGCCATTACCCCCTATTCCTTTAA
GACCTACTATGCCGATTCTGTTAAAGGTCGCTTCACTATTTCACGCGATGATGCGCGTAATACCATGTACTTACAGATGAACTCACTGAAACCTGAGGATACC
GCCGTTTATTATTGTGCGGCACCCCTCAATATCGGCACCGCGACGATTGCCGACTATTGGGGTCAGGGCACACAAGTCACGGTCTCAAGCGGCGGAAGCTC
TGGTGAACAGAAACTGATTTCAGAAG
DYCMDCF#PYSFK#NPLDPNWTNS#evqlvesggglvqagdslrlscaaggDYCMDCFmgwfrqapgkerefvaaitPYSFKtyyvdsvkgrftisrddarntvylqmnslkpedtavyyc
aaNPLDPNWTNSdywgqgtqvtvss#AAGGAGATATACCATGGAAGTTCAACTGGTTGAATCTGGTGGCGGTTTAGTTCAAGCCGGTGATAGCCTTCGTCTGA
GCTGCGCCGCAGGCGGAGATTACTGCATGGATTGCTTTATGGGTTGGTTTCGCCAGGCACCTGGTAAAGAACGTGAATTTGTGGCAGCCATTACCCCCTATT
CCTTTAAGACCTACTATGTCGATTCTGTTAAAGGTCGCTTCACTATTTCACGCGATGATGCGCGTAATACCGTGTACTTACAGATGAACTCACTGAAACCTGA
GGATACCGCCGTTTATTATTGTGCGGCAAACCCTCTGGACCCCAACTGGACTAATTCTGACTATTGGGGTCAGGGCACACAAGTCACGGTCTCAAGCGGCG
GAAGCTCTGGTGAACAGAAACTGATTTCAGAAG
DYCMDCF#PYSFK#DICAGS#evqlvesggglvqagdslrlscaasgDYCMDCFmgwfrqapgkerefvaaitPYSFKtyyadsvkgrftisrddarntvylqmnslkpedtavyycaaDIC
AGSdswgqgtqvtvss#ATACCATGGAAGTTCAACTGGTTGAATCTGGTGGCGGTTTAGTTCAAGCCGGTGATAGCCTTCGTCTGAGCTGCGCCGCAAGCGGAG
ATTACTGCATGGATTGCTTTATGGGTTGGTTTCGCCAGGCACCTGGTAAAGAACGTGAATTTGTGGCAGCCATTACCCCCTATTCCTTTAAGACCTACTATGC
CGATTCTGTTAAAGGTCGCTTCACTATTTCACGCGACGATGCGCGTAATACCGTGTACTTACAGATGAACTCACTGAAACCTGAGGATACCGCCGTTTATTAT
TGTGCGGCAGACATTTGTGCTGGCAGCGACTCTTGGGGTCAGGGCACACAAGTCACGGTCTCAAGCGGCGGAAGCTCTGGTGAACAGAAACTGATTTCAG
AAG
DYCMDCF#PYSFK#NPLDPNWTNS#evqlvesggglvhagdrlrlscaaggDYCMDCFmgwfrqapgkerefvaaitPYSFKtyyadsvkgrftisrddarntvylqmnslkpedtavyyc
aaNPLDPNWTNSdywgqgtqvtvss#GAAGGAGATATACCATGGAAGTTCAACTGGTTGAATCTGGTGGCGGTTTAGTTCACGCCGGTGATCGCCTTCGTCTGA
GCTGCGCCGCAGGCGGAGATTACTGCATGGATTGCTTTATGGGTTGGTTTCGCCAGGCACCTGGTAAAGAACGTGAATTTGTGGCAGCCATTACCCCCTATT
CCTTTAAGACCTACTATGCCGATTCTGTTAAAGGTCGCTTCACTATTTCACGCGATGATGCGCGTAATACCGTGTACTTACAGATGAACTCACTGAAACCTGA
GGATACCGCCGTTTATTATTGTGCGGCAAACCCTCTGGACCCCAACTGGACTAATTCTGACTATTGGGGTCAGGGCACACAAGTCACGGTCTCAAGCGGCG
GAAGCTCTGGTGAACAGAAACTGATTTCAGAAG
DYCMDCF#PYSFK#PLNIGTATIA#evqlvesggglvkagdslrlscaasgDYCMDCFmgwfrqapgkerefvaaitPYSFKtyyadsvkgrftisrddarntvylqmnslkpedtavyycaa
PLNIGTATIAdywgqgtqvtvss#AGGAGATATACCATGGAAGTTCAACTGGTTGAATCTGGTGGCGGTTTAGTTAAAGCCGGTGATAGCCTTCGTCTGAGCTGC
GCCGCAAGCGGAGATTACTGCATGGATTGCTTTATGGGTTGGTTTCGCCAGGCACCTGGTAAAGAACGTGAATTTGTGGCAGCCATTACCCCCTATTCCTTT
AAGACCTACTATGCCGATTCTGTTAAAGGTCGCTTCACTATTTCACGCGATGATGCGCGTAATACCGTGTACTTACAGATGAACTCACTGAAACCTGAGGATA
CCGCCGTTTATTATTGTGCGGCACCCCTCAATATCGGCACCGCGACGATTGCCGACTATTGGGGTCAGGGCACACAAGTCACGGTCTCAAGCGGCGGAAGC
TCTGGTGAACAGAAACTGATTTCAGAAG
DYCMDCF#PYSFK#PVISFAADGW#evqlvesggglvqagdslrlscaasgDYCMDCFmgwfrqapgkerefvaaitPYSFKtyyadsvkgrftisrddarntvylqmnslkpedtavyyc
aaPVISFAADGWaywgqgtqvtvss#AGGAGATATACCATGGAAGTTCAACTGGTTGAATCTGGTGGCGGTTTAGTTCAAGCCGGTGATAGCCTTCGTCTGAGC
TGCGCCGCAAGCGGAGATTACTGCATGGATTGCTTTATGGGTTGGTTTCGCCAGGCACCTGGTAAAGAACGTGAATTTGTGGCAGCCATTACCCCCTATTCC
TTTAAGACCTACTATGCCGATTCTGTTAAAGGTCGCTTCACTATTTCACGCGATGATGCGCGTAATACCGTGTACTTACAGATGAACTCACTGAAACCTGAGG
ATACCGCCGTTTATTATTGTGCGGCACCCGTCATCTCCTTTGCTGCGGACGGCTGGGCCTATTGGGGTCAGGGCACACAAGTCACGGTTTCAAGCGGCGGAA
GCTCTGGTGAACAGAAACTGATTTCAGAAG
DYCMDCF#PYSFK#DSLILANSQW#evqlfesggglvqagdslrlscaasgDYCMDCFmgwfrqapgkerefvaaitPYSFKtyyadsvkgrftisrddarntvylqmnslkpedtavyyca
aDSLILANSQWdywgqgtqvtvss#ATATACCATGGAAGTTCAACTGTTTGAATCTGGTGGCGGTTTAGTTCAAGCCGGTGATAGCCTTCGTCTGAGCTGCGCCG
CAAGCGGAGATTACTGCATGGATTGCTTTATGGGTTGGTTTCGCCAGGCACCTGGTAAAGAACGTGAATTTGTGGCAGCCATTACCCCCTATTCCTTTAAGA
CCTACTATGCCGATTCTGTTAAAGGTCGCTTCACTATTTCACGCGATGATGCGCGTAATACCGTGTACTTACAGATGAACTCACTGAAACCTGAGGATACCGC
CGTTTATTATTGTGCGGCAGACAGCCTTATTTTGGCTAATTCTCAGTGGGACTATTGGGGTCAGGGCACACAAGTCACGGTCTCAAGCGGCGGAAGCTCTGG
TGAACAGAAACTGATTTCAGAAG
DYCMDCF#PYSFK#NPLDPNWTNS#evqlvdsggglvqagdslrlscaasgDYCMDCFmgwfrqapgkerefvaaitPYSFKtyyadsvkgrftisrddarntvylqmnslkpedtavyyc
aaNPLDPNWTNSdywgqgtqvtvss#GAAGGAGATATACCATGGAAGTTCAACTGGTTGACTCTGGTGGCGGTTTAGTTCAAGCCGGTGATAGCCTTCGTCTGA
GCTGCGCCGCAAGCGGAGATTACTGCATGGATTGCTTTATGGGTTGGTTTCGCCAGGCACCTGGTAAAGAACGTGAATTTGTGGCAGCCATTACCCCCTATT
CCTTTAAGACCTACTATGCCGATTCTGTTAAAGGTCGCTTCACTATTTCACGCGATGATGCGCGTAATACCGTGTACTTACAGATGAACTCACTGAAACCTGA
GGATACCGCCGTTTATTATTGTGCGGCAAACCCTCTGGACCCCAACTGGACTAATTCTGACTATTGGGGTCAGGGCACACAAGTCACGGTCTCAAGCGGCG
GAAGCTCTGGTGAACAGAAACTGATTTCAGAAG
DYCMDCF#PYSFK#NPLDPNWTNS#evqlfesggglvqagdslrlscaasgDYCMDCFmgwfrqapgkerefvaaitPYSFKtyyadsvkgrftisrddarntvylqmnslkpedtavyyc
aaNPLDPNWTNSdywgqgtqvtvss#AGATATACCATGGAAGTTCAACTGTTTGAATCTGGTGGCGGTTTAGTTCAAGCCGGTGATAGCCTTCGTCTGAGCTGC
GCCGCAAGCGGAGATTACTGCATGGATTGCTTTATGGGTTGGTTTCGCCAGGCACCTGGTAAAGAACGTGAATTTGTGGCAGCCATTACCCCCTATTCCTTT
AAGACCTACTATGCCGATTCTGTTAAAGGTCGCTTCACTATTTCACGCGATGATGCGCGTAATACCGTGTACTTACAGATGAACTCACTGAAACCTGAGGATA
CCGCCGTTTATTATTGTGCGGCAAACCCTCTGGACCCCAACTGGACTAATTCTGACTATTGGGGTCAGGGCACACAAGTCACGGTCTCAAGCGGCGGAAGCT
CTGGTGAACAGAAACTGATTTCAGAAG
DYCMDCF#PYSFK#SANILHLSVI#evqlvasggglvqagdslrlscaasgDYCMDCFmgwfrqapgkerefvaaitPYSFKtyyadsvkgrftisrddarntvylqmnslkpedtavyycaa
SANILHLSVInywgqgtqvtvss#AGAAGGAGATATACCATGGAAGTTCAACTGGTTGCATCTGGTGGCGGTTTAGTTCAAGCCGGTGATAGCCTTCGTCTGAGC
TGCGCCGCAAGCGGAGATTACTGCATGGATTGCTTTATGGGTTGGTTTCGCCAGGCACCTGGTAAAGAACGTGAATTTGTGGCAGCCATTACCCCCTATTCC
TTTAAGACCTACTATGCCGATTCTGTTAAAGGTCGCTTCACTATTTCACGCGATGATGCGCGTAATACCGTGTACTTACAGATGAACTCACTGAAACCTGAGG
ATACCGCCGTTTATTATTGTGCGGCAAGCGCGAACATTCTCCATTTGTCTGTTATCAACTATTGGGGTCAGGGCACACAAGTCACGGTCTCAAGCGGCGGAA
GCTCTGGTGAACAGAAACTGATTTCAGAAG
DYCMDCF#PYSFK#GRLRLTGSGC#evqlvesggglvqagdslrlscaasgDYCMDCFmgwfrqapgkerefvaaitPYSFKtyyadsvkgrftisrddarntvylqmnslkpedtavyyca
aGRLRLTGSGCdywgqgtqvtvss#ACCATGGAAGTTCAACTGGTTGAATCTGGTGGCGGTTTAGTTCAAGCCGGTGATAGCCTTCGTCTGAGCTGCGCCGCAA
GCGGAGATTACTGCATGGATTGCTTTATGGGTTGGTTTCGCCAGGCACCTGGTAAAGAACGTGAATTTGTGGCAGCCATTACCCCCTATTCCTTTAAGACCTA
CTATGCCGATTCTGTTAAAGGTCGCTTCACTATTTCACGCGATGATGCGCGTAATACCGTGTACTTACAGATGAACTCACTGAAACCTGAGGATACCGCCGTT
TATTATTGTGCGGCAGGTCGCCTTCGCCTCACTGGCAGTGGCTGTGACTATTGGGGTCAGGGCACACAAGTCACGGTCTCAAGCGGCGGAAGCTCTGGTGA
ACAGAAACTGATTTCAGAAG
DYCMDCF#PYSFK#VPNVTWSERA#evqlvesggglvqagdslrlscaasgDYCMDCFmgwfrqapgkerefvaaitPYSFKtyyadsvkgrftisrddarntvylqmnslkpedtavyyc
aaVPNVTWSERAdywgqgtqvtass#ACCATGGAAGTTCAACTGGTTGAATCTGGTGGCGGTTTAGTTCAAGCCGGTGATAGCCTTCGTCTGAGCTGCGCCGCA
AGCGGAGATTACTGCATGGATTGCTTTATGGGTTGGTTTCGCCAGGCACCTGGTAAAGAACGTGAATTTGTGGCAGCCATTACCCCCTATTCCTTTAAGACCT
ACTATGCCGATTCTGTTAAAGGTCGCTTCACTATTTCACGCGATGATGCGCGTAATACCGTGTACTTACAGATGAACTCACTGAAACCTGAGGATACCGCCGT
TTATTATTGTGCGGCAGTCCCCAATGTGACCTGGTCCGAGAGGGCTGACTATTGGGGTCAGGGCACACAAGTCACGGCCTCAAGCGGCGGAAGCTCTGGTG
AACAGAAACTGATTTCAGAAG
DYCMDCF#PYSFK#PLNIGTATIA#evqlvesggvlvqagdslrlscaasgDYCMDCFmgwfrqapgkerefvaaitPYSFKtyyadsvkgrftisrddarntvylqmnslkpedtavyycaa
PLNIGTATIAaywgqgtqvtvss#ACCATGGAAGTTCAACTGGTTGAATCTGGTGGCGTTTTAGTTCAAGCCGGTGATAGCCTTCGTCTGAGCTGCGCCGCAAGC
GGAGATTACTGCATGGATTGCTTTATGGGTTGGTTTCGCCAGGCACCTGGTAAAGAACGTGAATTTGTGGCAGCCATTACCCCCTATTCCTTTAAGACCTACT
ATGCCGATTCTGTTAAAGGTCGCTTCACTATTTCACGCGATGATGCGCGTAATACCGTGTACTTACAGATGAACTCACTGAAACCTGAGGATACCGCCGTTTA
TTATTGTGCGGCACCCCTCAATATCGGCACCGCGACGATTGCCGCCTATTGGGGTCAGGGCACACAAGTCACGGTCTCAAGCGGCGGAAGCTCTGGTGAAC
AGAAACTGATTTCAGAAG
DYCMDCF#PYSFK#DSLILANSQW#evqlvesggglvqagdslrlscaasgDYCMDCFmgwfrqapgkerefvaaitPYSFKtyyadsvkgrftisrddvrntvylqmnslkpedtavyyca
aDSLILANSQWdywgqgtqvtvss#GGAGATATACCATGGAAGTTCAACTGGTTGAATCTGGTGGCGGTTTAGTTCAAGCCGGTGATAGCCTTCGTCTGAGCTG
CGCCGCAAGCGGAGATTACTGCATGGATTGCTTTATGGGTTGGTTTCGCCAGGCACCTGGTAAAGAACGTGAATTTGTGGCAGCCATTACCCCCTATTCCTT
TAAGACCTACTATGCCGATTCTGTTAAAGGTCGCTTCACTATTTCACGCGATGATGTGCGTAATACCGTGTACTTACAGATGAACTCACTGAAACCTGAGGAT
ACCGCCGTTTATTATTGTGCGGCAGACAGCCTTATTTTGGCTAATTCTCAGTGGGACTATTGGGGTCAGGGCACACAAGTCACGGTCTCAAGCGGCGGAAG
CTCTGGTGAACAGAAACTGATTTCAGAAG
DYCMDCF#PYSFK#LFPPATARWE#evqlvesggglvqagdslrlscaasgDYCMDCFmgwfrqapgkerefvaaitPYSFKtyyadsvkgrftisrddarntvylqmnslkpedtavyyc
atLFPPATARWEdywgqgtqvtvss#ATACCATGGAAGTTCAACTGGTTGAATCTGGTGGCGGTTTAGTTCAAGCCGGTGATAGCCTTCGTCTGAGCTGCGCCGC
AAGCGGAGATTACTGCATGGATTGCTTTATGGGTTGGTTTCGCCAGGCACCTGGTAAAGAACGTGAATTTGTGGCAGCCATTACCCCCTATTCCTTTAAGAC
CTACTATGCCGATTCTGTTAAAGGTCGCTTCACTATTTCACGCGATGATGCGCGTAATACCGTGTACTTACAGATGAACTCACTGAAACCTGAGGATACCGCC
GTTTATTATTGTGCGACACTTTTTCCCCCGGCGACTGCTAGGTGGGAGGACTATTGGGGTCAGGGCACACAAGTCACGGTCTCAAGCGGCGGAAGCTCTGG
TGAACAGAAACTGATTTCAGAAG
DYCMDCF#PYSFK#LETTKHGCQT#evqlvesggglvqagdslrlscaasgDYCMDCFmgwfrqapgkerefvaaitPYSFKtyyadsvkgrftisrddarntvylqmnslkpedtavyyca
aLETTKHGCQTdswgqgtqvtvss#ATACCATGGAAGTTCAACTGGTTGAATCTGGTGGCGGTCTAGTTCAAGCCGGTGATAGCCTTCGTCTGAGCTGCGCCGCA
AGCGGAGATTACTGCATGGATTGCTTTATGGGTTGGTTTCGCCAGGCACCTGGTAAAGAACGTGAATTTGTGGCAGCCATTACCCCCTATTCCTTTAAGACCT
ACTATGCCGATTCTGTTAAAGGTCGCTTCACTATTTCACGCGATGATGCGCGTAATACCGTGTACTTACAGATGAACTCACTGAAACCTGAGGATACCGCCGT
TTATTATTGTGCGGCACTCGAGACTACTAAGCACGGGTGCCAGACGGACTCTTGGGGTCAGGGCACACAAGTCACGGTCTCAAGCGGCGGAAGCTCTGGT
GAACAGAAACTGATTTCAGAAG
DYCMDCF#PYSFK#NPLDPNWTNS#evqlvesggglvhagdrlrlscaasgDYCMDCFmgwfrqapgkerefvaaitPYSFKtyyadsvkgrftisrddarntvylqmnslkpedtavyyc
aaNPLDPNWTNSdywgqgtqvtvss#GAAGGAGATATACCATGGAAGTTCAACTGGTTGAATCTGGTGGCGGTTTAGTTCACGCCGGTGATCGCCTTCGTCTGA
GCTGCGCCGCAAGCGGAGATTACTGCATGGATTGCTTTATGGGTTGGTTTCGCCAGGCACCTGGTAAAGAACGTGAATTTGTGGCAGCCATTACCCCCTATT
CCTTTAAGACCTACTATGCCGATTCTGTTAAAGGTCGCTTCACTATTTCACGCGATGATGCGCGTAATACCGTGTACTTACAGATGAACTCACTGAAACCTGA
GGATACCGCCGTTTATTATTGTGCGGCAAACCCTCTGGACCCCAACTGGACTAATTCTGACTATTGGGGTCAGGGCACACAAGTCACGGTCTCAAGCGGCG
GAAGCTCTGGTGAACAGAAACTGATTTCAGAAG
DYCMDCF#PYSFK#DSLILANSQW#eiqlvesggglvqagdslrlscaasgDYCMDCFmgwfrqapgkerefvaaitPYSFKtyyadsvkgrftisrddarntvylqmnslkpedtavyyca
aDSLILANSQWdywgqgtqvtvsg#AGGAGATATACCATGGAAATTCAACTGGTTGAATCTGGTGGCGGTTTAGTTCAAGCCGGTGATAGCCTTCGTCTGAGCT
GCGCCGCAAGCGGAGATTACTGCATGGATTGCTTTATGGGTTGGTTTCGCCAGGCACCTGGTAAAGAACGTGAATTTGTGGCAGCCATTACCCCCTATTCCT
TTAAGACCTACTATGCCGATTCTGTTAAAGGTCGCTTCACTATTTCACGCGATGATGCGCGTAATACCGTGTACTTACAGATGAACTCACTGAAACCTGAGGA
TACCGCCGTTTATTATTGTGCGGCAGACAGCCTTATTTTGGCTAATTCTCAGTGGGACTATTGGGGTCAGGGCACACAAGTCACGGTCTCAGGCGGCGGAA
GCTCTGGTGAACAGAAACTGATTTCAGAAG
DYCMDCF#PYSFK#GDPMIPKLWDSGR#evqlvesggglvqagdslrlscaasgDYCMDCFmgwfrqapgkerefvaaitPYSFKtyyadsvkgrftisrddarntvylqmnslkpedta
vyycarGDPMIPKLWDSGRdywgqgtqvtvss#AGGAGATATACCATGGAAGTTCAACTGGTTGAATCTGGTGGCGGTTTAGTTCAAGCCGGTGATAGCCTTCGT
CTGAGCTGCGCCGCAAGCGGAGATTACTGCATGGATTGCTTTATGGGTTGGTTTCGCCAGGCACCTGGTAAAGAACGTGAATTTGTGGCAGCCATTACCCCC
TATTCCTTTAAGACCTACTATGCCGATTCTGTTAAAGGTCGCTTCACTATTTCACGCGATGATGCGCGTAATACCGTGTACTTACAGATGAACTCACTGAAACC
TGAGGATACCGCCGTTTATTATTGTGCGCGTGGGGACCCGATGATCCCGAAGTTGTGGGATTCGGGGCGTGACTATTGGGGTCAGGGCACACAAGTCACG
GTCTCAAGCGGCGGAAGCTCTGGTGAACAGAAACTGATTTCAGAAG
DYCMDCF#PYSFK#QVSLVTHGDL#evqlvdsggglvhagdrlrlscaasgDYCMDCFmgwfrqapgkerefvaaitPYSFKtyyadsvkgrftisrddarntvylqmnslkpedtavyyc
aaQVSLVTHGDLdswgqgtqvtvss#GAAGGAGATATACCATGGAAGTTCAACTGGTTGACTCTGGTGGCGGTTTAGTTCACGCCGGTGATCGCCTTCGTCTGA
GCTGCGCCGCAAGCGGAGATTACTGCATGGATTGCTTTATGGGTTGGTTTCGCCAGGCACCTGGTAAAGAACGTGAATTTGTGGCAGCCATTACCCCCTATT
CCTTTAAGACCTACTATGCCGATTCTGTTAAAGGTCGCTTCACTATTTCACGCGATGATGCGCGTAATACCGTGTACTTACAGATGAACTCACTGAAACCTGA
GGATACCGCCGTTTATTATTGTGCGGCACAGGTCTCCCTTGTTACCCATGGGGATCTGGACTCTTGGGGTCAGGGCACACAAGTCACGGTCTCAAGCGGCG
GAAGCTCTGGTGAACAGAAACTGATTTCAGAAG
DYCMDCF#PYSFK#NPLDPNWTNS#evqlvesggglvqvgdslrlscaasgDYCMDCFmgwfrqapgkerefvaaitPYSFKtyyadsvkgrftisrddarntvylqmnslkpedtavyyc
aaNPLDPNWTNSdywgqgtqvtvss#ATACCATGGAAGTTCAACTGGTTGAATCTGGTGGCGGTTTAGTTCAAGTCGGTGATAGCCTTCGTCTGAGCTGCGCCG
CAAGCGGAGATTACTGCATGGATTGCTTTATGGGTTGGTTTCGCCAGGCACCTGGTAAAGAACGTGAATTTGTGGCAGCCATTACCCCCTATTCCTTTAAGA
CCTACTATGCCGATTCTGTTAAAGGTCGCTTCACTATTTCACGCGATGATGCGCGTAATACCGTGTACTTACAGATGAACTCACTGAAACCTGAGGATACCGC
CGTTTATTATTGTGCGGCAAACCCTCTGGACCCCAACTGGACTAATTCTGACTATTGGGGTCAGGGCACACAAGTCACGGTCTCAAGCGGCGGAAGCTCTGG
TGAACAGAAACTGATTTCAGAAG
DYCMDCF#PYSFK#NPLDPNWTNS#evqlvesggglvqagdslrlscaaggDYCMDCFmgwfrqapgkerefvaaitPYSFKtyyadsvkgrftisrddarntvylqmnslkpedtavyy
caaNPLDPNWTNSdywgqgsqvtvss#ATACCATGGAAGTTCAACTGGTTGAATCTGGTGGCGGTTTAGTTCAAGCCGGTGATAGCCTTCGTCTGAGCTGCGCC
GCAGGCGGAGATTACTGCATGGATTGCTTTATGGGTTGGTTTCGCCAGGCACCTGGTAAAGAACGTGAATTTGTGGCAGCCATTACCCCCTATTCCTTTAAG
ACCTACTATGCCGATTCTGTTAAAGGTCGCTTCACTATTTCACGCGATGATGCGCGTAATACCGTGTACTTACAGATGAACTCACTGAAACCTGAGGATACCG
CCGTTTATTATTGTGCGGCAAACCCTCTGGACCCCAACTGGACTAATTCTGACTATTGGGGTCAGGGCTCACAAGTCACGGTCTCAAGCGGCGGAAGCTCTG
GTGAACAGAAACTGATTTCAGAAG
DYCMDCF#PYSFK#SMYLNNISIS#evrlvesggglvqagdslrlscaasgDYCMDCFmgwfrqapgkerefvaaitPYSFKtyyadsvkgrftisrddarntvylqmnslkpedtavyycaa
SMYLNNISISdywgqgtqvtvss#ACCATGGAAGTTCGACTGGTTGAATCTGGTGGCGGTTTAGTTCAAGCCGGTGATAGCCTTCGTCTGAGCTGCGCCGCAAGC
GGAGATTACTGCATGGATTGCTTTATGGGTTGGTTTCGCCAGGCACCTGGTAAAGAACGTGAATTTGTGGCAGCCATTACCCCCTATTCCTTTAAGACCTACT
ATGCCGATTCTGTTAAAGGTCGCTTCACTATTTCACGCGATGATGCGCGTAATACCGTGTACTTACAGATGAACTCACTGAAACCTGAGGATACCGCCGTTTA
TTATTGTGCGGCATCTATGTACCTGAACAATATCAGCATTAGTGACTATTGGGGTCAGGGCACACAAGTCACGGTCTCAAGCGGCGGAAGCTCTGGTGAAC
AGAAACTGATTTCAGAAGCCAA
DYCMDCF#PYSFK#PLNIGTATIA#evqlvesggglvqagdslrlscaasgDYCMDCFmgwfrqapgkerefvaaitPYSFKtyyadsvkgrftisrddarntvylqmnslkpedtavyycaa
PLNIGTATIAdywgqgtqgtvss#ATACCATGGAAGTTCAACTGGTTGAATCTGGTGGCGGTTTAGTTCAAGCCGGTGATAGCCTTCGTCTGAGCTGCGCCGCAA
GCGGAGATTACTGCATGGATTGCTTTATGGGTTGGTTTCGCCAGGCACCTGGTAAAGAACGTGAATTTGTGGCAGCCATTACCCCCTATTCCTTTAAGACCTA
CTATGCCGATTCTGTTAAAGGTCGCTTCACTATTTCACGCGATGATGCGCGTAATACCGTGTACTTACAGATGAACTCACTGAAACCTGAGGATACCGCCGTT
TATTATTGTGCGGCACCCCTCAATATCGGCACCGCGACGATTGCCGACTATTGGGGTCAGGGCACACAAGGCACGGTCTCAAGCGGCGGAAGCTCTGGTGA
ACAGAAACTGATTTCAGAAGCCAA
DYCMDCF#PYSFK#NPLDPNWTNS#evqlvesggglvqagdslrlscaasgDYCMDCFmgwfrqapgkerefvaaitPYSFKtyyddsvkgrftisrddarntvylqmnslkpedtavyyc
aaNPLDPNWTNSdywgqgtqgsvss#AGGAGATATACCATGGAAGTTCAACTGGTTGAATCTGGTGGCGGTTTAGTTCAAGCCGGTGATAGCCTTCGTCTGAG
CTGCGCCGCAAGCGGAGATTACTGCATGGATTGCTTTATGGGTTGGTTTCGCCAGGCACCTGGTAAAGAACGTGAATTTGTGGCAGCCATTACCCCCTATTC
CTTTAAGACCTACTATGACGATTCTGTTAAAGGTCGCTTCACTATTTCACGCGATGATGCGCGTAATACCGTGTACTTACAGATGAACTCACTGAAACCTGAG
GATACCGCCGTTTATTATTGTGCGGCAAACCCTCTGGACCCCAACTGGACTAATTCTGACTATTGGGGTCAGGGCACACAAGGCTCGGTCTCAAGCGGCGG
AAGCTCTGGTGAACAGAAACTGATTTCAGAAGCCAA
DYCMDCF#PYSFK#QVSLVTHGDL#evqlvesggglvqagdslrlscaasgDYCMDCFmgwfrqapgkerefvaaitPYSFKtyyadsvkgrftisrddarntvylqmnslkpedtavyyc
aaQVSLVTHGDLdywgqgtqgtvss#AGGAGATATACCATGGAAGTTCAACTGGTTGAATCTGGTGGCGGTTTAGTTCAAGCCGGTGATAGCCTTCGTCTGAGC
TGCGCCGCAAGCGGAGATTACTGCATGGATTGCTTTATGGGTTGGTTTCGCCAGGCACCTGGTAAAGAACGTGAATTTGTGGCAGCCATTACCCCCTATTCC
TTTAAGACCTACTATGCCGATTCTGTTAAAGGTCGCTTCACTATTTCACGCGATGATGCGCGTAATACCGTGTACTTACAGATGAACTCACTGAAACCTGAGG
ATACCGCCGTTTATTATTGTGCGGCACAGGTCTCCCTTGTTACCCATGGGGATCTGGACTATTGGGGTCAGGGCACACAAGGCACGGTCTCAAGCGGCGGA
AGCTCTGGTGAACAGAAACTGATTTCAGAAGCCAA
DYCMDCF#PYSFK#NPLDPNWTNS#evqlvesggglvqagdslrlscaaggDYCMDCFmgwfrqapgkerefvaaitPYSFKtyyadsvkgrftisrddarntvylqmnslkpedtavyy
caaNPLDPNWTNSdywgqgtqgtvss#GGAGATATACCATGGAAGTTCAACTGGTTGAATCTGGTGGCGGTTTAGTTCAAGCCGGTGATAGCCTTCGTCTGAGC
TGCGCCGCAGGCGGAGATTACTGCATGGATTGCTTTATGGGTTGGTTTCGCCAGGCACCTGGTAAAGAACGTGAATTTGTGGCAGCCATTACCCCCTATTCC
TTTAAGACCTACTATGCCGATTCTGTTAAAGGTCGCTTCACTATTTCACGCGATGATGCGCGTAATACCGTGTACTTACAGATGAACTCACTGAAACCTGAGG
ATACCGCCGTTTATTATTGTGCGGCAAACCCTCTGGACCCCAACTGGACTAATTCTGACTATTGGGGTCAGGGCACACAAGGCACGGTCTCAAGCGGCGGA
AGCTCTGGTGAACAGAAACTGATTTCAGAAGCCAA
DYCMDCF#PYSFK#PLNIGTATIA#evqlvesggglvqagdslrlscaasgDYCMDCFmgwfrqapgkerefvaaitPYSFKtyyvdsvkgrftisrddarntvylqmnslkpedtavyycaa
PLNIGTATIAdywgqgtqvtvss#AGATATACCATGGAAGTTCAACTGGTTGAATCTGGTGGCGGTTTAGTTCAAGCCGGTGATAGCCTTCGTCTGAGCTGCGCC
GCAAGCGGAGATTACTGCATGGATTGCTTTATGGGTTGGTTTCGCCAGGCACCTGGTAAAGAACGTGAATTTGTGGCAGCCATTACCCCCTATTCCTTTAAG
ACCTACTATGTCGATTCTGTTAAAGGTCGCTTCACTATTTCACGCGATGATGCGCGTAATACCGTGTACTTACAGATGAACTCACTGAAACCTGAGGATACCG
CCGTTTATTATTGTGCGGCACCCCTCAATATCGGCACCGCGACGATTGCCGACTATTGGGGTCAGGGCACACAAGTCACGGTCTCAAGCGGCGGAAGCTCT
GGTGAACAGAAACTGATTTCAGAAGCCAA
DYCMDCF#PYSFK#LFPPATARWE#evqlvesggglvqagdslrlscatsgDYCMDCFmgwfrqapgkerefvaaitPYSFKtyyadsvkgrftisrddarntvylqmnslkpedtavyyca
tLFPPATARWEdywgqgtqvtvss#AGGAGATATACCATGGAAGTTCAACTGGTTGAATCTGGTGGCGGTTTAGTTCAAGCCGGTGATAGCCTTCGTCTGAGCT
GCGCCACAAGCGGAGATTACTGCATGGATTGCTTTATGGGTTGGTTTCGCCAGGCACCTGGTAAAGAACGTGAATTTGTGGCAGCCATTACCCCCTATTCCT
TTAAGACCTACTATGCCGATTCTGTTAAAGGTCGCTTCACTATTTCACGCGATGATGCGCGTAATACCGTGTACTTACAGATGAACTCACTGAAACCTGAGGA
TACCGCCGTTTATTATTGTGCGACACTTTTTCCCCCGGCGACTGCTAGGTGGGAGGACTATTGGGGTCAGGGCACACAAGTCACGGTCTCAAGCGGCGGAA
GCTCTGGTGAACAGAAACTGATTTCAGAAGCCAA
DYCMDCF#PYSFK#NPLDPNWTNS#evqlvesggglvhagdslrlscaasgDYCMDCFmgwfrqapgkerefvaaitPYSFKtyyadsvkgrftisrddarntvylqmnslkpedtavyyc
aaNPLDPNWTNSdywgqgtqgtvss#AGATATACCATGGAAGTTCAACTGGTTGAATCTGGTGGCGGTTTAGTTCACGCCGGTGATAGCCTTCGTCTGAGCTGC
GCCGCAAGCGGAGATTACTGCATGGATTGCTTTATGGGTTGGTTTCGCCAGGCACCTGGTAAAGAACGTGAATTTGTGGCAGCCATTACCCCCTATTCCTTT
AAGACCTACTATGCCGATTCTGTTAAAGGTCGCTTCACTATTTCACGCGATGATGCGCGTAATACCGTGTACTTACAGATGAACTCACTGAAACCTGAGGATA
CCGCCGTTTATTATTGTGCGGCAAACCCTCTGGACCCCAACTGGACTAATTCTGACTATTGGGGGCAGGGCACACAAGGCACGGTCTCAAGCGGCGGAAGC
TCTGGTGAACAGAAACTGATTTCAGAAGCCAA
DYCMDCF#PYSFK#QVSLVTHGDL#evqlvesggglvqagdslrlscaasgDYCMDCFmgwfrqapgkerefaaaitPYSFKtyyadsvkgrftisrddarntvylqmnslkpedtavyyc
aaQVSLVTHGDLdswgqgtqvtvss#ACCATGGAAGTTCAACTGGTTGAATCTGGTGGCGGTTTAGTTCAAGCCGGTGATAGCCTTCGTCTGAGCTGCGCCGCA
AGCGGAGATTACTGCATGGATTGCTTTATGGGTTGGTTTCGCCAGGCACCTGGTAAAGAACGTGAATTTGCGGCAGCCATTACCCCCTATTCCTTTAAGACC
TACTATGCCGATTCTGTTAAAGGTCGCTTCACTATTTCACGCGATGATGCGCGTAATACCGTGTACTTACAGATGAACTCACTGAAACCTGAGGATACCGCCG
TTTATTATTGTGCGGCTCAGGTCTCCCTTGTTACCCATGGGGATCTGGACTCTTGGGGTCAGGGCACACAAGTCACGGTCTCAAGCGGCGGAAGCTCTGGTG
AACAGAAACTGATTTCAGAAGCCAA
DYCMDCF#PYSFK#NPLDPNWTNS#evqlvdsggglvqagdrlrlscaasgDYCMDCFmgwfrqapgkerefvaaitPYSFKtyyadsvkgrftisrddarntvylqmnslkpedtavyyc
aaNPLDPNWTNSdywgqgtqvtvss#GAAGGAGATATACCATGGAAGTTCAACTGGTTGACTCTGGTGGCGGTTTAGTTCAAGCCGGTGATCGCCTTCGTCTGA
GCTGCGCCGCAAGCGGAGATTACTGCATGGATTGCTTTATGGGTTGGTTTCGCCAGGCACCTGGTAAAGAACGTGAATTTGTGGCAGCCATTACCCCCTATT
CCTTTAAGACCTACTATGCCGATTCTGTTAAAGGTCGCTTCACTATTTCACGCGATGATGCGCGTAATACCGTGTACTTACAGATGAACTCACTGAAACCTGA
GGATACCGCCGTTTATTATTGTGCGGCAAACCCTCTGGACCCCAACTGGACTAATTCTGACTATTGGGGTCAGGGCACACAAGTCACGGTCTCAAGCGGCG
GAAGCTCTGGTGAACAGAAACTGATTTCAGAAGCCAA
DSCMDCF#PYSFK#DSLILANSQW#evqlvesggglvqagdslrlscaasgDSCMDCFmgwfrqapgkerefvaaitPYSFKtyyadsvkgrftisrddarntvylqmnslkpedtavyyca
aDSLILANSQWdywgqgtqvtvss#ATACCATGGAAGTTCAACTGGTTGAATCTGGTGGCGGTTTAGTTCAAGCCGGTGATAGCCTTCGTCTGAGCTGCGCCGC
AAGCGGAGATTCCTGCATGGATTGCTTTATGGGTTGGTTTCGCCAGGCACCTGGTAAAGAACGTGAATTTGTGGCAGCCATTACCCCCTATTCCTTTAAGAC
CTACTATGCCGATTCTGTTAAAGGTCGCTTCACTATTTCACGCGATGATGCGCGTAATACCGTGTACTTACAGATGAACTCACTGAAACCTGAGGATACCGCC
GTTTATTATTGTGCGGCAGACAGCCTTATTTTGGCTAATTCTCAGTGGGACTATTGGGGTCAGGGCACACAAGTCACGGTCTCAAGCGGCGGAAGCTCTGGT
GAACAGAAACTGATTTCAGAAGCCAA
DYCMDCF#PYSFK#LETTKHGCQT#evqlvesggglvqagdslrlscaasgDYCMDCFmgwfrqapgkerefvaaitPYSFKtyyadsvkgrftisrddarntvylqmnslkpedtavyyca
aLETTKHGCQTdywgqgtqvtvss#AAGGAGATATACCATGGAAGTTCAACTGGTTGAATCTGGTGGCGGTTTAGTTCAAGCCGGTGATAGCCTTCGTCTGAGC
TGCGCCGCAAGCGGAGATTACTGCATGGATTGCTTTATGGGTTGGTTTCGCCAGGCACCTGGTAAAGAACGTGAATTTGTGGCAGCCATTACCCCCTATTCC
TTTAAGACCTACTATGCCGATTCTGTTAAAGGTCGCTTCACTATTTCACGCGATGATGCGCGTAATACCGTGTACTTACAGATGAACTCACTGAAACCTGAGG
ATACCGCCGTTTATTATTGTGCGGCACTCGAGACTACTAAGCACGGGTGCCAGACGGACTATTGGGGTCAGGGCACACAAGTCACGGTCTCAAGCGGCGGA
AGCTCTGGTGAACAGAAACTGATTTCAGAAGCCAA
DYCMDCF#PYSFK#TASDTSDYGM#evqlvesggglvqagdslrlscaasgDYCMDCFmgwfrqapgkerefvaaitPYSFKtyyadsvkgrftisrddarntvylqmnslkpedtavyyc
atTASDTSDYGMdywgqgtqvtvss#GAAGGAGATATACCATGGAAGTTCAACTGGTTGAATCTGGTGGCGGTTTAGTTCAAGCCGGTGATAGCCTTCGTCTGA
GCTGCGCCGCAAGCGGAGATTACTGCATGGATTGCTTTATGGGTTGGTTTCGCCAGGCACCTGGTAAAGAACGTGAATTTGTGGCAGCCATTACCCCCTATT
CCTTTAAGACCTACTATGCCGATTCTGTTAAAGGTCGCTTCACTATTTCACGCGATGATGCGCGTAATACCGTGTACTTACAGATGAACTCACTGAAACCTGA
GGATACCGCCGTTTATTATTGTGCGACAACCGCCTCCGATACTAGTGATTACGGTATGGACTATTGGGGTCAGGGCACACAAGTCACGGTCTCAAGCGGCG
GAAGCTCTGGTGAACAGAAACTGATTTCAGAAGCCAA
DYCMDCF#PYSFK#PLNIGTATIA#evqlvesggglvqagdslrlscaasgDYCMDCFmgwfrrapgkerefvaaitPYSFKtyyadsvkgrftisrddarntvylqmnslkpedtavyycaa
PLNIGTATIAdywgqgtqvtvss#ATATACCATGGAAGTTCAACTGGTTGAATCTGGTGGCGGTTTAGTTCAAGCCGGTGATAGCCTTCGTCTGAGCTGCGCCGC
AAGCGGAGATTACTGCATGGATTGCTTTATGGGTTGGTTTCGCCGGGCACCTGGTAAAGAACGTGAATTTGTGGCAGCCATTACCCCCTATTCCTTTAAGAC
CTACTATGCCGATTCTGTTAAAGGTCGCTTCACTATTTCACGCGATGATGCGCGTAATACCGTGTACTTACAGATGAACTCACTGAAACCTGAGGATACCGCC
GTTTATTATTGTGCGGCACCCCTCAATATCGGCACCGCGACGATTGCCGACTATTGGGGTCAGGGCACACAAGTCACGGTCTCAAGCGGCGGAAGCTCTGG
TGAACAGAAACTGATTTCAGAAGCCAA
DYCMDCF#PYSFK#PLNIGTATIA#evqlvesggglvqagdslrlscaasgDYCMDCFmgwfrqapgkerefvaaitPYSFKtyyadsvkgrftisrddarntvylqmnslkpedtavyycaa
PLNIGTATIAdywgqgtqvmvss#GAAGGAGATATACCATGGAAGTTCAACTGGTTGAATCTGGTGGCGGTTTAGTTCAAGCCGGTGATAGCCTTCGTCTGAGC
TGCGCCGCAAGCGGAGATTACTGCATGGATTGCTTTATGGGTTGGTTTCGCCAGGCACCTGGTAAAGAACGTGAATTTGTGGCAGCCATTACCCCCTATTCC
TTTAAGACCTACTATGCCGATTCTGTTAAAGGTCGCTTCACTATTTCACGCGATGATGCGCGTAATACCGTGTACTTACAGATGAACTCACTGAAACCTGAGG
ATACCGCCGTTTATTATTGTGCGGCACCCCTCAATATCGGCACCGCGACGATTGCCGACTATTGGGGTCAGGGCACACAAGTCATGGTCTCAAGCGGCGGA
AGCTCTGGTGAACAGAAACTGATTTCAGAAGCCAA
DYCMDCF#PYSFK#DSLILANSQW#evqlvesggglvqagdslrlscaasgDYCMDCFmgwfrqapgkerefvaaitPYSFKtyyadsvkgrftisrddarntvylqmnslkpedtavyyca
aDSLILANSQWdywgqgtqvtfss#ATACCATGGAAGTTCAACTGGTTGAATCTGGTGGCGGTTTAGTTCAAGCCGGTGATAGCCTTCGTCTGAGCTGCGCCGCA
AGCGGAGATTACTGCATGGATTGCTTTATGGGTTGGTTTCGCCAGGCACCTGGTAAAGAACGTGAATTTGTGGCAGCCATTACCCCCTATTCCTTTAAGACCT
ACTATGCCGATTCTGTTAAAGGTCGCTTCACTATTTCACGCGATGATGCGCGTAATACCGTGTACTTACAGATGAACTCACTGAAACCTGAGGATACCGCCGT
TTATTATTGTGCGGCAGACAGCCTTATTTTGGCTAATTCTCAGTGGGACTATTGGGGTCAGGGCACACAAGTCACGTTCTCAAGCGGCGGAAGCTCTGGTGA
ACAGAAACTGATTTCAGAAGCCAA
DYCMDCF#PYSFK#LETTKHGCQT#evqlvesggglvqagdslrlscaasgDYCMDCFmgwfrqapgkerefvaaitPYSFKtyyadsvkgrftisrddarntvylqmnslkpedtavyyca
aLETTKHGCQTdswgqgtqvtfss#ATATACCATGGAAGTTCAACTGGTTGAATCTGGTGGCGGTTTAGTTCAAGCCGGTGATAGCCTTCGTCTGAGCTGCGCCG
CAAGCGGAGATTACTGCATGGATTGCTTTATGGGTTGGTTTCGCCAGGCACCTGGTAAAGAACGTGAATTTGTGGCAGCCATTACCCCCTATTCCTTTAAGA
CCTACTATGCCGATTCTGTTAAAGGTCGCTTCACTATTTCACGCGATGATGCGCGTAATACCGTGTACTTACAGATGAACTCACTGAAACCTGAGGATACCGC
CGTTTATTATTGTGCGGCACTCGAGACTACTAAGCACGGGTGCCAGACGGACTCTTGGGGTCAGGGCACACAAGTCACGTTCTCAAGCGGCGGAAGCTCTG
GTGAACAGAAACTGATTTCAGAAGCCAA
DYCMDCF#PYSFK#DSLILANSQW#evqlvesggglvqagdslrlscaasgDYCMDCFmgwfrqapgkerefvaaitPYSFKtyyadsvkgrftisrddarntvylqmnslkpedtavyyca
tDSLILANSQWdywgqgtqvtvss#AAGGAGATATACCATGGAAGTTCAACTGGTTGAATCTGGTGGCGGTTTAGTTCAAGCCGGTGATAGCCTTCGTCTGAGC
TGCGCCGCAAGCGGAGATTACTGCATGGATTGCTTTATGGGTTGGTTTCGCCAGGCACCTGGTAAAGAACGTGAATTTGTGGCAGCCATTACCCCCTATTCC
TTTAAGACCTACTATGCCGATTCTGTTAAAGGTCGCTTCACTATTTCACGCGATGATGCGCGTAATACCGTGTACTTACAGATGAACTCACTGAAACCTGAGG
ATACCGCCGTTTATTATTGTGCGACAGACAGCCTTATTTTGGCTAATTCTCAGTGGGACTATTGGGGTCAGGGCACACAAGTCACGGTCTCAAGCGGCGGAA
GCTCTGGTGAACAGAAACTGATTTCAGAAGCCAA
DYCMDCF#PYSFK#DSLILANSQW#evqlvdsggglvqagdrlrlscaasgDYCMDCFmgwfrqapgkerefvaaitPYSFKtyyadsvkgrftisrddarntvylqmnslkpedtavyyca
aDSLILANSQWdywgqgtqvtvss#GAAGGAGATATACCATGGAAGTTCAACTGGTTGACTCTGGTGGCGGTTTAGTTCAAGCCGGTGATCGCCTTCGTCTGAG
CTGCGCCGCAAGCGGAGATTACTGCATGGATTGCTTTATGGGTTGGTTTCGCCAGGCACCTGGTAAAGAACGTGAATTTGTGGCAGCCATTACCCCCTATTC
CTTTAAGACCTACTATGCCGATTCTGTTAAAGGTCGCTTCACTATTTCACGCGATGATGCGCGTAATACCGTGTACTTACAGATGAACTCACTGAAACCTGAG
GATACCGCCGTTTATTATTGTGCGGCAGACAGCCTTATTTTGGCTAATTCTCAGTGGGACTATTGGGGTCAGGGCACACAAGTCACGGTCTCAAGCGGCGGA
AGCTCTGGTGAACAGAAACTGATTTCAGAAGCCAA
DYCMDCF#PYSFK#PLNIGTATIA#evqlvesggglvqagdslrlscaasgDYCMDCFmgwfrqapgkerefvaaitPYSFKtyyadsvkgrftisrddarntvylqmnslkpedtavyycaa
PLNIGTATIAdywgqgtqvtfss#AAGGAGATATACCATGGAAGTTCAACTGGTTGAATCTGGTGGCGGTTTAGTTCAAGCCGGTGATAGCCTTCGTCTGAGCTG
TGCCGCAAGCGGAGATTACTGCATGGATTGCTTTATGGGTTGGTTTCGCCAGGCACCTGGTAAAGAACGTGAATTTGTGGCAGCCATTACCCCCTATTCCTTT
AAGACCTACTATGCCGATTCCGTTAAAGGTCGCTTCACTATTTCACGCGATGATGCGCGTAATACCGTGTACTTACAGATGAACTCACTGAAACCTGAGGAT
ACCGCCGTTTATTATTGTGCGGCACCCCTCAATATCGGCACCGCGACGATTGCCGACTATTGGGGTCAGGGCACACAAGTCACGTTCTCAAGCGGCGGAAG
CTCTGGTGAACAGAAACTGATTTCAGAAGCCAA
DYCMDCF#PYSFK#WPSLPTGGTP#evqlvesggglvqagdslrlscaasgDYCMDCFmgwfrqapgkehefvaaitPYSFKtyyadsvkgrftisrddarntvylqmnslkpedtavyyc
atWPSLPTGGTPdywgqgtqvtvss#ATATACCATGGAAGTTCAACTGGTTGAATCTGGTGGCGGTTTAGTTCAAGCCGGTGATAGCCTTCGTCTGAGCTGCGCC
GCAAGCGGAGATTACTGCATGGATTGCTTTATGGGTTGGTTTCGCCAGGCACCTGGTAAAGAACATGAATTTGTGGCAGCCATTACCCCCTATTCCTTTAAG
ACCTACTATGCCGATTCTGTTAAAGGTCGCTTCACTATTTCACGCGATGATGCGCGTAATACCGTGTACTTACAGATGAACTCACTGAAACCTGAGGATACCG
CCGTTTATTATTGTGCGACATGGCCGTCCCTGCCTACGGGCGGTACCCCCGACTATTGGGGTCAGGGCACACAAGTCACGGTCTCAAGCGGCGGAAGCTCT
GGTGAACAGAAACTGATTTCAGAAGCCAA
DYCMDCF#PYSFK#LLPLDGFETS#evqlvesggglvqagdslrlscaasgDYCMDCFmgwfrqapgkerefvaaitPYSFKtyyadcvkgrftisrddarntvylqmnslkpedtavyycaa
LLPLDGFETSdywgqgtqvtvss#ACCATGGAAGTTCAACTGGTTGAATCTGGTGGCGGTTTAGTTCAAGCCGGTGATAGCCTTCGTCTGAGCTGCGCCGCAAGC
GGAGATTACTGCATGGATTGCTTTATGGGTTGGTTTCGCCAGGCACCTGGTAAAGAACGTGAATTTGTGGCAGCCATTACCCCCTATTCCTTTAAGACCTACT
ATGCCGATTGTGTTAAAGGTCGCTTCACTATTTCACGCGATGATGCGCGTAATACCGTGTACTTACAGATGAACTCACTGAAACCTGAGGATACCGCCGTTTA
TTATTGTGCGGCACTTCTCCCCCTGGATGGTTTTGAGACTTCGGACTATTGGGGTCAGGGCACACAAGTCACGGTCTCAAGCGGCGGAAGCTCTGGTGAAC
AGAAACTGATTTCAGAAGCCAA
DYCMDCF#PYSFK#SIQTLIGSSSCWV#evqlvesggglvqagdslrlscaasgDYCMDCFmgwfrqapgkerefvaaitPYSFKtyyadsvkgrftisrddarntvylqmnslkpedtavy
ycnaSIQTLIGSSSCWVdywgqgtqvtvss#AGATATACCATGGAAGTTCAACTGGTTGAATCTGGTGGCGGTTTAGTTCAAGCCGGTGATAGCCTTCGTCTGAGC
TGCGCCGCAAGCGGAGATTACTGCATGGATTGCTTTATGGGTTGGTTTCGCCAGGCACCTGGTAAAGAACGTGAATTTGTGGCAGCCATTACCCCCTATTCC
TTTAAGACCTACTATGCCGATTCTGTTAAAGGTCGCTTCACTATTTCACGCGATGATGCGCGTAATACCGTGTACTTACAGATGAACTCACTGAAACCTGAGG
ATACCGCCGTTTATTATTGTAATGCAAGCATCCAGACCCTGATTGGCAGTTCGTCTTGCTGGGTGGACTATTGGGGTCAGGGCACACAAGTCACGGTCTCAA
GCGGCGGAAGCTCTGGTGAACAGAAACTGATTTCAGAAGCCAA
DYCMDCF#PYSFK#PLNIGTATIA#evqlvesggglvqdgdslrlscaasgDYCMDCFmgwfrqapgkerefvaaitPYSFKtyyadsvkgrftisrddarntvylqmnslkpedtavyycaa
PLNIGTATIAdywgqgtqvtvss#ATATACCATGGAAGTTCAACTGGTTGAATCTGGTGGCGGTTTAGTTCAAGACGGTGATAGCCTTCGTCTGAGCTGCGCCGC
AAGCGGAGATTACTGCATGGATTGCTTTATGGGTTGGTTTCGCCAGGCACCTGGTAAAGAACGTGAATTTGTGGCAGCCATTACCCCCTATTCCTTTAAGAC
CTACTATGCCGATTCTGTTAAAGGTCGCTTCACTATTTCACGCGATGATGCGCGTAATACCGTGTACTTACAGATGAACTCACTGAAACCTGAGGATACCGCC
GTTTATTATTGTGCGGCACCCCTCAATATCGGCACCGCGACGATTGCCGACTATTGGGGTCAGGGCACACAAGTCACGGTCTCAAGCGGCGGAAGCTCTGG
TGAACAGAAACTGATTTCAGAAGCCAA
DYCMDCF#PYSFK#NPLDPNWTNS#evqlvesggglvqagdslrlscaasgDYCMDCFmgwfrqapgkerefveaitPYSFKtyytdsvkgrftisrddarntvylqmnslkpedtavyyc
aaNPLDPNWTNSdywgqgtqvtvss#AAGGAGATATACCATGGAAGTTCAACTGGTTGAATCTGGTGGCGGTTTAGTTCAAGCCGGTGATAGCCTTCGTCTGA
GCTGCGCCGCAAGCGGAGATTACTGCATGGATTGCTTTATGGGTTGGTTTCGCCAGGCACCTGGTAAAGAACGTGAATTTGTGGAAGCCATTACCCCCTATT
CCTTTAAGACCTACTATACCGATTCTGTTAAAGGTCGCTTCACTATTTCACGCGATGATGCGCGTAATACCGTGTACTTACAGATGAACTCACTGAAACCTGA
GGATACCGCCGTTTATTATTGTGCGGCAAACCCTCTGGACCCCAACTGGACTAATTCTGACTATTGGGGTCAGGGCACACAAGTCACGGTCTCAAGCGGCG
GAAGCTCTGGTGAAAAGAAACTGATTTCAGAAGCCAA
DYCMDCF#ASYRY#LTSPLSDSS#evqlvesggglvqagdslrlscaasgDYCMDCFmgwfrqapgkerefvaaitASYRYtdyadsvrgrfsisadsakntvylqmnslkpedtavyycaa
LTSPLSDSSdywgqgtqvtvss#ATACCATGGAAGTTCAACTGGTTGAATCTGGTGGCGGTTTAGTTCAAGCCGGTGATAGCCTTCGTCTGAGCTGCGCCGCAAG
CGGAGATTACTGCATGGATTGCTTTATGGGTTGGTTTCGCCAGGCACCTGGTAAAGAACGTGAATTTGTGGCAGCCATTACCGCGTCTTACCGTTACACCGA
CTATGCCGATTCTGTTCGTGGTCGCTTCAGCATTTCAGCAGATTCTGCGAAGAATACCGTGTACTTACAGATGAACTCACTGAAACCTGAGGATACCGCCGTT
TATTATTGTGCGGCATTGACGTCTCCGCTTTCGGATTCGTCCGACTATTGGGGTCAGGGCACACAAGTCACGGTCTCAAGCGGCGGAAGCTCTGGTGAACA
GAAACTGATTTCAGAAGCCAA
DYCMDCF#PYSFK#QVSLVTHGDL#evqlvesggglvqagdslrlscaasgDYCMDCFmgwfrqapgkerefvaaitPYSFKtyyadsvkgrftisrddarntvylqmnslkpedtavyyc
aaQVSLVTHGDLdywgqgtqvtvss#ACCATGGAAGTTCAACTGGTTGAATCTGGTGGCGGTTTAGTTCAAGCCGGTGATAGCCTTCGTCTGAGCTGCGCCGCA
AGCGGAGATTACTGCATGGATTGCTTTATGGGTTGGTTTCGCCAGGCACCTGGTAAAGAACGTGAATTTGTGGCAGCCATTACCCCCTATTCCTTTAAGACCT
ACTATGCCGATTCTGTTAAAGGTCGCTTCACTATTTCACGCGATGATGCGCGTAATACCGTGTACTTACAGATGAACTCACTGAAACCTGAGGATACCGCCGT
TTATTATTGTGCGGCACAGGTCTCCCTTGTTACCCATGGGGATCTGGACTATTGGGGTCAGGGCACACAAGTCACGGTCTCAAGCGGCGGAAGCTCTGGTG
AACAGAAACTGATTTCAGAAGCCAA
DYCMDCF#PYSFK#NPLDPNWTNS#evqlvesggglvqagdslrlscaasgDYCMDCFmgwfrqapgkerefvsaitPYSFKtyyadsvkgrftisrddarntvylqmnslkpedtavyyc
aaNPLDPNWTNSdywgqgtqvtvss#ACCATGGAAGTTCAACTGGTTGAATCTGGTGGCGGTTTAGTTCAAGCCGGTGATAGCCTTCGTCTGAGCTGCGCCGCA
AGCGGAGATTACTGCATGGATTGCTTTATGGGTTGGTTTCGCCAGGCACCTGGTAAAGAACGTGAATTTGTGTCAGCCATTACCCCCTATTCCTTTAAGACCT
ACTATGCCGATTCTGTTAAAGGTCGCTTCACTATTTCACGCGATGATGCGCGTAATACCGTGTACTTACAGATGAACTCACTGAAACCTGAGGATACCGCCGT
TTATTATTGTGCGGCAAACCCTCTGGACCCCAACTGGACTAATTCTGACTATTGGGGTCAGGGCACACAAGTCACGGTCTCAAGCGGCGGAAGCTCTGGTG
AACAGAAACTGATTTCAGAAGCCAA
DYCMDCF#PYSFK#PVISFAADGW#evqlvesggglvqagdslrlscaasgDYCMDCFmgwfrqapgkerefvaaitPYSFKtyyadsvkgrftisrddarntvylqmnslkpedtavyyc
aaPVISFAADGWdywgqgtqvtvss#ATATACCATGGAAGTTCAACTGGTTGAATCTGGTGGCGGTTTAGTTCAAGCCGGTGATAGCCTTCGTCTGAGCTGCGCC
GCAAGCGGAGATTACTGCATGGATTGCTTTATGGGTTGGTTTCGCCAGGCACCTGGTAAAGAACGTGAATTTGTGGCAGCCATTACCCCCTATTCCTTTAAG
ACCTACTATGCCGATTCTGTTAAAGGTCGCTTCACTATTTCACGCGATGATGCGCGTAATACCGTGTACTTACAGATGAACTCACTGAAACCTGAGGATACCG
CCGTTTATTATTGTGCGGCACCCGTCATCTCCTTTGCTGCGGACGGCTGGGACTATTGGGGTCAGGGCACACAAGTCACGGTCTCAAGCGGCGGAAGCTCT
GGTGAACAGAAACTGATTTCAGAAGCCAA
DYCMDCF#PYSFK#PLNIGTATIA#evqlvesggglvqagdslrlscaasgDYCMDCFlgwfrqapgkerefvaaitPYSFKtyyadsvkgrftiscddarntvylqmnslkpedtavyycaaP
LNIGTATIAdywgqgtqvtvss#GAAGGAGATATACCATGGAAGTTCAACTGGTTGAATCTGGTGGCGGTTTAGTTCAAGCCGGTGATAGCCTTCGTCTGAGCTG
CGCCGCAAGCGGAGATTACTGCATGGATTGCTTTTTGGGTTGGTTTCGCCAGGCACCTGGTAAAGAACGTGAATTTGTGGCAGCCATTACCCCCTATTCCTTT
AAGACCTACTATGCCGATTCTGTTAAAGGTCGCTTCACTATTTCATGCGATGATGCGCGTAATACCGTGTACTTACAGATGAACTCACTGAAACCTGAGGATA
CCGCCGTTTATTATTGTGCGGCACCCCTCAATATCGGCACCGCGACGATTGCCGACTATTGGGGTCAGGGCACACAAGTCACGGTCTCAAGCGGCGGAAGC
TCTGGTGAACAGAAACTGATTTCAGAAGCCAA
DYCMDCF#PYSFK#DSLILANSQW#evqlvesggglvqagdsprlscaasgDYCMDCFmgwfrqapgkerefvaaitPYSFKtyyadsvkgrftisrddarntvylqmnslkpedtavyyc
aaDSLILANSQWdywgqgtqvtvss#GAAGGAGATATACCATGGAAGTTCAACTGGTTGAATCTGGTGGCGGTTTAGTTCAAGCCGGTGATAGCCCTCGTCTGA
GCTGCGCCGCAAGCGGAGATTACTGCATGGATTGCTTTATGGGTTGGTTTCGCCAGGCACCTGGTAAAGAACGTGAATTTGTGGCAGCCATTACCCCCTATT
CCTTTAAGACCTACTATGCCGATTCTGTTAAAGGTCGCTTCACTATTTCACGCGATGATGCGCGTAATACCGTGTACTTACAGATGAACTCACTGAAACCTGA
GGATACCGCCGTTTATTATTGTGCGGCAGACAGCCTTATTTTGGCTAATTCTCAGTGGGACTATTGGGGTCAGGGCACACAAGTCACGGTCTCAAGCGGCG
GAAGCTCTGGTGAACAGAAACTGATTTCAGAAGCCAA
DYCMDCF#PYSFK#PLNIGTATIA#evqlvesggglvqagdslrlscaasgDYCMDCFmgwfrqapgkerefvaaitPYSFKtyyadsvkgrftisrddarntvylqmnslkpedtavyycaa
PLNIGTATIAdywghgtqvtvss#AGATATACCATGGAAGTTCAACTGGTTGAATCTGGTGGCGGTTTAGTTCAAGCCGGTGATAGCCTTCGTCTGAGCTGCGCC
GCAAGCGGAGATTACTGCATGGATTGCTTTATGGGTTGGTTTCGCCAGGCACCTGGTAAAGAACGTGAATTTGTGGCAGCCATTACCCCCTATTCCTTTAAG
ACCTACTATGCCGATTCTGTTAAAGGTCGCTTCACTATTTCACGCGATGATGCGCGTAATACCGTGTACTTACAGATGAACTCACTGAAACCTGAGGATACCG
CCGTTTATTATTGTGCGGCACCCCTCAATATCGGCACCGCGACGATTGCCGACTACTGGGGTCATGGCACACAAGTCACGGTCTCAAGCGGCGGAAGCTCTG
CTGATCAGAAACTGATTTCAGAAGCCAA
DYCMDCF#PYSFK#DSLILANSQW#evqlvesggglvqagdslrlscaasgDYCMDCFmgwfrqapgkerefvaaitPYSFKtyyadsvkgrftisrddarntvylqmnslkpedtavyyca
tDSLILANSQWdywghgtqvtvss#AAGGAGATATACCATGGAAGTTCAACTGGTTGAATCTGGTGGCGGTTTAGTTCAAGCCGGTGATAGCCTTCGTCTGAGC
TGCGCCGCAAGCGGAGATTACTGCATGGATTGCTTTATGGGTTGGTTTCGCCAGGCACCTGGTAAAGAACGTGAATTTGTGGCAGCCATTACCCCCTATTCC
TTTAAGACCTACTATGCCGATTCTGTTAAAGGTCGCTTCACTATTTCACGCGATGATGCGCGTAATACCGTGTACTTACAGATGAACTCACTGAAACCTGAGG
ATACCGCCGTTTATTATTGTGCGACAGACAGCCTTATTTTGGCTAATTCTCAGTGGGACTATTGGGGTCATGGCACACAAGTCACGGTCTCAAGCGGCGGAA
GCTCTGGTGAACAGAAACTGATTTCAGAAGCCAA
DYCMDCF#PYSFK#DSLILANSQW#evqlvesggglvqagdslrlscaasgDYCMDCFmgwfrqapgkerefvaaitPYSFKtyyadsvkgrftisrddarntvylqmnslkpedtavyyca
aDSLILANSQWdywgqgtqgtvss#ATATACCATGGAAGTTCAACTGGTTGAATCTGGTGGCGGTTTAGTTCAAGCCGGTGATAGCCTTCGTCTGAGCTGCGCC
GCAAGCGGAGATTACTGCATGGATTGCTTTATGGGTTGGTTTCGCCAGGCACCTGGTAAAGAACGTGAATTTGTGGCAGCCATTACCCCCTATTCCTTTAAG
ACCTACTATGCCGATTCTGTTAAAGGTCGCTTCACTATTTCACGCGATGATGCGCGTAATACCGTGTACTTACAGATGAACTCACTGAAACCTGAGGATACCG
CCGTTTATTATTGTGCGGCAGACAGCCTTATTTTGGCTAATTCTCAGTGGGACTATTGGGGTCAGGGCACACAAGGCACGGTCTCAAGCGGCGGAAGCTCT
GGTGAACAGAAACTGATTTCAGAAGCCAA
DYCMDCF#PYSFK#QVSLVTHGDL#evqlvesggglvqagdslrlscaasgDYCMDCFmgwfcqapgkerefvaaitPYSFKtyyadsvkgrftisrddarntvylqmnslkpedtavyyc
aaQVSLVTHGDLdswgqgtqvtvss#AAGGAGATATACCATGGAAGTTCAACTGGTTGAATCTGGTGGCGGTTTAGTTCAAGCCGGTGATAGCCTTCGTCTGAG
CTGCGCCGCAAGCGGAGATTACTGCATGGATTGCTTTATGGGTTGGTTTTGCCAGGCACCTGGTAAAGAACGTGAATTTGTGGCAGCCATTACCCCCTATTC
CTTTAAGACCTACTATGCCGATTCTGTTAAAGGTCGCTTCACTATTTCACGCGATGATGCGCGTAATACCGTGTACTTACAGATGAACTCACTGAAACCTGAG
GATACCGCCGTTTATTATTGTGCGGCACAGGTCTCCCTTGTTACCCATGGGGATCTGGACTCTTGGGGTCAGGGCACACAAGTCACGGTCTCAAGCGGCGG
AAGCTCTGGTGAACAGAAACTGATTTCAGAAGCCAA
DSCMDCF#PYSFK#NPLDPNWTNS#evqlvesggglvqagdslrlscaasgDSCMDCFmgwfrqapgkerefvaaitPYSFKtyyadsvkgrftisrddarntvylqmnslkpedtavyyc
aaNPLDPNWTNSdywgqgtqvtvss#ATACCATGGAAGTTCAACTGGTTGAATCTGGTGGCGGTTTAGTTCAAGCCGGTGATAGCCTTCGTCTGAGCTGCGCCG
CAAGCGGAGATTCCTGCATGGATTGCTTTATGGGTTGGTTTCGCCAGGCACCTGGTAAAGAACGTGAATTTGTGGCAGCCATTACCCCCTATTCCTTTAAGA
CCTACTATGCCGATTCTGTTAAAGGTCGCTTCACTATTTCACGCGATGATGCGCGTAATACCGTGTACTTACAGATGAACTCACTGAAACCTGAGGATACCGC
CGTTTATTATTGTGCGGCAAACCCTCTGGACCCCAACTGGACTAATTCTGACTATTGGGGTCAGGGCACACAAGTCACGGTCTCAAGCGGCGGAAGCTCTGG
TGAACAGAAACTGATTTCAGAAGCCAA
DYCMDCF#PYSFK#PLNIGTATIA#evqlvesggglvqagdslrlscaaseDYCMDCFmgwfrqapgkerefvaaitPYSFKtyyadsvkgrftisrddarntvylqmnslkpedtavyycaa
PLNIGTATIAdywgqgtqgtvss#ACCATGGAAGTTCAACTGGTTGAATCTGGTGGCGGTTTAGTTCAAGCCGGTGATAGCCTTCGTCTGAGCTGCGCCGCAAGC
GAAGATTACTGCATGGATTGCTTTATGGGTTGGTTTCGCCAGGCACCTGGTAAAGAACGTGAATTTGTGGCAGCCATTACCCCCTATTCCTTTAAGACCTACT
ATGCCGATTCTGTTAAAGGTCGCTTCACTATTTCACGCGATGATGCGCGTAATACCGTGTACTTACAGATGAACTCACTGAAACCTGAGGATACCGCCGTTTA
TTATTGTGCGGCACCCCTCAATATCGGCACCGCGACGATTGCCGACTATTGGGGTCAGGGCACACAAGGCACGGTCTCAAGCGGCGGAAGCTCTGGTGAAC
AGAAACTGATTTCAGAAGCCAA
DYCMDCF#PYSFK#NPLDPNWTNS#evqlvesggglvqagdslrlscaaggDYCMDCFmgwfrqapgkerefvaaitPYSFKtyyadsvkgrftisrddarntvylqmnslkpedtavyy
caaNPLDPNWTNSdywgqgtqvmvss#AAGGAGATATACCATGGAAGTTCAACTGGTTGAATCTGGTGGCGGTTTAGTTCAAGCCGGTGATAGCCTTCGTCTG
AGCTGCGCCGCAGGCGGAGATTACTGCATGGATTGCTTTATGGGTTGGTTTCGCCAGGCACCTGGTAAAGAACGTGAATTTGTGGCAGCCATTACCCCCTAT
TCCTTTAAGACCTACTATGCCGATTCTGTTAAAGGTCGCTTCACTATTTCACGCGATGATGCGCGTAATACCGTGTACTTACAGATGAACTCACTGAAACCTG
AGGATACCGCCGTTTATTATTGTGCGGCAAACCCTCTGGACCCCAACTGGACTAATTCTGACTATTGGGGTCAGGGCACACAAGTCATGGTCTCAAGCGGCG
GAAGCTCTGGTGAACAGAAACTGATTTCAGAAGCCAA
DYCMDCF#PYSFK#NPLDPNWTNS#evqlvesggglvqagdslrlscaasgDYCMDCFmgwfrqapgkerefvaaitPYSFKtyyadsvkgrftisrddarntvylqmnslkpedtavyyc
aaNPLDPNWTNSdywgqgtqgtvss#GGAGATATACCATGGAAGTTCAACTGGTTGAATCTGGTGGCGGTTTAGTTCAAGCCGGTGATAGCCTTCGTCTGAGCT
GCGCCGCAAGCGGAGATTACTGCATGGATTGCTTTATGGGTTGGTTTCGCCAGGCACCTGGTAAAGAACGTGAATTTGTGGCAGCCATTACCCCCTATTCCT
TTAAGACCTACTATGCCGATTCTGTTAAAGGTCGCTTCACTATTTCACGCGATGATGCGCGTAATACCGTGTACTTACAGATGAACTCACTGAAACCTGAGGA
TACCGCCGTTTATTATTGTGCGGCAAACCCTCTGGACCCCAACTGGACTAATTCTGACTATTGGGGTCAGGGCACACAAGGCACGGTCTCAAGCGGCGGAA
GCTCTGGTGAACAGAAACTGATTTCAGAAGCCAA
DYCMDCF#PYSFK#NPLDPNWTNS#evqlfesggglvqagdslrlscaasgDYCMDCFmgwfrqapgkerefvaaitPYSFKtyyadsvkgrftisrddarntvylqmnslkpedtavyyc
aaNPLDPNWTNSdywgqgtqgtvss#AGATATACCATGGAAGTTCAACTGTTTGAATCTGGTGGCGGTTTAGTTCAAGCCGGTGATAGCCTTCGTCTGAGCTGC
GCCGCAAGCGGAGATTACTGCATGGATTGCTTTATGGGTTGGTTTCGCCAGGCACCTGGTAAAGAACGTGAATTTGTGGCAGCCATTACCCCCTATTCCTTT
AAGACCTACTATGCCGATTCTGTTAAAGGTCGCTTCACTATTTCACGCGATGATGCGCGTAATACCGTGTACTTACAGATGAACTCACTGAAACCTGAGGATA
CCGCCGTTTATTATTGTGCGGCAAACCCTCTGGACCCCAACTGGACTAATTCTGACTATTGGGGTCAGGGCACACAAGGCACGGTCTCAAGCGGCGGAAGC
TCTGGTGAACAGAAACTGATTTCAGAAGCCAA
DYCMDCF#PYSFK#SANILHLSVI#evqlvesggglvqagdslrlscaasgDYCMDCFmgwfrqapgkerefvaaitPYSFKtyyadsvkgrftisrddarntvylqmnslkpedtavyycaa
SANILHLSVInywgqgtqgtvss#ATATACCATGGAAGTTCAACTGGTTGAATCTGGTGGCGGTTTAGTTCAAGCCGGTGATAGCCTTCGTCTGAGCTGCGCCGCA
AGCGGAGATTACTGCATGGATTGCTTTATGGGTTGGTTTCGCCAGGCACCTGGTAAAGAACGTGAATTTGTGGCAGCCATTACCCCCTATTCCTTTAAGACCT
ACTATGCCGATTCTGTTAAAGGTCGCTTCACTATTTCACGCGATGATGCGCGTAATACCGTGTACTTACAGATGAACTCACTGAAACCTGAGGATACCGCCGT
TTATTATTGTGCGGCAAGCGCGAACATTCTCCATTTGTCTGTTATCAACTATTGGGGTCAGGGCACACAAGGCACGGTCTCAAGCGGCGGAAGCTCTGGTGA
ACAGAAACTGATTTCAGAAGCCAA
DYCMDCF#PYSFK#WLTTQPFCGW#evqlvesggglvqagdslrlscaasgDYCMDCFmgwfrqapgkerefvaaitPYSFKtyyadsvrgrfsisadsakntvylqmnslkpedtavyy
caaWLTTQPFCGWnywgqgtqgtvss#ACCATGGAAGTTCAACTGGTTGAATCTGGTGGCGGTTTAGTTCAAGCCGGTGATAGCCTTCGTCTGAGCTGCGCCGC
AAGCGGAGATTACTGCATGGATTGCTTTATGGGTTGGTTTCGCCAGGCACCTGGTAAAGAACGTGAATTTGTGGCAGCCATTACCCCCTATTCCTTTAAGAC
CTACTATGCCGATTCTGTTCGTGGTCGCTTCAGCATTTCAGCAGATTCTGCGAAGAATACCGTGTACTTACAGATGAACTCACTGAAACCTGAGGATACCGCC
GTTTATTATTGTGCGGCATGGCTGACCACTCAGCCGTTCTGCGGTTGGAACTATTGGGGTCAGGGCACACAAGGCACGGTCTCAAGCGGCGGAAGCTCTGG
TGAACAGAAACTGATTTCAGAAGCCAA
DYCMDCF#PYSFK#PLNIGTATIV#evqlvesggglvqagdslrlscaasgDYCMDCFmgwfrqapgkerefvaaitPYSFKtyyadsvkgrftisrddarntvylqmnslkpedtavyycaa
PLNIGTATIVdywgqgtqvtvss#AAGGAGATATACCATGGAAGTTCAACTGGTTGAATCTGGTGGCGGTTTAGTTCAAGCCGGTGATAGCCTTCGTCTGAGCTG
CGCCGCAAGCGGAGATTACTGCATGGATTGCTTTATGGGTTGGTTTCGCCAGGCACCTGGTAAAGAACGTGAATTTGTGGCAGCCATTACCCCCTATTCCTT
TAAGACCTACTATGCCGATTCTGTTAAAGGTCGCTTCACTATTTCACGCGATGATGCGCGTAATACCGTGTACTTACAGATGAACTCACTGAAACCTGAGGAT
ACCGCCGTTTATTATTGTGCGGCACCCCTCAATATCGGCACCGCGACGATTGTCGACTATTGGGGTCAGGGCACACAAGTCACGGTCTCAAGCGGCGGAAG
CTCTGGTGAACAGAAACTGATTTCAGAAGCCAA
DYCMDCF#PYSFK#PLNIGTATIA#evqlvdsggglvqagdslrlscaasgDYCMDCFmgwfrqapgkerefvaaitPYSFKtyyadsvkgrftisrddarntvylqmnslkpedtavyycaa
PLNIGTATIAdywgqgtqgtvss#GAAGGAGATATACCATGGAAGTTCAACTGGTTGACTCTGGTGGCGGTTTAGTTCAAGCCGGTGATAGCCTTCGTCTGAGCT
GCGCCGCAAGCGGAGATTACTGCATGGATTGCTTTATGGGTTGGTTTCGCCAGGCACCTGGTAAAGAACGTGAATTTGTGGCAGCCATTACCCCCTATTCCT
TTAAGACCTACTATGCCGATTCTGTTAAAGGTCGCTTCACTATTTCACGCGATGATGCGCGTAATACCGTGTACTTACAGATGAACTCACTGAAACCTGAGGA
TACCGCCGTTTATTATTGTGCGGCACCCCTCAATATCGGCACCGCGACGATTGCCGACTATTGGGGTCAGGGCACACAAGGCACGGTCTCAAGCGGCGGAA
GCTCTGGTGAACAGAAACTGATTTCAGAAGCCAA
DYCMDCF#PYSFK#NPLDPNWTNS#evqlvdsggglvqagdrlrlscaasgDYCMDCFmgwfrqapgkerefvaaitPYSFKtyyadsvkgrftisrddarntvylqmnslkpedtavyyc
aaNPLDPNWTNSdywgqgtqgtvss#GAAGGAGATATACCATGGAAGTTCAACTGGTTGACTCTGGTGGCGGTTTAGTTCAAGCCGGTGATCGCCTTCGTCTGA
GCTGCGCCGCAAGCGGAGATTACTGCATGGATTGCTTTATGGGTTGGTTTCGCCAGGCACCTGGTAAAGAACGTGAATTTGTGGCAGCCATTACCCCCTATT
CCTTTAAGACCTACTATGCCGATTCTGTTAAAGGTCGCTTCACTATTTCACGCGATGATGCGCGTAATACCGTGTACTTACAGATGAACTCACTGAAACCTGA
GGATACCGCCGTTTATTATTGTGCGGCAAACCCTCTGGACCCCAACTGGACTAATTCTGACTATTGGGGTCAGGGCACACAAGGCACGGTCTCAAGCGGCG
GAAGCTCTGGTGAACAGAAACTGATTTCAGAAGCCAA
DYCMDCF#PYSFK#LLPLDGFETS#evqlvesggglvqagdslrlscaasgDYCMDCFmgwfrqapgkerefvaaitPYSFKtyyadsvkgrftisrddarntvylqmnslkpedtavyycaa
LLPLDGFETSdywgqgtqgtvss#ATATACCATGGAAGTTCAACTGGTTGAATCTGGTGGCGGTTTAGTTCAAGCCGGTGATAGCCTTCGTCTGAGCTGCGCCGC
AAGCGGAGATTACTGCATGGATTGCTTTATGGGTTGGTTTCGCCAGGCACCTGGTAAAGAACGTGAATTTGTGGCAGCCATTACCCCCTATTCCTTTAAGAC
CTACTATGCCGATTCTGTTAAAGGTCGCTTCACTATTTCACGCGATGATGCGCGTAATACCGTGTACTTACAGATGAACTCACTGAAACCTGAGGATACCGCC
GTTTATTATTGTGCGGCACTTCTCCCCCTGGATGGTTTTGAGACTTCGGACTATTGGGGTCAGGGCACACAAGGCACGGTCTCAAGCGGCGGAAGCTCTGGT
GAACAGAAACTGATTTCAGAAGCCAA
DYCMDCF#PYSFK#SMHLNNISIS#evqlvesggglvqagdslrlscaasgDYCMDCFmgwfrqapgkerefvaaitPYSFKtyyadsvkgrftisrddarntvylqmnslkpedtavyyca
aSMHLNNISISdywgqgtqgtvss#AAGGAGATATACCATGGAAGTTCAACTGGTTGAATCTGGTGGCGGTTTAGTTCAAGCCGGTGATAGCCTTCGTCTGAGCT
GCGCCGCAAGCGGAGATTACTGCATGGATTGCTTTATGGGTTGGTTTCGCCAGGCACCTGGTAAAGAACGTGAATTTGTGGCAGCCATTACCCCCTATTCCT
TTAAGACCTACTATGCCGATTCTGTTAAAGGTCGCTTCACTATTTCACGCGATGATGCGCGTAATACCGTGTACTTACAGATGAACTCACTGAAACCTGAGGA
TACCGCCGTTTATTATTGTGCGGCATCTATGCACCTGAACAATATCAGCATTAGTGACTATTGGGGTCAGGGCACACAAGGCACGGTCTCAAGCGGCGGAA
GCTCTGGTGAACAGAAACTGATTTCAGAAGCCAA
DYCMDCF#PYSFK#PFAPLTVLLA#evqlvesggglvqagdslrlscaasgDYCMDCFmgwfrqapgkerefvaaitPYSFKtyyadsvkgrftisrddarntvylqmnslkpedtavyyca
aPFAPLTVLLAeywgqgtqgtvss#AGGAGATATACCATGGAAGTTCAACTGGTTGAATCTGGTGGCGGTTTAGTTCAAGCCGGTGATAGCCTTCGTCTGAGCTG
CGCCGCAAGCGGAGATTACTGCATGGATTGCTTTATGGGTTGGTTTCGCCAGGCACCTGGTAAAGAACGTGAATTTGTGGCAGCCATTACCCCCTATTCCTT
TAAGACCTACTATGCCGATTCTGTTAAAGGTCGCTTCACTATTTCACGCGATGATGCGCGTAATACCGTGTACTTACAGATGAACTCACTGAAACCTGAGGAT
ACCGCCGTTTATTATTGTGCGGCACCGTTCGCGCCCCTTACCGTTCTTCTCGCGGAGTATTGGGGTCAGGGCACACAAGGCACGGTCTCAAGCGGCGGAAG
CTCTGGTGAACAGAAACTGATTTCAGAAGCCAA
DYCMDCF#PYSFK#NPLDPNWTNS#evqlvesggglvqagdslrlscaasgDYCMDCFmgwfrqapgkerefvaaitPYSFKtyyadsvkgrftisrddacntvylqmnslkpedtavyy
caaNPLDPNWTNSdywgqgtqvtvss#GAAGGAGATATACCATGGAAGTTCAACTGGTTGAATCTGGTGGCGGTTTAGTTCAAGCCGGTGATAGCCTTCGTCTG
AGCTGCGCCGCAAGCGGAGATTACTGCATGGATTGCTTTATGGGTTGGTTTCGCCAGGCACCTGGTAAAGAACGTGAATTTGTGGCAGCCATTACCCCCTAT
TCCTTTAAGACCTACTATGCCGATTCTGTTAAAGGTCGCTTCACTATTTCACGCGATGATGCGTGTAATACCGTGTACTTACAGATGAACTCACTGAAACCTG
AGGATACCGCCGTTTATTATTGTGCGGCAAACCCTCTGGACCCCAACTGGACTAATTCTGACTATTGGGGTCAGGGCACACAAGTCACGGTCTCAAGCGGCG
GAAGCTCTGGTGAACAGAAACTGATTTCAGAAGCCAA
DYCMDCF#PYSFK#QVSLVTHGDL#evqlvesggglvqagdslrlscatsgDYCMDCFmgwfrqapgkerefvaaitPYSFKtyyadsvkgrftisrddarntvylqmnslkpedtavyyca
aQVSLVTHGDLdywgqgtqvtvss#ATATACCATGGAAGTTCAACTGGTTGAATCTGGTGGCGGTTTAGTTCAAGCCGGTGATAGCCTTCGTCTGAGCTGCGCC
ACAAGCGGAGATTACTGCATGGATTGCTTTATGGGTTGGTTTCGCCAGGCACCTGGTAAAGAACGTGAATTTGTGGCAGCCATTACCCCCTATTCCTTTAAG
ACCTACTATGCCGATTCTGTTAAAGGTCGCTTCACTATTTCACGCGATGATGCGCGTAATACCGTGTACTTACAGATGAACTCACTGAAACCTGAGGATACCG
CCGTTTATTATTGTGCGGCACAGGTCTCCCTTGTTACCCATGGGGATCTGGACTATTGGGGTCAGGGCACACAAGTCACGGTCTCAAGCGGCGGAAGCTCTG
GTGAACAGAAACTGATTTCAGAAGCCAA
DYCMDCF#PYSFK#DSLILANSQW#evqlvesggglvqagdslrlscaasgDYCMDCFmdwfrqapgkerefvaaitPYSFKtyyadsvkgrftisrddarntvylqmnslkpedtavyyc
aaDSLILANSQWdyqgqgtqgtvss#ATACCATGGAAGTTCAACTGGTTGAATCTGGTGGCGGTTTAGTTCAAGCCGGTGATAGCCTTCGTCTGAGCTGCGCCGC
AAGCGGAGATTACTGCATGGATTGCTTTATGGATTGGTTTCGCCAGGCACCTGGTAAAGAACGTGAATTTGTGGCAGCCATTACCCCCTATTCCTTTAAGAC
CTACTATGCCGATTCTGTTAAAGGTCGCTTCACTATTTCACGCGATGATGCGCGTAATACCGTGTACTTACAGATGAACTCACTGAAACCTGAGGATACCGCC
GTTTATTATTGTGCGGCAGACAGCCTTATTTTGGCTAATTCTCAGTGGGACTATTGGGGTCAGGGCACACAAGGCACGGTCTCAAGCGGCGGAAGCTCTGG
TGAACAGAAACTGATTTCAGAAGCCAA
DYCMDCF#PYSFK#YTSHSDTAFL#evqlvesggglvqagdslrlscaasgDYCMDCFmgwfrqapgkerefvaaitPYSFKtyyadsvkgrftisrddarntvylqmnslkpedtavyyca
aYTSHSDTAFLnywgqgtqvtvss#ACCATGGAAGTTCAACTGGTTGAATCTGGTGGCGGTTTAGTTCAAGCCGGTGATAGCCTTCGTCTGAGCTGCGCCGCAAG
CGGAGATTACTGCATGGATTGCTTTATGGGTTGGTTTCGCCAGGCACCTGGTAAAGAACGTGAATTTGTGGCAGCCATTACCCCCTATTCCTTTAAGACCTAC
TATGCCGATTCTGTTAAAGGTCGCTTCACTATTTCACGCGATGATGCGCGTAATACCGTGTACTTACAGATGAACTCACTGAAACCTGAGGATACCGCCGTTT
ATTATTGTGCGGCATACACCAGCCACTCGGATACGGCTTTTCTGAACTATTGGGGTCAGGGCACACAAGTCACGGTCTCAAGCGGCGGAAGCTCTGGTGAA
CAGAAACTGATTTCAGAAGCCAA
DYCMDCF#PYSFK#PLNIGTATIA#evqlfesggglvqagdslrlscaasgDYCMDCFmgwfrqapgkerefvaaitPYSFKtyyadsvkgrftisrddarntvylqmnslkpedtavyycaa
PLNIGTATIAdywgqgtqgtvss#AGATATACCATGGAAGTTCAACTGTTTGAATCTGGTGGCGGTTTAGTTCAAGCCGGTGATAGCCTTCGTCTGAGCTGCGCC
GCAAGCGGAGATTACTGCATGGATTGCTTTATGGGTTGGTTTCGCCAGGCACCTGGTAAAGAACGTGAATTTGTGGCAGCCATTACCCCCTATTCCTTTAAG
ACCTACTATGCCGATTCTGTTAAAGGTCGCTTCACTATTTCACGCGATGATGCGCGTAATACCGTGTACTTACAGATGAACTCACTGAAACCTGAGGATACCG
CCGTTTATTATTGTGCGGCACCCCTCAATATCGGCACCGCGACGATTGCCGACTATTGGGGTCAGGGCACACAAGGCACGGTCTCAAGCGGCGGAAGCTCT
GGTGAAAAGAAACTGATTTCAGAAGCCAA
DYCMDCF#PYSFK#SANILHLSVI#evqlvesggglvqagdslrlscaasgDYCMDCFmgwfrqapgkerefvaaitPYSFKtyyadsvkgrftisrddvrntvylqmnslkpedtavyycaa
SANILHLSVInywgqgtqvtvss#GGAGATATACCATGGAAGTTCAACTGGTTGAATCTGGTGGCGGTTTAGTTCAAGCCGGTGATAGCCTTCGTCTGAGCTGCG
CCGCAAGCGGAGATTACTGCATGGATTGCTTTATGGGTTGGTTTCGCCAGGCACCTGGTAAAGAACGTGAATTTGTGGCAGCCATTACCCCCTATTCCTTTA
AGACCTACTATGCCGATTCTGTTAAAGGTCGCTTCACTATTTCACGCGATGATGTGCGTAATACCGTGTACTTACAGATGAACTCACTGAAACCTGAGGATAC
CGCCGTTTATTATTGTGCGGCAAGCGCGAACATTCTCCATTTGTCTGTTATCAACTATTGGGGTCAGGGCACACAAGTCACGGTCTCAAGCGGCGGAAGCTC
TGGTGAACAGAAACTGATTTCAGAAGCCAA
DYCMDCF#PYSFK#PFAPLTVLLA#evqlvesggglvqagdslrlscaasgDYCMDCFmgwfrqapgkerefvaaitPYSFKtyyadsvkgrftisrddarntvylqmnslkpedtavyyca
aPFAPLTVLLAeywvqgtqgtvss#ACCATGGAAGTTCAACTGGTTGAATCTGGTGGCGGTTTAGTTCAAGCCGGTGATAGCCTTCGTCTGAGCTGCGCCGCAAG
CGGAGATTACTGCATGGATTGCTTTATGGGTTGGTTTCGCCAGGCACCTGGTAAAGAACGTGAATTTGTGGCAGCCATTACCCCCTATTCCTTTAAGACCTAC
TATGCCGATTCTGTTAAAGGTCGCTTCACTATTTCACGCGATGATGCGCGTAATACCGTGTACTTACAGATGAACTCACTGAAACCTGAGGATACCGCCGTTT
ATTATTGTGCGGCACCGTTCGCGCCCCTTACCGTTCTTCTCGCGGAGTATTGGGTTCAGGGCACACAAGGCACGGTCTCAAGCGGCGGAAGCTCTGGTGAA
AGGAAAATGATTTCAGAAGCCAA

TABLE 6
Sequences belonging to cluster SR12. Each line in the table represents one sequence,
both segments and full length of the sequence are shown. Shown items are divided by “#” and in
the order from start to end of each line is: CDR1 amino acid sequence, CDR2 amino acid sequence,
CDR3 amino acid sequence, full-length amino acid sequence with CDRs capitalized, full-length
DNA sequence.
(SEQ ID NOS: 2031-2755)

AIVHVFA#LDNDA#FCYVPLATC#evqlvesggglvqagdslrlscaasgAIVHVFAmgwfrqapgkerefvasinLDNDAtnyadsvkgrftisrddarntvylqmnslkpedtavyycna
FCYVPLATCdywgqgtqvtvss#ATACCATGGAAGTTCAACTGGTTGAATCTGGTGGCGGTTTAGTTCAAGCCGGTGATAGCCTTCGTCTGAGCTGCGCCGCAAG
CGGAGCCATTGTGCATGTGTTCGCTATGGGTTGGTTTCGCCAGGCACCTGGTAAAGAACGTGAATTTGTGGCATCCATTAACCTTGACAACGACGCTACCAA
CTATGCCGATTCTGTTAAAGGTCGCTTCACTATTTCACGCGATGATGCGCGTAATACCGTGTACTTACAGATGAACTCACTGAAACCTGAGGATACCGCCGTT
TATTATTGTAATGCATTCTGCTACGTCCCTTTGGCCACGTGTGACTATTGGGGTCAGGGCACACAAGTCACGGTCTCAAGCGGCGTAAGCTCTGGTGAACAG
AAACTGATTTCAGAAG
AIVHVFA#LDNDA#PFWINSSVV#evqlvesggglvqagdslrlscaasgAIVHVFAmgwfrqapgkerefvasinLDNDAtnyadsvkgrftisrddahntvylqmnslkpedtavyycn
aPFWINSSVVdywgqgtqvtvss#ATATACCATGGAAGTTCAACTGGTTGAATCTGGTGGCGGTTTAGTTCAAGCCGGTGATAGCCTTCGTCTGAGCTGCGCCGC
AAGCGGAGCCATTGTGCATGTGTTCGCTATGGGTTGGTTTCGCCAGGCACCTGGTAAAGAACGTGAATTTGTGGCATCCATTAACCTTGACAACGACGCTAC
CAACTATGCCGATTCTGTTAAAGGTCGCTTCACTATTTCACGCGATGATGCGCATAATACCGTGTACTTACAGATGAACTCACTGAAACCTGAGGATACCGCC
GTTTATTATTGTAATGCACCCTTCTGGATCAATAGTTCTGTTGTGGACTATTGGGGTCAGGGCACACAAGTCACGGTCTCAAGCGGCGGAAGCTCTGGTGAA
CAGAAACTGATTTCAGAAG
AIVHVFA#LDNDA#TIFMDSDLG#evqlvesggglvqagdslrlscaasgAIVHVFAmgwfrqapgkerefvasinLDNDAtnyadsvkgrftisrddarntvylqmnslkpedtavyycna
TIFMDSDLGdywgqgtqvtvss#AGGAGATATACCATGGAAGTTCAACTGGTTGAATCTGGTGGCGGTTTAGTTCAAGCCGGTGATAGCCTTCGTCTGAGCTGC
GCCGCAAGCGGAGCCATTGTGCATGTGTTCGCTATGGGTTGGTTTCGCCAGGCACCTGGTAAAGAACGTGAATTTGTGGCATCCATTAACCTTGACAACGAC
GCTACCAACTATGCCGATTCTGTTAAAGGTCGCTTCACTATTTCACGCGATGATGCGCGTAATACCGTGTACTTACAGATGAACTCACTGAAACCTGAGGATA
CCGCCGTTTATTATTGTAATGCAACCATCTTTATGGATTCCGATTTGGGTGACTATTGGGGTCAGGGCACACAAGTCACGGTCTCAAGCGGCGGAAGCTCTG
GTGAACAGAAACTGATTTCAGAAG
AIVHVFA#LDNDA#PFWINSSVV#evqliesggglvqagdslrlscaasgAIVHVFAmgwfrqapgkerefvasinLDNDAtnyadsvkgrftisrddahntvylqmnslkpedtavyycna
PFWINSSVVdywgqgtqvtvss#AGGAGATATACCATGGAAGTTCAACTGATTGAATCTGGTGGCGGTTTAGTTCAAGCCGGTGATAGCCTTCGTCTGAGCTGC
GCCGCAAGCGGAGCCATTGTGCATGTGTTCGCTATGGGTTGGTTTCGCCAGGCACCTGGTAAAGAACGTGAATTTGTGGCATCCATTAACCTTGACAACGAC
GCTACCAACTATGCCGATTCTGTTAAAGGTCGCTTCACTATTTCACGCGATGATGCGCATAATACCGTGTACTTACAGATGAACTCACTGAAACCTGAGGATA
CCGCCGTTTATTATTGTAATGCACCCTTCTGGATCAATAGTTCTGTTGTGGACTATTGGGGTCAGGGCACACAAGTCACGGTCTCAAGCGGCGGAAGCTCTG
GTGAACAGAAACTGATTTCAGAAG
AIVHVFA#LDNDA#PFWINSSVV#qvqlfesggglvqagdslrlscaasgAIVHVFAmgwfrqapgkerefvasinLDNDAtnyadsvkgrftisrddahntvylqmnslkpedtavyycn
aPFWINSSVVdywgqgtqvtvss#ATATACCATGCAGGTTCAACTGTTTGAATCTGGTGGCGGTTTAGTTCAAGCCGGTGATAGCCTTCGTCTGAGCTGCGCCGC
AAGCGGAGCCATTGTGCATGTGTTCGCTATGGGTTGGTTTCGCCAGGCACCTGGTAAAGAACGTGAATTTGTGGCATCCATTAACCTTGACAACGACGCTAC
CAACTATGCCGATTCTGTTAAAGGTCGCTTCACTATTTCACGCGATGATGCGCATAATACCGTGTACTTACAGATGAACTCACTGAAACCTGAGGATACCGCC
GTTTATTATTGTAATGCACCCTTCTGGATCAATAGTTCTGTTGTGGACTATTGGGGTCAGGGCACACAAGTCACGGTCTCAAGCGGCGGAAGCTCTGGTGAA
CAGAAACTGATTTCAGAAG
AIVHVFA#LDNDA#TIFMDSDLG#evqlfesggglvqagdslrlscaasgAIVHVFAmgwfrqapgkerefvasinLDNDAtnyadsvkgrftisrddarntvylqmnslkpedtavyycna
TIFMDSDLGdywgqgtqvtvss#AGATATACCATGGAAGTTCAACTGTTTGAATCTGGTGGCGGTTTAGTTCAAGCCGGTGATAGCCTTCGTCTGAGCTGCGCCG
CAAGCGGAGCCATTGTGCATGTGTTCGCTATGGGTTGGTTTCGCCAGGCACCTGGTAAAGAACGTGAATTTGTGGCATCCATTAACCTTGACAACGACGCTA
CCAACTATGCCGATTCTGTTAAAGGTCGCTTCACTATTTCACGCGATGATGCGCGTAATACCGTGTACTTACAGATGAACTCACTGAAACCTGAGGATACCGC
CGTTTATTATTGTAATGCAACCATCTTTATGGATTCCGATTTGGGTGACTATTGGGGTCAGGGCACACAAGTCACGGTCTCAAGCGGCGGAAGCTCTGGTGA
ACAGAAACTGATTTCAGAAG
AIVHVFA#LDNDA#TIFMDSDLG#evqlvesggglvqagdslrlscaasgAIVHVFAmgwfrqapgkerefvasinLDNDAtnyadsvkgrftisrddarntvylqmnslkpedtavyycna
TIFMDSDLGaywgqgtqvtvss#AAGGAGATATACCATGGAAGTTCAACTGGTTGAATCTGGTGGCGGTTTAGTTCAAGCCGGTGATAGCCTTCGTCTGAGCTG
CGCCGCAAGCGGAGCCATTGTGCATGTGTTCGCTATGGGTTGGTTTCGCCAGGCACCTGGTAAAGAACGTGAATTTGTGGCATCCATTAACCTTGACAACGA
CGCTACCAACTATGCCGATTCTGTTAAAGGTCGCTTCACTATTTCACGCGATGATGCGCGTAATACCGTGTACTTACAGATGAACTCACTGAAACCTGAGGAT
ACCGCCGTTTATTATTGTAATGCAACCATCTTTATGGATTCCGATTTGGGTGCCTATTGGGGTCAGGGCACACAAGTCACGGTCTCAAGCGGCGGAAGCTCT
GGTGAACAGAAACTGATTTCAGAAG
AIVHVFA#LDNDA#TAISPISIVD#evqlvesggglvqagdslrlscaasgAIVHVFAmgwfrqapgkerefvasinLDNDAtnyadsvkgrftisrddarntvylqmnslkpedtavyycaa
TAISPISIVDeywgqgtqvtvss#ATACCATGGAAGTTCAACTGGTTGAATCTGGTGGCGGTTTAGTTCAAGCCGGTGATAGCCTTCGTCTGAGCTGCGCCGCAAG
CGGAGCCATTGTGCATGTGTTCGCTATGGGTTGGTTTCGCCAGGCACCTGGTAAAGAACGTGAATTTGTGGCATCCATTAACCTTGACAACGACGCTACCAA
CTATGCCGATTCTGTTAAAGGTCGCTTCACTATTTCACGCGATGATGCGCGTAATACCGTGTACTTACAGATGAACTCACTGAAACCTGAGGATACCGCCGTT
TATTATTGTGCGGCAACGGCTATTAGCCCTATCTCTATTGTGGATGAGTATTGGGGTCAGGGCACACAAGTCACGGTCTCAAGCGGCGGAAGCTCTGGTGA
ACAGAAACTGATTTCAGAAG
AIVHVFA#LDNDA#TIFMDSDLG#evqlvesggglvqagdslrlscaasgAIVHVFAmgwfrqapgkerefvasinLDNDAtnyadsvkgrftisrddarntvylqmnslkpvdtavyycna
TIFMDSDLGdywgqgtqvtvss#ATATACCATGGAAGTTCAACTGGTTGAATCTGGTGGCGGTTTAGTTCAAGCCGGTGATAGCCTTCGTCTGAGCTGCGCCGC
AAGCGGAGCCATTGTGCATGTGTTCGCTATGGGTTGGTTTCGCCAGGCACCTGGTAAAGAACGTGAATTTGTGGCATCCATTAACCTTGACAACGACGCTAC
CAACTATGCCGATTCTGTTAAAGGTCGCTTCACTATTTCACGCGATGATGCGCGTAATACCGTGTACTTACAGATGAACTCACTGAAACCTGTGGATACCGCC
GTTTATTATTGTAATGCAACCATCTTTATGGATTCCGATTTGGGTGACTATTGGGGTCAGGGCACACAAGTCACGGTCTCAAGCGGCGGAAGCTCTGGTGAA
CAGAAACTGATTTCAGAAG
AIVHVFA#LDNDA#TIFMDSDLG#evqlvesggglvqagdslrlscaasgAIVHVFAmgwfrqapgkerefvasinLDNDAtnyadsvkgrftisrddarntvylqmnslkpedtavyycna
TIFMDSDLGaywgqdtqvtvss#ACCATGGAAGTTCAACTGGTTGAATCTGGTGGCGGTTTAGTTCAAGCCGGTGATAGCCTTCGTCTGAGCTGCGCCGCAAGC
GGAGCCATTGTGCATGTGTTCGCTATGGGTTGGTTTCGCCAGGCACCTGGTAAAGAACGTGAATTTGTGGCATCCATTAACCTTGACAACGACGCTACCAAC
TATGCCGATTCTGTTAAAGGTCGCTTCACTATTTCACGCGATGATGCGCGTAATACCGTGTACTTACAGATGAACTCGCTGAAACCTGAGGATACCGCCGTTT
ATTATTGTAATGCAACCATCTTTATGGATTCCGATTTGGGTGCCTATTGGGGTCAGGACACACAAGTCACGGTCTCAAGCGGCGGAAGCTCTGGTGAACAGA
AACTGATTTCAGAAG
AIVHVFA#LDNDA#FCYVPLATC#evqlvesggglvqagdslrlscaasgAIVHVFAmgwfrqapgkerefvasinLDNDAtnyadsvkgrftisrddarntvylqmnslkpedtavyycna
FCYVPLATCdylgqgtqvtvss#GGAGATATACCATGGAAGTTCAACTGGTTGAATCTGGTGGCGGTTTAGTTCAAGCCGGTGATAGCCTTCGTCTGAGCTGCGC
CGCAAGCGGAGCCATTGTGCATGTGTTCGCTATGGGTTGGTTTCGCCAGGCACCTGGTAAAGAACGTGAATTTGTGGCATCCATTAACCTTGACAACGACGC
TACCAACTATGCCGATTCTGTTAAAGGTCGCTTCACTATTTCACGCGATGATGCGCGTAATACCGTGTACTTACAGATGAACTCACTGAAACCTGAGGATACC
GCCGTTTATTACTGTAATGCATTCTGCTACGTCCCTTTGGCCACGTGTGACTATTTGGGTCAGGGCACACAAGTCACGGTCTCAAGCGGCGGAAGCTCTGGT
GAACAGAAACTGATTTCAGAAG
AIVHVFA#LDSDA#TAISPISIVD#evqlvesggglvqagdslrlscaasgAIVHVFAmgwfrqapgkerefvasinLDSDAtnyadsvkgrftisrddarntvylqmnslkpedtavyycaaT
AISPISIVDeywgqgtqvtvss#AAGGAGATATACCATGGAAGTTCAACTGGTTGAATCTGGTGGCGGTTTAGTTCAAGCCGGTGATAGCCTTCGTCTGAGCTGCG
CCGCAAGCGGAGCCATTGTGCATGTGTTCGCTATGGGTTGGTTTCGCCAGGCACCTGGTAAAGAACGTGAATTTGTGGCATCCATTAACCTTGACAGCGAC
GCTACCAACTATGCCGATTCTGTTAAAGGTCGCTTCACTATTTCACGCGATGATGCGCGTAATACCGTGTACTTACAGATGAACTCACTGAAACCTGAGGATA
CCGCCGTTTATTATTGTGCGGCAACGGCTATTAGCCCTATCTCTATTGTGGATGAGTATTGGGGTCAGGGCACACAAGTCACGGTCTCAAGCGGCGGAAGCT
CTGGTGAACAGAAACTGATTTCAGAAG
AIVHVFA#LDNDA#PFWINSSVV#evqlveyggglvqagdslrlscaasgAIVHVFAmgwfrqapgkerefvasinLDNDAtnyadsvkgrftisrddarntvylqmnslkpedtavyycn
aPFWINSSVVdywgqgtqvtvss#GGAGATATACCATGGAAGTTCAACTGGTTGAATATGGTGGCGGTTTAGTTCAAGCCGGTGATAGCCTTCGTCTGAGCTGC
GCCGCAAGCGGAGCCATTGTGCATGTGTTCGCTATGGGTTGGTTTCGCCAGGCACCTGGTAAAGAACGTGAATTTGTGGCATCCATTAACCTTGACAACGAC
GCTACCAACTATGCCGATTCTGTTAAAGGTCGCTTCACTATTTCACGCGATGATGCGCGTAATACCGTGTACTTACAGATGAACTCACTGAAACCTGAGGATA
CCGCCGTTTATTATTGTAATGCACCCTTCTGGATCAATAGTTCTGTTGTGGACTATTGGGGTCAGGGCACACAAGTCACGGTCTCAAGCGGCGGAAGCTCTG
GTGAACAGAAACTGATTTCAGAAG
AIVHVFA#LDNDA#TIFMDSDLG#qvqlvesggglvqagdslrlscaasgAIVHVFAmgwfrqapgkerefvasinLDNDAtnyadsvkgrftisrddarntvylqmnslkpedtavyycn
aTIFMDSDLGdywgqgtqvtvss#GGAGATATACCATGCAGGTTCAACTGGTTGAATCTGGTGGCGGTTTAGTTCAAGCCGGTGATAGCCTTCGTCTGAGCTGC
GCCGCAAGCGGAGCCATTGTGCATGTGTTCGCTATGGGTTGGTTTCGCCAGGCACCTGGTAAAGAACGTGAATTTGTGGCATCCATTAACCTTGACAACGAC
GCTACCAACTATGCCGATTCTGTTAAAGGTCGCTTCACTATTTCACGCGATGATGCGCGTAATACCGTGTACTTACAGATGAACTCACTGAAACCTGAGGATA
CCGCCGTTTATTATTGTAATGCAACCATCTTTATGGATTCCGATTTGGGTGACTATTGGGGTCAGGGCACACAAGTCACGGTCTCAAGCGGCGGAAGCTCTG
GTGAACAGAAACTGATTTCAGAAG
AIVHVFA#LDNDA#TIFMDSDLG#evqlvesggglvqagdslrlscaasgAIVHVFAmgwfrqapgkerefvasinLDNDAtnyadsvkgrftisrddvrntvylqmnslkpedtavyycna
TIFMDSDLGdywgqgtqvtvss#AGGAGATATACCATGGAAGTTCAACTGGTTGAATCTGGTGGCGGTTTAGTTCAAGCCGGTGATAGCCTTCGTCTGAGCTGC
GCCGCAAGCGGAGCCATTGTGCATGTGTTCGCTATGGGTTGGTTTCGCCAGGCACCTGGTAAAGAACGTGAATTTGTGGCATCCATTAACCTTGACAACGAC
GCTACCAACTATGCCGATTCTGTTAAAGGTCGCTTCACTATTTCACGCGATGATGTGCGTAATACCGTGTACTTACAGATGAACTCACTGAAACCTGAGGATA
CCGCCGTTTATTATTGTAATGCAACCATCTTTATGGATTCCGATTTGGGTGACTATTGGGGTCAGGGCACACAAGTCACGGTCTCAAGCGGCGGAAGCTCTG
GTGAACAGAAACTGATTTCAGAAG
AIVHVFA#LDNDA#TIFMDSDLG#evqlvesggglvqagdslrlscaasgAIVHVFAmgwfrqapgkerefvasinLDNDAtnyadsvkglftisrddarntvylqmnslkpedtavyycna
TIFMDSDLGdywgqgtqvtvss#GAAGGAGATATACCATGGAAGTTCAACTGGTTGAATCTGGTGGCGGTTTAGTTCAAGCCGGTGATAGCCTTCGTCTGAGCT
GCGCCGCAAGCGGAGCCATTGTGCATGTGTTCGCTATGGGTTGGTTTCGCCAGGCACCTGGTAAAGAACGTGAATTTGTGGCATCCATTAACCTTGACAAC
GACGCTACCAACTATGCCGATTCTGTTAAAGGTCTCTTCACTATTTCACGCGATGATGCGCGTAATACCGTGTACTTACAGATGAACTCACTGAAACCTGAGG
ATACCGCCGTTTATTATTGTAATGCAACCATCTTTATGGATTCCGATTTGGGTGACTATTGGGGTCAGGGCACACAAGTCACGGTCTCAAGCGGCGGAAGCT
CTGGTGAACAGAAACTGATTTCAGAAG
AIVHVFT#LDNDA#FCYVPLATC#evqlvesggglvqagdslrlscaasgAIVHVFTmgwfrqapgkerefvasinLDNDAtnyadsvkgrftisrddarntvylqmnslkpedtavyycna
GCYVPLATCdywgqgtqdtvss#ATACCATGGAAGTTCAACTGGTTGAATCTGGTGGCGGTTAGTTCAAGCCGGTGATAGCCTTCGTCTGAGCTGCGCCGCAA
GCGGAGCCATTGTGCATGTGTTCACTATGGGTTGGTTTCGCCAGGCACCTGGTAAAGAACGTGAATTTGTGGCATCCATTAACCTTGACAACGACGCTACCA
ACTATGCCGATTCTGTTAAAGGTCGCTTCACTATTTCACGCGATGATGCGCGTAATACCGTGTACTTACAGATGAACTCACTGAAACCTGAGGATACCGCCGT
TTATTATTGTAATGCATTCTGCTACGTCCCTTTGGCCACGTGTGACTATTGGGGTCAGGGCACACAAGACACGGTCTCAAGCGGCGGAAGCTCTGGTGAACA
GAAACTGATTTCAGAAG
AIVHVFA#LDNDA#TAISPISIVD#evqlvesggglvqagdslrlscaasgAIVHVFAmgwfrqapgkerefvasinLDNDAtnyadsvkgrftisrddarntvylqmnslkpedtavyccaa
TAISPISIVDeywgqgtqvtvss#ATACCATGGAAGTTCAACTGGTTGAATCTGGTGGCGGTTTAGTTCAAGCCGGTGATAGCCTTCGTCTGAGCTGCGCCGCAAG
CGGAGCCATTGTGCATGTGTTCGCTATGGGTTGGTTTCGCCAGGCACCTGGTAAAGAACGTGAATTTGTGGCATCCATTAACCTTGACAACGACGCTACCAA
CTATGCCGATTCTGTTAAGGGTCGCTTCACTATTTCACGCGATGATGCGCGTAATACCGTGTACTTACAGATGAACTCACTGAAACCTGAGGATACCGCCGTT
TATTGTTGTGCGGCAACGGCTATTAGCCCTATCTCTATTGTGGATGAGTATTGGGGTCAGGGCACACAAGTCACGGTCTCAAGCGGCGGAAGCTCTGGTGA
ACAGAAACTGATTTCAGAAG
AIVHVFA#LDNDA#TIFMDSDLG#evqlvesggglvqagdslrlscaasgAIVHVFAmgwfrqapgkerefvasinLDNDAtnyadsvkgrftisrddarytvylqmnslkpedtavyycna
TIFMDSDLGdywgqgtqvtvss#GAAGGAGATATACCATGGAAGTTCAACTGGTTGAATCTGGTGGCGGTTTAGTTCAAGCCGGTGATAGCCTTCGTCTGAGCT
GCGCCGCAAGCGGAGCCATTGTGCATGTGTTCGCTATGGGTTGGTTTCGCCAGGCACCTGGTAAAGAACGTGAATTTGTGGCATCCATTAACCTTGACAAC
GACGCTACCAACTATGCCGATTCTGTTAAAGGTCGCTTCACTATTTCACGCGATGATGCGCGTTATACCGTGTACTTACAGATGAACTCACTGAAACCTGAGG
ATACCGCCGTTTATTATTGTAATGCAACCATCTTTATGGATTCCGATTTGGGTGACTATTGGGGTCAGGGCACACAAGTCACGGTCTCAAGCGGCGGAAGCT
CTGGTGAACAGAAACTGATTTCAGAAG
AIVHVFA#LDNDA#TIFMDSDLG#kvqlvesggglvqagdslrlscaasgAIVHVFAmgwfrqapgkerefvasinLDNDAtnyadsvkgrftisrddarntvylqmnslkpedtavyycna
TIFMDSDLGdywgqgtqvtvss#GAAGGAGATATACCATGAAAGTTCAACTGGTTGAATCTGGTGGCGGTTTAGTTCAAGCCGGTGATAGCCTTCGTCTGAGCT
GCGCCGCAAGCGGAGCCATTGTGCATGTGTTCGCTATGGGTTGGTTTCGCCAGGCACCTGGTAAAGAACGTGAATTTGTGGCATCCATTAACCTTGACAAC
GACGCTACCAACTATGCCGATTCTGTTAAAGGTCGCTTCACTATTTCACGCGATGATGCGCGTAATACCGTGTACTTACAGATGAACTCACTGAAACCTGAG
GATACCGCCGTTTATTATTGTAATGCAACCATCTTTATGGATTCCGATTTGGGTGACTATTGGGGTCAGGGCACACAAGTCACGGTCTCAAGCGGCGGAAGC
TCTGGTGAACAGAAACTGATTTCAGAAG
AIVHVFA#LDNDA#TIFMDSDLG#evqlvesggglvqagdslrpscaasgAIVHVFAmgwfrqapgkerefvasinLDNDAtnytdsvkgrftisrddarntvylqmnslkpedtavyycn
aTIFMDSDLGdywgqgtqvtvss#GGAGATATACCATGGAAGTTCAACTGGTTGAATCTGGTGGCGGTTTAGTTCAAGCCGGTGATAGCCTTCGTCCGAGCTGC
GCCGCAAGCGGAGCCATTGTGCATGTGTTCGCTATGGGTTGGTTTCGCCAGGCACCTGGTAAAGAACGTGAATTTGTGGCATCCATTAACCTTGACAACGAC
GCTACCAACTATACCGATTCTGTTAAAGGTCGCTTCACTATTTCACGCGATGATGCGCGTAATACCGTGTACTTACAGATGAACTCACTGAAACCTGAGGATA
CCGCCGTTTATTATTGTAATGCAACCATCTTTATGGATTCCGATTTGGGTGACTATTGGGGTCAGGGCACACAAGTCACGGTCTCAAGCGGCGGAAGCTCTG
GTGAACAGAAACTGATTTCAGAAG
AIVHVFA#LDNDA#TIFMDSDLG#evqlvesggglvqagdslrlscaasgAIVHVFAmgwfrqapgkerefvasinLDNDAtnyadsvkgrftisrddarntvylqmnslkpedtavyycna
TIFMDSDLGdywgqgpqvtvss#AAGGAGATATACCATGGAAGTTCAACTGGTTGAATCTGGTGGCGGTTTAGTTCAAGCCGGTGATAGCCTTCGTCTGAGCTG
CGCCGCAAGCGGAGCCATTGTGCATGTGTTCGCTATGGGTTGGTTTCGCCAGGCACCTGGTAAAGAACGTGAATTTGTGGCATCCATTAACCTTGACAACGA
CGCTACCAACTATGCCGATTCTGTTAAAGGTCGCTTCACTATTTCACGCGATGATGCGCGTAATACCGTGTACTTACAGATGAACTCACTGAAACCTGAGGAT
ACCGCCGTTTATTATTGTAATGCAACCATCTTTATGGATTCCGATTTGGGTGACTATTGGGGTCAGGGCCCACAAGTCACGGTCTCAAGCGGCGGAAGCTCT
GGTGAACAGAAACTGATTTCAGAAG
AIVHVFA#LDNDA#TIFMDSDLG#evqlvesggglvqagdslrlscaasgAIVHVFAmgwfrqapgkerefvasinLDNDAtnyadsvkgrftisrydarntvylqmnslkpedtavyycna
TIFMDSDLGdywgqgtqvtvss#AGATATACCATGGAAGTTCAACTGGTTGAATCTGGTGGCGGTTTAGTTCAAGCCGGTGATAGCCTTCGTCTGAGCTGCGCC
GCAAGCGGAGCCATTGTGCATGTGTTCGCTATGGGTTGGTTTCGCCAGGCACCTGGTAAAGAACGTGAATTTGTGGCATCCATTAACCTTGACAACGACGCT
ACCAACTATGCCGATTCTGTTAAAGGTCGCTTCACTATTTCACGCTATGATGCGCGTAATACCGTGTACTTACAGATGAACTCACTGAAACCTGAGGATACCG
CCGTTTATTATTGTAATGCAACCATCTTTATGGATTCCGATTTGGGTGACTATTGGGGTCAGGGCACACAAGTCACGGTCTCAAGCGGCGGAAGCTCTGGTG
AACAGAAACTGATTTCAGAAG
AIVHVFA#LDNDA#TAISPISIVD#evqlvesggglvqagdslrlscaasgAIVHVFAmgwfrqapgkerefvasinLDNDAtnyadsvkgrftisrddarntvylqmnslkpedtavyycva
TAISPISIVDeywgqgtqvtvss#GGAGATATACCATGGAAGTTCAACTGGTTGAATCTGGTGGCGGTTTAGTTCAAGCCGGTGATAGCCTTCGTCTGAGCTGCGC
CGCAAGCGGAGCCATTGTGCATGTGTTCGCTATGGGTTGGTTTCGCCAGGCACCTGGTAAAGAACGTGAATTTGTGGCATCCATTAACCTTGACAACGACGC
TACCAACTATGCCGATTCTGTTAAAGGTCGCTTCACTATTTCACGCGATGATGCGCGTAATACCGTGTACTTACAGATGAACTCACTGAAACCTGAGGATACC
GCCGTTTATTATTGTGTGGCAACGGCTATTAGCCCTATCTCTATTGTGGATGAGTATTGGGGTCAGGGCACACAAGTCACGGTCTCAAGCGGCGGAAGCTCT
GGTGAACAGAAACTGATTTCAGAAG
AIVHVFA#LDNDA#TIFMDSDLG#evqlvesggglvqagdslrqscaasgAIVHVFAmgwfrqapgkerefvasinLDNDAtnyadsvkgrftisrddarntvylqmnslkpedtavyycn
aTIFMDSDLGdywgqgtqvtvss#GGAGATATACCATGGAAGTTCAACTGGTTGAATCTGGTGGCGGTTTAGTTCAAGCCGGTGATAGCCTTCGTCAGAGCTGC
GCCGCAAGCGGAGCCATTGTGCATGTGTTCGCTATGGGTTGGTTTCGCCAGGCACCTGGTAAAGAACGTGAATTTGTGGCATCCATTAACCTTGACAACGAC
GCTACCAACTATGCCGATTCTGTTAAAGGTCGCTTCACTATTTCACGCGATGATGCGCGTAATACCGTGTACTTACAGATGAACTCACTGAAACCTGAGGATA
CCGCCGTTTATTATTGTAATGCAACCATCTTTATGGATTCCGATTTGGGTGACTATTGGGGTCAGGGCACACAAGTCACGGTCTCAAGCGGCGGAAGCTCTG
GTGAACAGAAACTGATTTCAGAAG
AIVHVFA#LDNDA#TIFMDSDLG#evqlvesggglvqagdslrlscaasgAIVHVFAmgwfrqapgkerefvasinLDNDAtnyadsvkgrftisrddarntmylqmnslkpedtavyycn
aTIFMDSDLGdywgqgtqvtvss#ATATACCATGGAAGTTCAACTGGTTGAATCTGGTGGCGGTTTAGTTCAAGCCGGTGATAGCCTTCGTCTGAGCTGCGCCGC
AAGCGGAGCCATTGTGCATGTGTTCGCTATGGGTTGGTTTCGCCAGGCACCTGGTAAAGAACGTGAATTTGTGGCATCCATTAACCTTGACAACGACGCTAC
CAACTATGCCGATTCTGTTAAAGGTCGCTTCACTATTTCACGCGATGATGCGCGTAATACCATGTACTTACAGATGAACTCACTGAAACCTGAGGATACCGCC
GTTTATTATTGTAATGCAACCATCTTTATGGATTCCGATTTGGGTGACTATTGGGGTCAGGGCACACAAGTCACGGTCTCAAGCGGCGGAAGCTCTGGTGAA
CAGAAACTGATTTCAGAAG
AIVHVFA#LDNDA#ACSDYTYGSHGVR#evqlvesggglvqagdslrlscaasgAIVHVFAmgwfrqapgkerefvasinLDNDAtnyadsvkgrftisrddarntvylqmnslkpedtav
yycnaACSDYTYGSHGVRdswgqgtqvtvss#AGGAGATATACCATGGAAGTTCAACTGGTTGAATCTGGTGGCGGTTTAGTTCAAGCCGGTGATAGCCTTCGTC
TGAGCTGCGCCGCAAGCGGAGCCATTGTGCATGTGTTCGCTATGGGTTGGTTTCGCCAGGCACCTGGTAAAGAACGTGAATTTGTGGCATCCATTAACCTTG
ACAACGACGCTACCAACTATGCCGATTCTGTTAAAGGTCGCTTCACTATTTCACGCGATGATGCGCGTAATACCGTGTACTTACAGATGAACTCACTGAAACC
TGAGGATACCGCCGTTTATTATTGTAATGCAGCGTGTTCGGACTATACGTATGGCTCTCATGGTGTTCGGGACTCTTGGGGTCAGGGCACACAAGTCACGGT
CTCAAGCGGCGGAAGCTCTGGTGAACAGAAACTGATTTCAGAAG
AIVHVFA#LDNDA#TIFMDSDLG#evqlvesggglvqagdslrlscaasgAIVHVFAmgwfrqapgkerefvasinLDNDAtnyadsvkgrftisrddarntvylqmnslkpedtavyycna
TIFMDSDLGdywgqgkqvtvss#ACCATGGAAGTTCAACTGGTTGAATCTGGTGGCGGTTTAGTTCAAGCCGGTGATAGCCTTCGTCTGAGCTGCGCCGCAAGC
GGAGCCATTGTGCATGTGTTCGCTATGGGTTGGTTTCGCCAGGCACCTGGTAAAGAACGTGAATTTGTGGCATCCATTAACCTTGACAACGACGCTACCAAC
TATGCCGATTCTGTTAAAGGTCGCTTCACTATTTCACGCGATGATGCGCGTAATACCGTGTACTTACAGATGAACTCACTGAAACCTGAGGATACCGCCGTTT
ATTATTGTAATGCAACCATCTTTATGGATTCCGATTTGGGTGACTATTGGGGTCAGGGCAAACAAGTCACGGTCTCAAGCGGCGGAAGCTCTGGTGAACAG
AAACTGATTTCAGAAG
AIVHVFA#LDNDA#WSFTPSICTL#evqlvesggglvqagdslrlscaasgAIVHVFAmgwfrqapgkerefvasinLDNDAtnyadsvkgrftisrddarntvylqmnslkpedtavyyca
aWSFTPSICTLeywgqgtqvtvss#ACCATGGAAGTTCAACTGGTTGAATCTGGTGGCGGTTTAGTTCAAGCCGGTGATAGCCTTCGTCTGAGCTGCGCCGCAAG
CGGAGCCATTGTGCATGTGTTCGCTATGGGTTGGTTTCGCCAGGCACCTGGTAAAGAACGTGAATTTGTGGCATCCATTAACCTTGACAACGACGCTACCAA
CTATGCCGATTCTGTTAAAGGTCGCTTCACTATTTCACGCGATGATGCGCGTAATACCGTGTACTTACAGATGAACTCACTGAAACCTGAGGATACCGCCGTT
TATTATTGTGCGGCATGGAGTTTCACCCCTTCTATCTGTACCTTGGAGTATTGGGGTCAGGGCACACAAGTCACGGTCTCAAGCGGCGGAAGCTCTGGTGAA
CAGAAACTGATTTCAGAAG
AIVHVFA#LDNDA#TIFMDSVLG#evqlvesggglvqagdslrlscaasgAIVHVFAmgwfrqapgkerefvasinLDNDAtnyadsvkgrftisrddarntvylqmnslkpedtavyycna
TIFMDSVLGdywgqgtqvtvss#ACCATGGAAGTTCAACTGGTTGAATCTGGTGGCGGTTTAGTTCAAGCCGGTGATAGCCTTCGTCTGAGCTGCGCCGCAAGC
GGAGCCATTGTGCATGTGTTCGCTATGGGTTGGTTTCGCCAGGCACCTGGTAAAGAACGTGAATTTGTGGCATCCATTAACCTTGACAACGACGCTACCAAC
TATGCCGATTCTGTTAAAGGTCGCTTCACTATTTCACGCGATGATGCGCGTAATACCGTGTACTTACAGATGAACTCACTGAAACCTGAGGATACCGCCGTTT
ATTATTGTAATGCAACCATCTTTATGGATTCCGTTTTGGGTGACTATTGGGGTCAGGGCACACAAGTCACGGTCTCAAGCGGCGGAAGCTCTGGTGAACAGA
AACTGATTTCAGAAG
AIVHVFA#LDNDA#PFWINSSVV#evqlvesggglvqagdslrlscaasgAIVHVFAmgwfrqapgkerefvasinLDNDAtnyadsvkgrftisrddahntvylqmnslkpedtavyycn
aPFWINSSVVdylgqgtqvtvss#AGATATACCATGGAAGTTCAACTGGTTGAATCTGGTGGCGGTTTAGTTCAAGCCGGTGATAGCCTTCGTCTGAGCTGCGCC
GCAAGCGGAGCCATTGTGCATGTGTTCGCTATGGGTTGGTTTCGCCAGGCACCTGGTAAAGAACGTGAATTTGTGGCATCCATTAACCTTGACAACGACGCT
ACCAACTATGCCGATTCTGTTAAAGGTCGCTTCACTATTTCACGCGATGATGCGCATAATACCGTGTACTTACAGATGAACTCACTGAAACCTGAGGATACCG
CCGTTTATTATTGTAATGCACCCTTCTGGATCAATAGTTCTGTTGTGGACTATTTGGGTCAGGGCACACAAGTCACGGTCTCAAGCGGCGGAAGCTCTGGTG
AACAGAAACTGATTTCAGAAG
AIVHVFA#LDNDA#PFWINSSVV#evqlvesggglvqagdslrlscaasgAIVHVFAmgwfrqapgkerefvasinLDNDAtnyadsvkgrftisrddahntvylqmnslkpedtavyycn
aPFWINSSVVdywgqgtqvtvsr#AAGGAGATATACCATGGAAGTTCAACTGGTTGAATCTGGTGGCGGTTTAGTTCAAGCCGGTGATAGCCTTCGTCTGAGCT
GCGCCGCAAGCGGAGCCATTGTGCATGTGTTCGCTATGGGTTGGTTTCGCCAGGCACCTGGTAAAGAACGTGAATTTGTGGCATCCATTAACCTTGACAAC
GACGCTACCAACTATGCCGATTCTGTTAAAGGTCGCTTCACTATTTCACGCGATGATGCGCATAATACCGTGTACTTACAGATGAACTCACTGAAACCTGAGG
ATACCGCCGTTTATTATTGTAATGCACCCTTCTGGATCAATAGTTCTGTTGTGGACTATTGGGGTCAGGGCACACAAGTCACGGTCTCACGCGGCGGAAGCT
CTGGTGAACAGAAACTGATTTCAGAAG
AIVHVFA#LDNDA#TIFMDSDLG#evqlvesgvglvqagdslrlscaasgAIVHVFAmgwfrqapgkerefvasinLDNDAtnyadsvkgrftisrddarntvylqmnslkpedtavyycna
TIFMDSDLGdywgqgtqvtvss#AGGAGATATACCATGGAAGTTCAACTGGTTGAATCTGGTGTCGGTTTAGTTCAAGCCGGTGATAGCCTTCGTCTGAGCTGC
GCCGCAAGCGGAGCCATTGTGCATGTGTTCGCTATGGGTTGGTTTCGCCAGGCACCTGGTAAAGAACGTGAATTTGTGGCATCCATTAACCTTGACAACGAC
GCTACCAACTATGCCGATTCTGTTAAAGGTCGCTTCACTATTTCACGCGATGATGCGCGTAATACCGTGTACTTACAGATGAACTCACTGAAACCTGAGGATA
CCGCCGTTTATTATTGTAATGCAACCATCTTTATGGATTCCGATTTGGGTGACTATTGGGGTCAGGGCACACAAGTCACGGTCTCAAGCGGCGGAAGCTCTG
GTGAACAGAAACTGATTTCAGAAG
AIVHVFA#LDNDA#TIFMDSDLG#evqlvesggglvhagdslrlscaasgAIVHVFAmgwfrqapgkerefvasinLDNDAtnyadsvkgrftisrddarntvylqmnslkpedtavyycna
TIFMDSDLGdywgqgtqvtvss#GAAGGAGATATACCATGGAAGTTCAACTGGTTGAATCTGGTGGCGGTTTAGTTCACGCCGGTGATAGCCTTCGTCTGAGCT
GCGCCGCAAGCGGAGCCATTGTGCATGTGTTCGCTATGGGTTGGTTTCGCCAGGCACCTGGTAAAGAACGTGAATTTGTGGCATCCATTAACCTTGACAAC
GACGCTACCAACTATGCCGATTCTGTTAAAGGTCGCTTCACTATTTCACGCGATGATGCGCGTAATACCGTGTACTTACAGATGAACTCACTGAAACCTGAG
GATACCGCCGTTTATTATTGTAATGCAACCATCTTTATGGATTCCGATTTGGGTGACTATTGGGGTCAGGGCACACAAGTCACGGTCTCAAGCGGCGGAAGC
TCTGGTGAACAGAAACTGATTTCAGAAG
AIVHVFA#LDNDA#TIFMDSDLG#evqlvdsggglvhagdrIrlscaasgAIVHVFAmgwfrqapgkerefvasinLDNDAtnyadsvkgrftisrddarntvylqmnslkpedtavyycna
TIFMDSDLGdywgqgtqvtvss#GAAGGAGATATACCATGGAAGTTCAACTGGTTGACTCTGGTGGCGGTTTAGTTCACGCCGGTGATCGCCTTCGTCTGAGCT
GCGCCGCAAGCGGAGCCATTGTGCATGTGTTCGCTATGGGTTGGTTTCGCCAGGCACCTGGTAAAGAACGTGAATTTGTGGCATCCATTAACCTTGACAAC
GACGCTACCAACTATGCCGATTCTGTTAAAGGTCGCTTCACTATTTCACGCGATGATGCGCGTAATACCGTGTACTTACAGATGAACTCACTGAAACCTGAG
GATACCGCCGTTTATTATTGTAATGCAACCATCTTTATGGATTCCGATTTGGGTGACTATTGGGGTCAGGGCACACAAGTCACGGTCTCAAGCGGCGGAAGC
TCTGGTGAACAGAAACTGATTTCAGAAG
AIVHVFA#LDNDA#TIFMDSDLG#evqlvesggglvqasdslrlscaasgAIVHVFAmgwfrqapgkerefvasinLDNDAtnyadsvkgrftisrddarntvylqmnslkpedtavyycna
TIFMDSDLGdywgqgtqvtvss#AAGGAGATATACCATGGAAGTTCAACTGGTTGAATCTGGTGGCGGTTTAGTTCAAGCCAGTGATAGCCTTCGTCTGAGCTG
CGCCGCAAGCGGAGCCATTGTGCATGTGTTCGCTATGGGTTGGTTTCGCCAGGCACCTGGTAAAGAACGTGAATTTGTGGCATCCATTAACCTTGACAACGA
CGCTACCAACTATGCCGATTCTGTTAAAGGTCGCTTCACTATTTCACGCGATGATGCGCGTAATACCGTGTACTTACAGATGAACTCACTGAAACCTGAGGAT
ACCGCCGTTTATTATTGTAATGCAACCATCTTTATGGATTCCGATTTGGGTGACTATTGGGGTCAGGGCACACAAGTCACAGTCTCAAGCGGCGGAAGCTCT
GGTGAACAGAAACTGATTTCAGAAG
AIVHVFA#LDNDA#LENPHIASKY#evqlvesggglvqagdslrlscaasgAIVHVFAmgwfrqapgkerefvasinLDNDAtnyadsvkgrftisrddahntvylqmnslkpedtavyyca
aLENPHIASKYdywgqgtqvtvss#ATACCATGGAAGTTCAACTGGTTGAATCTGGTGGCGGTTTAGTTCAAGCCGGTGATAGCCTTCGTCTGAGCTGCGCCGCA
AGCGGAGCCATTGTGCATGTGTTCGCTATGGGTTGGTTTCGCCAGGCACCTGGTAAAGAACGTGAATTTGTGGCATCCATTAACCTTGACAACGACGCTACC
AACTATGCCGATTCTGTTAAAGGTCGCTTCACTATTTCACGCGATGATGCGCATAATACCGTGTACTTACAGATGAACTCACTGAAACCTGAGGATACCGCCG
TTTATTATTGTGCGGCACTCGAGAACCCCCACATTGCGTCCAAGTATGACTATTGGGGTCAGGGCACACAAGTCACGGTCTCAAGCGGCGGAAGCTCTGGT
GAACAGAAACTGATTTCAGAAG
AIVHVFA#LDNDA#PFWINSSVV#evqlvesggglvqagdslrlrcaasgAIVHVFAmgwfrqapgkerefvasinLDNDAtnyadsvkgrftisrddahntvylqmnslkpedtavyycn
aPFWINSSVVdywgqgtqvtvss#AGGAGATATACCATGGAAGTTCAACTGGTTGAATCTGGTGGCGGTTTAGTTCAAGCCGGTGATAGCCTTCGTCTGCGCTG
CGCCGCAAGCGGAGCCATTGTGCATGTGTTCGCTATGGGTTGGTTTCGCCAGGCACCTGGTAAAGAACGTGAATTTGTGGCATCCATTAACCTTGACAACGA
CGCTACCAACTATGCCGATTCTGTTAAAGGTCGCTTCACTATTTCACGCGATGATGCGCATAATACCGTGTACTTACAGATGAACTCACTGAAACCTGAGGAT
ACCGCCGTTTATTATTGTAATGCACCCTTCTGGATCAATAGTTCTGTTGTGGACTATTGGGGTCAGGGCACACAAGTCACGGTCTCAAGCGGCGGAAGCTCT
GGTGAACAGAAACTGATTTCAGAAG
AIVHVFA#LDNDA#PFWINSSVV#evqlvesggglvqagdslrlscaasgAIVHVFAmgwfrqapgkerefvasinLDNDAtnyadsvkgrftisrddahntvflqmnslkpedtavyycn
aPFWINSSVVddwgqgtqvtvss#GAAGGAGATATACCATGGAAGTTCAACTGGTTGAATCTGGTGGCGGTTTAGTTCAAGCCGGTGATAGCCTTCGTCTGAGC
TGCGCCGCAAGCGGAGCCATTGTGCATGTGTTCGCTATGGGTTGGTTTCGCCAGGCACCTGGTAAAGAACGTGAATTTGTGGCATCCATTAACCTTGACAAC
GACGCTACCAACTATGCCGATTCTGTTAAAGGTCGCTTCACTATTTCACGCGATGATGCGCATAATACCGTGTTCTTACAGATGAACTCACTGAAACCTGAGG
ATACCGCCGTTTATTATTGTAATGCTCCCTTCTGGATCAATAGTTCTGTTGTGGACGATTGGGGTCAGGGCACACAAGTCACGGTCTCAAGCGGCGTAAGCT
CTGGTGAATAGAAACTGATTTCAGAAG
AIVHVFA#LDNDA#TIFMDSDLG#evqlvesggglvqagdslrlscaasgAIVHVFAmgwfrqapgkerefvasinLDNDAtnyadsvkgrftisrddarntvylqmnslkpedtavyycna
TIFMDSDLGeywgqgtqvtvas#ATATACCATGGAAGTTCAACTGGTTGAATCTGGTGGCGGTTTAGTTCAAGCCGGTGATAGCCTTCGTCTGAGCTGCGCCGC
AAGCGGAGCCATTGTGCATGTGTTCGCTATGGGTTGGTTTCGCCAGGCACCTGGTAAAGAACGTGAATTTGTGGCATCCATTAACCTTGACAACGACGCTAC
CAACTATGCCGATTCTGTTAAAGGTCGCTTCACTATTTCACGCGATGATGCGCGTAATACCGTGTACTTACAGATGAACTCACTGAAACCTGAGGATACCGCC
GTTTATTATTGTAATGCAACCATCTTTATGGATTCCGATTTGGGTGAATATTGGGGGCAGGGCACACAAGTCACGGTCGCAAGCGGCGGAAGCTCTGGGGA
ACAGAAACTGATTTCAGAAG
AIVHVFA#LDNDA#TAISPISIVD#qvqlvesggglvqagdslrlscaasgAIVHVFAmgwfrqapgkerefvasinLDNDAtnyadsvkgrftisrddarntvylqmnslkpedtavyycaa
TAISPISIVDeywgqgtqvtvss#GGAGATATACCATGCAGGTTCAACTGGTTGAATCTGGTGGCGGTTTAGTTCAAGCCGGTGATAGCCTTCGTCTGAGCTGCGC
CGCAAGCGGAGCCATTGTGCATGTGTTCGCTATGGGTTGGTTTCGCCAGGCACCTGGTAAAGAACGTGAATTTGTGGCATCCATTAACCTTGACAACGACGC
TACCAACTATGCCGATTCTGTTAAAGGTCGCTTCACTATTTCACGCGATGATGCGCGTAATACCGTGTACTTACAGATGAACTCACTGAAACCTGAGGATACC
GCCGTTTATTATTGTGCGGCAACGGCTATTAGCCCTATCTCTATTGTGGATGAGTATTGGGGTCAGGGCACACAAGTCACGGTCTCAAGCGGCGGAAGCTCT
GGTGAACAGAAACTGATTTCAGAAG
AIVHVFA#LDNDA#TIFMDSDLG#evqlvesggglvqagdslrlscaasgAIVHVFAmgwfrqapgkerefvasinLDNDAtnyadsvkgrftisrddarntvylqmnslkpedtavyycna
TIFMDSDLGdyggqgtqvtvss#ACCATGGAAGTTCAACTGGTTGAATCTGGTGGCGGTTTAGTTCAAGCCGGTGATAGCCTTCGTCTGAGCTGCGCCGCAAGC
GGAGCCATTGTGCATGTGTTCGCTATGGGTTGGTTTCGCCAGGCACCTGGTAAAGAACGTGAATTTGTGGCATCCATTAACCTTGACAACGACGCTACCAAC
TATGCCGATTCTGTTAAAGGTCGCTTCACTATTTCACGCGATGATGCGCGTAATACCGTGTACTTACAGATGAACTCACTGAAACCTGAGGATACCGCCGTTT
ATTATTGTAATGCAACCATCTTTATGGATTCCGATTTGGGTGACTATGGGGGTCAGGGCACACAAGTCACGGTCTCAAGCGGCGGAAGCTCTGGGGAACAG
AAACTGATTTCAGAAG
AIVHVFA#LDNDA#TIFMDSDLG#evqlvesggglvqagdslrlscaasgAIVHVFAmgwfrqapgkerefvasinLDNDAtnyadsvkgrftisrddarntvylqmnslkpedtavyycna
TIFMDSDLGdywgqgtqvtvas#ATACCATGGAAGTTCAACTGGTTGAATCTGGTGGCGGTTTAGTTCAAGCCGGTGATAGCCTTCGTCTGAGCTGCGCCGCAA
GCGGAGCCATTGTGCATGTGTTCGCTATGGGTTGGTTTCGCCAGGCACCTGGTAAAGAACGTGAATTTGTGGCATCCATTAACCTTGACAACGACGCTACCA
ACTATGCCGATTCTGTTAAAGGTCGCTTCACTATTTCACGCGATGATGCGCGTAATACCGTGTACTTACAGATGAACTCACTGAAACCTGAGGATACCGCCGT
TTATTATTGTAATGCAACCATCTTTATGGATTCCGATTTGGGTGACTATTGGGGGCAGGGCACACAAGTCACGGTCGCAAGCGGCGGAAGCTCTGGGGAAC
AGAAACTGATTTCAGAAG
AIVHVFA#LDNDA#TIFMDSDLG#evqlvesggglvqagdslrlscaasgAIVHVFAmgwlrqapgkerefvasinLDNDAtnyadsvkgrftisrddarntvylqmnslkpedtavyycna
TIFMDSDLGdywgqgtqvtvss#ATACCATGGAAGTTCAACTGGTTGAATCTGGTGGCGGTTTAGTTCAAGCCGGTGATAGCCTTCGTCTGAGCTGCGCCGCAA
GCGGAGCCATTGTGCATGTGTTCGCTATGGGTTGGCTTCGCCAGGCACCTGGTAAAGAACGTGAATTTGTGGCATCCATTAACCTTGACAACGACGCTACCA
ACTATGCCGATTCTGTTAAAGGTCGCTTCACTATTTCACGCGATGATGCGCGTAATACCGTGTACTTACAGATGAACTCACTGAAACCTGAGGATACCGCCGT
TTATTATTGTAATGCAACCATCTTTATGGATTCCGATTTGGGTGACTATTGGGGTCAGGGCACACAAGTCACGGTCTCAAGCGGCGGAAGCTCTGGTGAACA
GAAACTGATTTCAGAAG
AIVHVFA#LDNDA#TAISPISIVD#evqlvesggglvhagdslrlscaasgAIVHVFAmgwfrqapgkerefvasinLDNDAtnyadsvkgrftisrddarntvylqmnslkpedtavyycaa
TAISPISIVDeywgqgtqvtvss#GAAGGAGATATACCATGGAAGTTCAACTGGTTGAATCTGGTGGCGGTTTAGTTCACGCCGGTGATAGCCTTCGTCTGAGCTG
CGCCGCAAGCGGAGCCATTGTGCATGTGTTCGCTATGGGTTGGTTTCGCCAGGCACCTGGTAAAGAACGTGAATTTGTGGCATCCATTAACCTTGACAACGA
CGCTACCAACTATGCCGATTCTGTTAAAGGTCGCTTCACTATTTCACGCGATGATGCGCGTAATACCGTGTACTTACAGATGAACTCACTGAAACCTGAGGAT
ACCGCCGTTTATTATTGTGCGGCAACGGCTATTAGCCCTATCTCTATTGTGGATGAGTATTGGGGTCAGGGCACACAAGTCACGGTCTCAAGCGGCGGAAG
CTCTGGTGAACAGAAACTGATTTCAGAAG
AIVHVFA#LDNDA#WSFTPSICTL#evqlvesggglvqagdslrlscaasgAIVHVFAmgwfrqapgkerefvasinLDNDAtnyadsvkgrftisrddarntvylqmnslkpedtavyyca
aWSFTPSICTLeywgqgtqvtvsr#AGATATACCATGGAAGTTCAACTGGTTGAATCTGGTGGCGGTTTAGTTCAAGCCGGTGATAGCCTTCGTCTGAGCTGCGC
CGCAAGCGGAGCCATTGTGCATGTGTTCGCTATGGGTTGGTTTCGCCAGGCACCTGGTAAAGAACGTGAATTTGTGGCATCCATTAACCTTGACAACGACGC
TACCAACTATGCCGATTCTGTTAAAGGTCGCTTCACTATTTCACGCGATGATGCGCGTAATACCGTGTACTTACAGATGAACTCACTGAAACCTGAGGATACC
GCCGTTTATTATTGTGCGGCATGGAGTTTCACCCCTTCTATCTGTACCTTGGAGTATTGGGGTCAGGGCACACAAGTCACGGTCTCAAGGGGCGGAAGCTCT
GGTGAACAGAAACTGATTTCAGAAG
AIVHVFA#LDNDA#TIFMDSDLG#evqlvesggglvqagdslrlscaasgAIVHVFAmgwfrqapgkerefvasinLDNDAtnyadsvkgrftnsrddarntvylqmnslkpedtavyycn
aTIFMDSDLGdywgqgtqvtvss#AAGGAGATATACCATGGAAGTTCAACTGGTTGAATCTGGTGGCGGTTTAGTTCAAGCCGGTGATAGCCTTCGTCTGAGCT
GCGCCGCAAGCGGAGCCATTGTGCATGTGTTCGCTATGGGTTGGTTTCGCCAGGCACCTGGTAAAGAACGTGAATTTGTGGCATCCATTAACCTTGACAAC
GACGCTACCAACTATGCCGATTCTGTTAAAGGTCGCTTCACTAATTCACGCGATGATGCGCGTAATACCGTGTACTTACAGATGAACTCACTGAAACCTGAG
GATACCGCCGTTTATTATTGTAATGCAACCATCTTTATGGATTCCGATTTGGGTGACTATTGGGGTCAGGGCACACAAGTCACGGTCTCAAGCGGCGGAAGC
TCTGGTGAACAGAAACTGATTTCAGAAG
FCYVPLATCaywgqgtqvtvss#ATACCATGGAAGTTCAACTGGTTGAATCTGGTGGCGGTTTAGTTCAAGCCGGTGATAGCCTTCGTCTGAGCTGCGCCGCAAG
AIVHVFA#LDNDA#FCYVPLATC#evqlvesggglvqagdslrlscaasgAIVHVFAmgwfrqapgkerefvasinLDNDAtnyadsvkgrftisrddarntvylqmnslkpedtavyycna
CGGAGCCATTGTGCATGTGTTCGCTATGGGTTGGTTTCGCCAGGCACCTGGTAAAGAACGTGAATTTGTGGCATCCATTAACCTTGACAACGACGCTACCAA
CTATGCCGATTCTGTTAAAGGTCGCTTCACTATTTCACGCGATGATGCGCGTAATACCGTGTACTTACAGATGAACTCACTGAAACCTGAGGATACCGCCGTT
TATTATTGTAATGCATTCTGCTACGTCCCTTTGGCCACGTGTGCCTATTGGGGTCAGGGCACACAAGTCACGGTCTCAAGCGGCGGAAGCTCTGGTGAACAG
AAACTGATTTCAGAAG
AIVHVFA#LDNDA#ACSDYTYGSHGVR#evqlvesggglvqagdslrlscaasgAIVHVFAmgwfrqapgkerkfvasinLDNDAtnyadsvkgrftisrddarntvylqmnslkpedtav
yycnaACSDYTYGSHGVRdswgqgtqvtvss#ACCATGGAAGTTCAACTGGTTGAATCTGGTGGCGGTTTAGTTCAAGCCGGTGATAGCCTTCGTCTGAGCTGCG
CCGCAAGCGGAGCCATTGTGCATGTGTTCGCTATGGGTTGGTTTCGCCAGGCACCTGGTAAAGAACGTAAATTTGTGGCATCCATTAACCTTGACAACGACG
CTACCAACTATGCCGATTCTGTTAAAGGTCGCTTCACTATTTCACGCGATGATGCGCGTAATACCGTGTACTTACAGATGAACTCACTGAAACCTGAGGATAC
CGCCGTTTATTATTGTAATGCAGCGTGTTCGGACTATACGTATGGCTCTCATGGTGTTCGGGACTCTTGGGGTCAGGGCACACAAGTCACGGTCTCAAGCGG
CGGAAGCTCTGGTGAACAGAAACTGATTTCAGAAG
AIAHVFA#LDNDA#TIFMDSDLG#evqlvesggglvqagdslrlscaasgAIAHVFAmgwfrqapgkerefvasinLDNDAtnyadsvkgrftisrddarntvylqmnslkpedtavyycn
aTIFMDSDLGdywgqgtqvtvss#GGAGATATACCATGGAAGTTCAACTGGTTGAATCTGGTGGCGGTTTAGTTCAAGCCGGTGATAGCCTTCGTCTGAGCTGC
GCCGCAAGCGGAGCCATTGCGCATGTGTTCGCTATGGGTTGGTTTCGCCAGGCACCTGGTAAAGAACGTGAATTTGTGGCATCCATTAACCTTGACAACGA
CGCTACCAACTATGCCGATTCTGTTAAAGGTCGCTTCACTATTTCACGCGATGATGCGCGTAATACCGTGTACTTACAGATGAACTCACTGAAACCTGAGGAT
ACCGCCGTTTATTATTGTAATGCAACCATCTTTATGGATTCCGATTTGGGTGACTATTGGGGTCAGGGCACACAAGTCACGGTCTCAAGCGGCGGAAGCTCT
GGTGAACAGAAACTGATTTCAGAAG
AIVHVFA#LDNDA#TIFMDSDLG#evqlvesggglvqagdslrlscaasgAIVHVFAmgwfrqapgkerefvasinLDNDAtnyadsvkgrftisrddarntvylqmnslkpedtavyycna
TIFMDSDLGdywghgtqvtvss#ACCATGGAAGTTCAACTGGTTGAATCTGGTGGCGGTTTAGTTCAAGCCGGTGATAGCCTTCGTCTGAGCTGCGCCGCAAGC
GGAGCCATTGTGCATGTGTTCGCTATGGGTTGGTTTCGCCAGGCACCTGGTAAAGAACGTGAATTTGTGGCATCCATTAACCTTGACAACGACGCTACCAAC
TATGCCGATTCTGTTAAAGGTCGCTTCACTATTTCACGCGATGATGCGCGTAATACCGTGTACTTACAGATGAACTCACTGAAACCTGAGGATACCGCCGTTT
ATTATTGTAATGCAACCATCTTTATGGATTCCGATTTGGGTGACTATTGGGGTCATGGCACACAAGTCACGGTCTCAAGCGGCGGAAGCTCTGGTGAACAGA
AACTGATTTCAGAAG
AIVHVFA#LDNDA#TIFMDSDLG#evqlvesggglvpagdslrlscaasgAIVHVFAmgwfrqapgkerefvasinLDNDAtnyadsvkgrftisrddarntvylqmnslkpedtavyycna
TIFMDSDLGdywgqgtqvtvss#GGAGATATACCATGGAAGTTCAACTGGTTGAATCTGGTGGCGGTTTAGTTCCAGCCGGTGATAGCCTTCGTCTGAGCTGCG
CCGCAAGCGGAGCCATTGTGCATGTGTTCGCTATGGGTTGGTTTCGCCAGGCACCTGGTAAAGAACGTGAATTTGTGGCATCCATTAACCTTGACAACGACG
CTACCAACTATGCCGATTCTGTTAAAGGTCGCTTCACTATTTCACGCGATGATGCGCGTAATACCGTGTACTTACAGATGAACTCACTGAAACCTGAGGATAC
CGCCGTTTATTATTGTAATGCAACCATCTTTATGGATTCCGATTTGGGTGACTATTGGGGTCAGGGCACACAAGTCACGGTCTCAAGCGGCGGAAGCTCTGG
TGAACAGAAACTGATTTCAGAAG
AIVHVFA#LDNDA#PFWINSSVV#evqlvesggglvqagdslrlscaasgAIVHVFAmgwfrqapgkerefvasinLDNDAtnyadsvkgrftisrddarntvylqmnslkpedtavyycn
aPFWINSSVVdywgqgtqvtvss#AGGAGATATACCATGGAAGTTCAACTGGTTGAATCTGGTGGCGGTTTAGTTCAAGCCGGTGATAGCCTTCGTCTGAGCTG
CGCCGCAAGCGGAGCCATTGTGCATGTGTTCGCTATGGGTTGGTTTCGCCAGGCACCTGGTAAAGAACGTGAATTTGTGGCATCCATTAACCTTGACAACGA
CGCTACCAACTATGCCGATTCTGTTAAAGGTCGCTTCACTATTTCACGCGATGATGCGCGTAATACCGTGTACTTACAGATGAACTCACTGAAACCTGAGGAT
ACCGCCGTTTATTATTGTAATGCACCCTTCTGGATCAATAGTTCTGTTGTGGACTATTGGGGTCAGGGCACACAAGTCACGGTCTCAAGCGGCGGAAGCTCT
GGTGAACAGAAACTGATTTCAGAAG
AIVHVFA#LDNDA#PFWINSSVV#evqlvesggglvqagdslrlscaasgAIVHVFAmgwfrqapgkerefvssinLDNDAtnyadsvkgrftisrddahntvylqmnslkledtpvyycna
PFWINSSVVdywgqgtqvtvsr#GAAGGAGAGATACCATGGAAGTTCAACTGGTTGAATCTGGTGGCGGTTTAGTTCAAGCCGGTGATAGCCTTCGTCTGAGCT
GCGCCGCAAGCGGAGCCATTGTGCATGTGTTCGCTATGGGTTGGTTTCGCCAGGCACCTGGTAAAGAACGTGAATTTGTGTCATCCATTAACCTTGACAACG
ACGCTACCAACTATGCCGATTCTGTTAAAGGTCGCTTCACTATTTCACGCGATGATGCGCATAATACCGTGTACTTACAGATGAACTCACTGAAACTTGAGGA
TACCCCCGTTTATTATTGCAATGCCCCCTTCTGGATCAATAGTTCTGTTGTGGACTATTGGGGTCAGGGCACACAAGTCACGGTCTCACGCGGCGGAAGCTCT
GGTGAACAGAAACTGATTTCAGAAG
AIVHVFA#LDNDA#TIFMDSDLG#evqlvesggglvqagdslrlscaasgAIVHVFAmgwfrqapgkerefvasinLDNDAtnyadsvkgrftisrddarntvylqmnslkpedtavyycna
TIFMDSDLGdywfqgtqvtvsr#AGGAGATATACCATGGAAGTTCAACTGGTTGAATCTGGTGGCGGTTTAGTTCAAGCCGGTGATAGCCTTCGTCTGAGCTGC
GCCGCAAGCGGAGCCATTGTGCATGTGTTCGCTATGGGTTGGTTTCGCCAGGCACCTGGTAAAGAACGTGAATTTGTGGCATCCATTAACCTTGACAACGAC
GCTACCAACTATGCCGATTCTGTTAAAGGTCGCTTCACTATTTCACGCGATGATGCGCGTAATACCGTGTACTTACAGATGAACTCACTGAAACCTGAGGATA
CCGCCGTTTATTATTGTAATGCAACCATCTTTATGGATTCCGATTTGGGTGACTATTGGTTTCAGGGCACACAAGTCACGGTCTCACGCGGCGGAAGCTCTGG
TGAACAGAAACTGATTTCAGAAG
AIVHVFA#LDNDA#TIFMDSDLG#evqlvesggglvqagdslrlscaasgAIVHVFAmgwfrqapgkerefvasinLDNDAtnyadsvkgrftisrddarntvylqmnslkpedttvyycna
TIFMDSDLGdywgqgtqvtvss#ATATACCATGGAAGTTCAACTGGTTGAATCTGGTGGCGGTTTAGTTCAAGCCGGTGATAGCCTTCGTCTGAGCTGCGCCGC
AAGCGGAGCCATTGTGCATGTGTTCGCTATGGGTTGGTTTCGCCAGGCACCTGGTAAAGAACGTGAATTTGTGGCATCCATTAACCTTGACAACGACGCTAC
CAACTATGCCGATTCTGTTAAAGGTCGCTTCACTATTTCACGCGATGATGCGCGTAATACCGTGTACTTACAGATGAACTCACTGAAACCTGAGGATACCACC
GTTTATTATTGTAATGCAACCATCTTTATGGATTCCGATTTGGGTGACTATTGGGGTCAGGGCACACAAGTCACGGTCTCAAGCGGCGGAAGCTCTGGTGAA
CAGAAACTGATTTCAGAAG
AIVHVFA#LDNDA#TIFMDSDLG#evqlvesggglvqagdslrlscaasgAIVHVFAmgwfrqapgkerefvasinLDNDAtnyadsvkgrftisrddarntvylqmnslkpedtavyycna
TIFMDSDLGdywgqgthvtvss#AGATATACCATGGAAGTTCAACTGGTTGAATCTGGTGGCGGTTTAGTTCAAGCCGGTGATAGCCTTCGTCTGAGCTGCGCC
GCAAGCGGAGCCATTGTGCATGTGTTCGCTATGGGTTGGTTTCGCCAGGCACCTGGTAAAGAACGTGAATTTGTGGCATCCATTAACCTTGACAACGACGCT
ACCAACTATGCCGATTCTGTTAAAGGTCGCTTCACTATTTCACGCGATGATGCGCGTAATACCGTGTACTTACAGATGAACTCACTGAAACCTGAGGATACCG
CCGTTTATTATTGTAATGCAACCATCTTTATGGATTCCGATTTGGGTGACTATTGGGGTCAGGGCACACATGTCACGGTCTCAAGCGGCGGAAGCTCTGGTG
AACAGAAACTGATTTCAGAAG
AIVHVFA#LDNDA#PFWINSSVV#evqlvesggglvqagdslrlscaasgAIVHVFAmgwfrqapgkerefvapinLDNDAtnyadsvkgrftisrddahntvylqmnslkpedtavyycn
aPFWINSSVVdywgqgtqvtvss#GGAGATATACCATGGAAGTTCAACTGGTTGAATCTGGTGGCGGTTTAGTTCAAGCCGGTGATAGCCTTCGTCTGAGCTGC
GCCGCAAGCGGAGCCATTGTGCATGTGTTCGCTATGGGTTGGTTTCGCCAGGCACCTGGTAAAGAACGTGAATTTGTGGCACCCATTAACCTTGACAACGA
CGCTACCAACTATGCCGATTCTGTTAAAGGTCGCTTCACTATTTCACGCGATGATGCGCATAATACCGTGTACTTACAGATGAACTCACTGAAACCTGAGGAT
ACCGCCGTTTATTATTGTAATGCACCCTTCTGGATCAATAGTTCTGTTGTGGACTATTGGGGTCAGGGCACACAAGTCACGGTCTCAAGCGGCGGAAGCTCT
TGTGAACAGACACTGATTTCAGAAG
AIVHVFA#LDNDA#TIFMDSDLG#evqlvesggglvqagdslrlscaasgAIVHVFAmgwfrqapgkerefvasinLDNDAtnyadsvkgrftisrddarntvylqmnslkpedtavyycna
TIFMDSDLGdywgqgtqvtvsr#AAGGAGATATACCATGGAAGTTCAACTGGTTGAATCTGGTGGCGGTTTAGTTCAAGCCGGTGATAGCCTTCGTCTGAGCTG
CGCCGCAAGCGGAGCCATTGTGCATGTGTTCGCTATGGGTTGGTTTCGCCAGGCACCTGGTAAAGAACGTGAATTTGTGGCATCCATTAACCTTGACAACGA
CGCTACCAACTATGCCGATTCTGTTAAAGGTCGCTTCACTATTTCACGCGATGATGCGCGTAATACCGTGTACTTACAGATGAACTCACTGAAACCTGAGGAT
ACCGCCGTTTATTATTGTAATGCAACCATCTTTATGGATTCCGATTTGGGTGACTATTGGGGTCAGGGCACACAAGTCACGGTCTCACGCGGCGGAAGCTCT
GGTGAACAGAAACTGATTTCAGAAG
AIVHVFA#LDNDA#TIFMDSDLG#evqlvesggglvqagdslrlscaasgAIVHVFAmgwfrrapgkerefvasinLDNDAtnyadsvkgrftisrddarntvylqmnslkpedtavyycna
TIFMDSDLGdywgqgtqvtvss#AGATATACCATGGAAGTTCAACTGGTTGAATCTGGTGGCGGTTTAGTTCAAGCCGGTGATAGCCTTCGTCTGAGCTGCGCC
GCAAGCGGAGCCATTGTGCATGTGTTCGCTATGGGTTGGTTTCGCCGGGCACCTGGTAAAGAACGTGAATTTGTGGCATCCATTAACCTTGACAACGACGCT
ACCAACTATGCCGATTCTGTTAAAGGTCGCTTCACTATTTCACGCGATGATGCGCGTAATACCGTGTACTTACAGATGAACTCACTGAAACCTGAGGATACCG
CCGTTTATTATTGTAATGCAACCATCTTTATGGATTCCGATTTGGGTGACTATTGGGGTCAGGGCACACAAGTCACGGTCTCAAGCGGCGGAAGCTCTGGTG
AACAGAAACTGATTTCAGAAG
AIVHVFA#LDNDA#ISLSLDSCLQ#evqmvesggglvqagdslrlscaasgAIVHVFAmgwfrqapgkerefvasinLDNDAtnyadsvkgrftisrddarntvylqmnslkpedtavyyca
rISLSLDSCLQeywgqgtqvtvss#AGATATACCATGGAAGTTCAAATGGTTGAATCTGGTGGCGGTTTAGTTCAAGCCGGTGATAGCCTTCGTCTGAGCTGCGCC
GCAAGCGGAGCCATTGTGCATGTGTTCGCTATGGGTTGGTTTCGCCAGGCACCTGGTAAAGAACGTGAATTTGTGGCATCCATTAACCTTGACAACGACGCT
ACCAACTATGCCGATTCTGTTAAAGGTCGCTTCACTATTTCACGCGATGATGCGCGTAATACCGTGTACTTACAGATGAACTCACTGAAACCTGAGGATACCG
CCGTTTATTATTGTGCGCGTATTTCTTTGAGCCTGGATTCCTGTCTGCAGGAGTATTGGGGTCAGGGCACACAAGTCACGGTCTCAAGCGGCGGAAGCTCTG
GTGAACAGAAACTGATTTCAGAAG
AIVHVFA#LDNDA#PFWINSSVV#evqlvesggglvqagdslrlscaasgAIVHVFAmgwfrqapgkerefvasinLDNDAtnyadsvkgrftisrddahntmylqmnslkpedtavyyc
naPFWINSSVVdywgqgtqvtvss#AGATATACCATGGAAGTTCAACTGGTTGAATCTGGTGGCGGTTTAGTTCAAGCCGGTGATAGCCTTCGTCTGAGCTGCGC
CGCAAGCGGAGCCATTGTGCATGTGTTCGCTATGGGTTGGTTTCGCCAGGCACCTGGTAAAGAACGTGAATTTGTGGCATCCATTAACCTTGACAACGACGC
TACCAACTATGCCGATTCTGTTAAAGGTCGCTTCACTATTTCACGCGATGATGCGCATAATACCATGTACTTACAGATGAACTCACTGAAACCTGAGGATACC
GCCGTTTATTATTGTAATGCACCCTTCTGGATCAATAGTTCTGTTGTGGACTATTGGGGTCAGGGCACACAAGTCACGGTCTCAAGCGGCGGAAGCTCTGGT
GAACAGAAACTGATTTCAGAAG
AIVHVFA#LDNDA#PFWINSSVV#evqlvesggglvqagdslrlscaasgAIVHVFAmgwlrqapgkerefvasinLDNDAtnyadsvkgrftisrddahntvylqmnslkpedtavyycn
aPFWINSSVVdycgqgtqvtvss#ACCATGGAAGTTCAACTGGTTGAATCTGGTGGCGGTTTAGTTCAAGCCGGTGATAGCCTTCGTCTGAGCTGCGCCGCAAGC
GGAGCCATTGTGCATGTGTTCGCTATGGGTTGGCTTCGCCAGGCACCTGGTAAAGAACGTGAATTTGTGGCATCCATTAACCTTGACAACGACGCTACCAAC
TATGCCGATTCTGTTAAAGGTCGCTTCACTATTTCACGCGATGATGCGCATAATACCGTGTACTTACAGATGAACTCACTGAAACCTGAGGATACCGCCGTTT
ATTATTGTAATGCACCCTTCTGGATCAATAGTTCTGTTGTGGACTATTGTGGTCAGGGCACACAAGTCACGGTCTCAAGCGGCGGAAGCTCTGGTGAACAGA
AACTGATTTCAGAAG
AIVHVFA#LDNDA#TIFMDSDLG#evqlvesggglvqagdslrlscaasgAIVHVFAmgwfrqapgkehefvasinLDNDAtnyadsvkgrftisrddarntvylqmnslkpedtavyycn
aTIFMDSDLGdywgqgtqvtvss#AGATATACCATGGAAGTTCAACTGGTTGAATCTGGTGGCGGTTTAGTTCAAGCCGGTGATAGCCTTCGTCTGAGCTGCGCC
GCAAGCGGAGCCATTGTGCATGTGTTCGCTATGGGTTGGTTTCGCCAGGCACCTGGTAAAGAACATGAATTTGTGGCATCCATTAACCTTGACAACGACGCT
ACCAACTATGCCGATTCTGTTAAAGGTCGCTTCACTATTTCACGCGATGATGCGCGTAATACCGTGTACTTACAGATGAACTCACTGAAACCTGAGGATACCG
CCGTTTATTATTGTAATGCAACCATCTTTATGGATTCCGATTTGGGTGACTATTGGGGTCAGGGCACACAAGTCACGGTCTCAAGCGGCGGAAGCTCTGGTG
AACAGAAACTGATTTCAGAAG
DIVHVFA#LDNDA#TIFMDSDLG#evqlvesggglvqagdslrlscaasgDIVHVFAmgwfrqapgkerefvasinLDNDAtnyadsvkgrftisrddarntvylqmnslkpedtavyycn
aTIFMDSDLGdywgqgtqvtvss#ACCATGGAAGTTCAACTGGTTGAATCTGGTGGCGGTTTAGTTCAAGCCGGTGATAGCCTTCGTCTGAGCTGCGCCGCAAG
CGGAGACATTGTGCATGTGTTCGCTATGGGTTGGTTTCGCCAGGCACCTGGTAAAGAACGTGAATTTGTGGCATCCATTAACCTTGACAACGACGCTACCAA
CTATGCCGATTCTGTTAAAGGTCGCTTCACTATTTCACGCGATGATGCGCGTAATACCGTGTACTTACAGATGAACTCACTGAAACCTGAGGATACCGCCGTT
TATTATTGTAATGCAACCATCTTTATGGATTCCGATTTGGGTGACTATTGGGGTCAGGGCACACAAGTCACGGTCTCAAGCGGCGGAAGCTCTGGTGAACAG
AAACTGATTTCAGAAG
AIVHVFA#LDNDA#TIFMDSDLG#evqlvesggglvqdgdslrlscaasgAIVHVFAmgwfrqapgkerefvasinLDNDAtnyadsvkgrftisrddarntvylqmnslkpedtavyycn
aTIFMDSDLGdywgqgtqvtvss#ATATACCATGGAAGTTCAACTGGTTGAATCTGGTGGCGGTTTAGTTCAAGACGGTGATAGCCTTCGTCTGAGCTGCGCCGC
AAGCGGAGCCATTGTGCATGTGTTCGCTATGGGTTGGTTTCGCCAGGCACCTGGTAAAGAACGTGAATTTGTGGCATCCATTAACCTTGACAACGACGCTAC
CAACTATGCCGATTCTGTTAAAGGTCGCTTCACTATTTCACGCGATGATGCGCGTAATACCGTGTACTTACAGATGAACTCACTGAAACCTGAGGATACCGCC
GTTTATTATTGTAATGCAACCATCTTTATGGATTCCGATTTGGGTGACTATTGGGGTCAGGGCACACAAGTCACGGTCTCAAGCGGCGGAAGCTCTGGTGAA
CAGAAACTGATTTCAGAAG
AIVHVFA#LDTDA#TIFMDSDLG#evqlvesggglvqagdslrlscaasgAIVHVFAmgwfrqapgkerefvasinLDTDAtnyadsvkgrftisrddarntvylqmnslkpedtavyycna
TIFMDSDLGdywgqgtqvtvss#ATATACCATGGAAGTTCAACTGGTTGAATCTGGTGGCGGTTTAGTTCAAGCCGGTGATAGCCTTCGTCTGAGCTGCGCCGC
AAGCGGAGCCATTGTGCATGTGTTCGCTATGGGTTGGTTTCGCCAGGCACCTGGTAAAGAACGTGAATTTGTGGCATCCATTAACCTTGACACCGACGCTAC
CAACTATGCCGATTCTGTTAAAGGTCGCTTCACTATTTCACGCGATGATGCGCGTAATACCGTGTACTTACAGATGAACTCACTGAAACCTGAGGATACCGCC
GTTTATTATTGTAATGCAACCATCTTTATGGATTCCGATTTGGGTGACTATTGGGGTCAGGGCACACAAGTCACGGTCTCAAGCGGCGGAAGCTCTGGTGAA
CAGAAACTGATTTCAGAAG
AIVHVFA#LDNDA#TIFMDSDLG#evqlvesggglvqagdslrlscaasgAIVHVFAmgwfrqapgkerefvasinLDNDAtnyadsvkgrftisrddarntvylqmnplkpedtavyycn
aTIFMDSDLGdywgqgtqvtvss#ACCATGGAAGTTCAACTGGTTGAATCTGGTGGCGGTTTAGTTCAAGCCGGTGATAGCCTTCGTCTGAGCTGCGCCGCAAG
CGGAGCCATTGTGCATGTGTTCGCTATGGGTTGGTTTCGCCAGGCACCTGGTAAAGAACGTGAATTTGTGGCATCCATTAACCTTGACAACGACGCTACCAA
CTATGCCGATTCTGTTAAAGGTCGCTTCACTATTTCACGCGATGATGCGCGTAATACCGTGTACTTACAGATGAACCCACTGAAACCTGAGGATACCGCCGTT
TATTATTGTAATGCAACCATCTTTATGGATTCCGATTTGGGTGACTATTGGGGTCAGGGCACACAAGTCACGGTCTCAAGCGGCGGAAGCTCTGGTGAACAG
AAACTGATTTCAGAAG
AIVHVFA#LDNDA#TIFMDSDLG#evqlvesggglvqagdslslscaasgAIVHVFAmgwfrqapgkerefvasinLDNDAtnyadsvkgrftisrddarntvylqmnslkpedtavyycn
aTIFMDSDLGdywgqgtqvtvss#AAGGAGATATACCATGGAAGTTCAACTGGTTGAATCTGGTGGCGGTTTAGTTCAAGCCGGTGATAGCCTTAGTCTGAGCT
GCGCCGCAAGCGGAGCCATTGTGCATGTGTTCGCTATGGGTTGGTTTCGCCAGGCACCTGGTAAAGAACGTGAATTTGTGGCATCCATTAACCTTGACAAC
GACGCTACCAACTATGCCGATTCTGTTAAAGGTCGCTTCACTATTTCACGCGATGATGCGCGTAATACCGTGTACTTACAGATGAACTCACTGAAACCTGAG
GATACCGCCGTTTATTATTGTAATGCAACCATCTTTATGGATTCCGATTTGGGTGACTATTGGGGTCAGGGCACACAAGTCACGGTCTCAAGCGGCGGAAGC
TCTGGTGAACAGAAACTGATTTCAGAAG
AIVHVFA#LDNDA#TIFMDSDLG#evqlvesggglvqagdslrlscaasgAIVHVFAmgwfrqapgkerefvasinLDNDAtnyadsvkgrftisrddahntvylqmnslkpedtavyycn
aTIFMDSDLGdywgqgtqvtvss#ACCATGGAAGTTCAACTGGTTGAATCTGGTGGCGGTTTAGTTCAAGCCGGTGATAGCCTTCGTCTGAGCTGCGCCGCAAG
CGGAGCCATTGTGCATGTGTTCGCTATGGGTTGGTTTCGCCAGGCACCTGGTAAAGAACGTGAATTTGTGGCATCCATTAACCTTGACAACGACGCTACCAA
CTATGCCGATTCTGTTAAAGGTCGCTTCACTATTTCACGCGATGATGCGCATAATACCGTGTACTTACAGATGAACTCACTGAAACCTGAGGATACCGCCGTT
TATTATTGTAATGCAACCATCTTTATGGATTCCGATTTGGGTGACTATTGGGGTCAGGGCACACAAGTCACGGTCTCAAGCGGCGGAAGCTCTGGTGAACAG
AAACTGATTTCAGAAG
AIVHVLA#LDNDA#TIFMDSDLG#evqlvesggglvqagdslrlscaasgAIVHVLAmgwfrqapgkerefvasinLDNDAtnyadsvkgrftisrddarntvylqmnslkpedtavyycna
TIFMDSDLGdywgqgtqvtvss#ATACCATGGAAGTTCAACTGGTTGAATCTGGTGGCGGTTTAGTTCAAGCCGGTGATAGCCTTCGTCTGAGCTGCGCCGCAA
GCGGAGCCATTGTGCATGTGTTAGCTATGGGTTGGTTTCGCCAGGCACCTGGTAAAGAACGTGAATTTGTGGCATCCATTAACCTTGACAACGACGCTACCA
ACTATGCCGATTCTGTTAAAGGTCGCTTCACTATTTCACGCGATGATGCGCGTAATACCGTGTACTTACAGATGAACTCACTGAAACCTGAGGATACCGCCGT
TTATTATTGTAATGCAACCATCTTTATGGATTCCGATTTGGGTGACTATTGGGGTCAGGGCACACAAGTCACGGTCTCAAGCGGCGGAAGCTCTGGTGAACA
GGAACTGATTTCAGAAG
AIVHVFA#LDNDA#ESTSYF#evqlvesggglvqagdslrlscaasgAIVHVFAmgwfrqapgkerefvasinLDNDAtnyadsvkgrftisrddarntvylqmnslkpedtavyycavESTS
YFgywgqgtqvtvss#AAGGAGATATACCATGGAAGTTCAACTGGTTGAATCTGGTGGCGGTTTAGTTCAAGCCGGTGATAGCCTTCGTCTGAGCTGCGCCGCA
AGCGGAGCCATTGTGCATGTGTTCGCTATGGGTTGGTTTCGCCAGGCACCTGGTAAAGAACGTGAATTTGTGGCATCCATTAACCTTGACAACGACGCTACC
AACTATGCCGATTCTGTTAAAGGTCGCTTCACTATTTCACGCGATGATGCGCGTAATACCGTGTACTTACAGATGAACTCACTGAAACCTGAGGATACCGCC
GTTTATTATTGTGCGGTTGAGAGTACGAGTTATTTTGGCTATTGGGGTCAGGGCACACAAGTCACGGTCTCAAGCGGCGGAAGCTCTGGTGAACAGAAACT
GATTTCAGAAG
AIVHVFA#LDNDA#PFWINSSVV#qvqlvesggglvqagdslrlscassgAIVHVFAmgwfrqapgkerefvasinLDNDAtnyadsvkgrftisrddahntvylqmnslkpedtavyycn
aPFWINSSVVdywgqgtqvtvss#AGGAGATATACCATGCAGGTTCAACTGGTTGAATCTGGTGGCGGTTTAGTTCAAGCCGGTGATAGCCTTCGTCTGAGCTG
CGCCTCAAGCGGAGCCATTGTGCATGTGTTCGCTATGGGTTGGTTTCGCCAGGCACCTGGTAAAGAACGTGAATTTGTGGCATCCATTAACCTTGACAACGA
CGCTACCAACTATGCCGATTCTGTTAAAGGTCGCTTCACTATTTCACGCGATGATGCGCATAATACCGTGTACTTACAGATGAACTCACTGAAACCTGAGGAT
ACCGCCGTTTATTATTGTAATGCACCCTTCTGGATCAATAGTTCTGTTGTGGACTATTGGGGTCAGGGCACACAAGTCACGGTCTCAAGCGGCGGAAGCTCT
GGTGAACAGAAACTGATTTCAGAAG
AIVHVFA#LDNDA#FCYVPLATC#evqlvesggglvqagdslrlscaasgAIVHVFAmgwfrqapgkerefvasinLDNDAtnyadsvkgrftisrddarntvylqmnslkpedtavyycna
FCYVPLATCdywgqdtqvtvss#GGAGATATACCATGGAAGTTCAACTGGTTGAATCTGGTGGCGGTTTAGTTCAAGCCGGTGATAGCCTTCGTCTGAGCTGCG
CCGCAAGCGGAGCCATTGTGCATGTGTTCGCTATGGGTTGGTTTCGCCAGGCACCTGGTAAAGAACGTGAATTTGTGGCATCCATTAACCTTGACAACGACG
CTACCAACTATGCCGATTCTGTTAAAGGTCGCTTCACTATTTCACGCGATGATGCGCGTAATACCGTGTACTTACAGATGAACTCACTGAAACCTGAGGATAC
CGCCGTTTATTATTGTAATGCATTCTGCTACGTCCCTTTGGCCACGTGTGACTATTGGGGTCAGGACACACAAGTCACGGTCTCAAGCGGCGGAAGCTCTGG
TGAACAGAAACTGATTTCAGAAG
AIVHVFA#LDNDA#PFWINSSVV#evqlvesggglvqagdslrlscaasgAIVHVFAmgwfrqapgkerefvasinLDNDAtnyadsvkgrftisrddahntvylqmnslkpqdtavyycn
aPFWINSSVVdywgqgtqvtvss#AGGAGATATACCATGGAAGTTCAACTGGTTGAATCTGGTGGCGGTTTAGTTCAAGCCGGTGATAGCCTTCGTCTGAGCTG
CGCCGCAAGCGGAGCCATTGTGCATGTGTTCGCTATGGGTTGGTTTCGCCAGGCACCTGGTAAAGAACGTGAATTTGTGGCATCCATTAACCTTGACAACGA
CGCTACCAACTATGCCGATTCTGTTAAAGGTCGCTTCACTATTTCACGCGATGATGCGCATAATACCGTGTACTTACAGATGAACTCACTGAAACCTCAGGAT
ACCGCCGTTTATTATTGTAATGCACCCTTCTGGATCAATAGTTCTGTTGTGGACTATTGGGGTCAGGGCACACAAGTCACGGTCTCAAGCGGCGGAAGCTCT
GGTGAACAGAAACTGCTTTCAGAAG
AIVHVFA#LDNDA#TIFMDSDLG#evqlvesggglvqagdslrlscaasgAIVHVFAmgwfrqapgkerefvasinLDNDAtnyadsvkgrftisrddacntvylqmnslkpedtavyycn
aTIFMDSDLGdywgqgtqvtvss#AGGAGATATACCATGGAAGTTCAACTGGTTGAATCTGGTGGCGGTTTAGTTCAAGCCGGTGATAGCCTTCGTCTGAGCTG
CGCCGCAAGCGGAGCCATTGTGCATGTGTTCGCTATGGGTTGGTTTCGCCAGGCACCTGGTAAAGAACGTGAATTTGTGGCATCCATTAACCTTGACAACGA
CGCTACCAACTATGCCGATTCTGTTAAAGGTCGCTTCACTATTTCACGCGATGATGCGTGTAATACCGTGTACTTACAGATGAACTCACTGAAACCTGAGGAT
ACCGCCGTTTATTATTGTAATGCAACCATCTTTATGGATTCCGATTTGGGTGACTATTGGGGTCAGGGCACACAAGTCACGGTCTCAAGCGGCGGAAGCTCT
GGTGAACAGAAACTGATTTCAGAAG
AIVHVFA#LDNDA#TIFMDSDLG#evqlvesggglvqagdslrlscaasgAIVHVFAmgwfrqapgkerefvasinLDNDAtnyvdsvkgrftisrddarntvylqmnslkpedtavyycna
TIFMDSDLGdywvqgtqvtvss#AGGAGATATACCATGGAAGTTCAACTGGTTGAATCTGGTGGCGGTTTAGTTCAAGCCGGTGATAGCCTTCGTCTGAGCTGC
GCCGCAAGCGGAGCCATTGTGCATGTGTTCGCTATGGGCTGGTTTCGCCAGGCACCTGGTAAAGAACGTGAATTTGTGGCATCCATTAACCTTGACAACGA
CGCTACCAACTATGTCGATTCTGTTAAAGGTCGCTTCACTATTTCACGCGATGATGCGCGTAATACCGTGTACTTACAGATGAACTCACTGAAACCTGAGGAT
ACCGCCGTTTATTATTGTAATGCAACCATCTTTATGGATTCCGATTTGGGTGACTATTGGGTTCAGGGCACACAAGTCACGGTCTCAAGCGGCGGAAGCTCT
GTTGAACAGAAACTGATTTCAGAAG
AIVHVFA#LDNDA#TIFMDSDLG#evqlvesggglvqagdslrlscaasgAIVHVFAmgwfrqapgkerefvasinLDNDAtnyadsvkgrftisrddarntvylqmnslkpedtavyycna
TIFMDSDLGdywgqstqvtvss#AGGAGATATACCATGGAAGTTCAACTGGTTGAATCTGGTGGCGGTTTAGTTCAAGCCGGTGATAGCCTTCGTCTGAGCTGC
GCCGCAAGCGGAGCCATTGTGCATGTGTTCGCTATGGGTTGGTTTCGCCAGGCACCTGGTAAAGAACGTGAATTTGTGGCATCCATTAACCTTGACAACGAC
GCTACCAACTATGCCGATTCTGTTAAGGGTCGCTTCACTATTTCACGCGATGATGCGCGTAATACCGTGTACTTACAGATGAACTCACTGAAACCTGAGGATA
CCGCCGTTTATTATTGTAATGCAACCATCTTTATGGATTCCGATTTGGGTGACTATTGGGGTCAGAGCACACAAGTCACGGTCTCAAGCGGCGGAAGCTCTG
GTGAACAGAAACTGATTTCAGAAG
AIVHVFA#LDNDA#PFWINSSVV#evqlvesggglvqagdslrlscaasgAIVHVFAmgwfrqapgkerefvasvnLDNDAtnyadsvkgrftisrddahntvylqmnslkpedtavyycn
aPFWINSSVVdywgqgtqvtvss#AAGGAGATATACCATGGAAGTTCAACTGGTTGAATCTGGTGGCGGTTTAGTTCAAGCCGGTGATAGCCTTCGTCTGAGCT
GCGCCGCAAGCGGAGCCATTGTGCATGTGTTCGCTATGGGTTGGTTTCGCCAGGCACCTGGTAAAGAACGTGAATTTGTGGCATCCGTTAACCTTGACAAC
GACGCTACCAACTATGCCGATTCTGTTAAAGGTCGCTTCACTATTTCACGCGATGATGCGCATAATACCGTGTACTTACAGATGAACTCACTGAAACCTGAGG
ATACCGCCGTTTATTATTGTAATGCACCCTTCTGGATCAATAGTTCTGTTGTGGACTATTGGGGTCAGGGCACACAAGTCACGGTCTCAAGCGGCGGAAGCT
CTGGTGAACAGAAACTGATTTCAGAAG
AIVHVFA#LDNDA#TIFMDSDLG#evqlfesggglvqagdslrlscaasgAIVHVFAmgwfrqapgkerefvasinLDNDAtnyadsvkgrftisrddarntvylqmnslkpedtavyycna
TIFMDSDLGdywvqgtqvtvss#ATATACCATGGAAGTTCAACTGTTTGAATCTGGTGGCGGTTTAGTTCAAGCCGGTGATAGCCTTCGTCTGAGCTGCGCCGCA
AGCGGAGCCATTGTGCATGTGTTCGCTATGGGTTGGTTTCGCCAGGCACCTGGTAAAGAACGTGAATTTGTGGCATCCATTAACCTTGACAACGACGCTACC
AACTATGCCGATTCTGTTAAAGGTCGCTTCACTATTTCACGCGATGATGCGCGTAATACCGTGTACTTACAGATGAACTCACTGAAACCTGAGGATACCGCC
GTTTATTATTGTAATGCAACCATCTTTATGGATTCCGATTTGGGTGACTATTGGGTTCAGGGCACACAAGTCACGGTCTCAAGCGGCGGAAGCTCTGGTGAA
CAGAAACTGATTTCAGAAG
AIVHVFA#LDNDA#TIFMDSDLG#evqlvesggglvqagdslrlscaasgAIVHVFAmgwfrqepgkerefvasinLDNDAtnyadsvkgrftisrddarntvylqmnslkpedtavyycna
TIFMDSDLGdywgqgtqvtvss#AGATATACCATGGAAGTTCAACTGGTTGAATCTGGTGGCGGTTTAGTTCAAGCCGGTGATAGCCTTCGTCTGAGCTGCGCC
GCAAGCGGAGCCATTGTGCATGTGTTCGCTATGGGTTGGTTTCGCCAGGAACCTGGTAAAGAACGTGAGTTTGTGGCATCCATTAACCTTGACAACGACGC
TACCAACTATGCCGATTCTGTTAAAGGTCGCTTCACTATTTCACGCGATGATGCGCGTAATACCGTGTACTTACAGATGAACTCACTGAAACCTGAGGATACC
GCCGTTTATTATTGTAATGCAACCATCTTTATGGATTCCGATTTGGGTGACTATTGGGGTCAGGGCACACAAGTCACGGTCTCAAGCGGCGGAAGCTCTGGT
GAACAGAAACTGATTTCAGAAG
AIVHVFA#LDNDA#PFWINSSVV#evqlvesggglvqagdslrlscaasgAIVHVFAmgwfrqapgkerefvtsinLDNDAtnyadsvkgrftisrddahntvylqmnslkpedtavyycn
aPFWINSSVVdywgqgtqvtvss#ATACCATGGAAGTTCAACTGGTTGAATCTGGTGGCGGTTTAGTTCAAGCCGGTGATAGCCTTCGTCTGAGCTGCGCCGCA
AGCGGAGCCATTGTGCATGTGTTCGCTATGGGTTGGTTTCGCCAGGCACCTGGTAAAGAACGTGAATTTGTGACATCCATTAACCTTGACAACGACGCTACC
AACTATGCCGATTCTGTTAAAGGTCGCTTCACTATTTCACGCGATGATGCGCATAATACCGTGTACTTACAGATGAACTCACTGAAACCTGAGGATACCGCCG
TTTATTATTGTAATGCACCCTTCTGGATCAATAGTTCTGTTGTGGACTATTGGGGTCAGGGCACACAAGTCACGGTCTCAAGCGGCGGAAGCTCTGGTGAAC
AGAAACTGATTTCAGAAG
AIVHVFA#LDNDA#TIFMDSDLG#evqlvesggglvqagdtIrlscaasgAIVHVFAmgwfrqapgkerefvasinLDNDAtnyadsvkgrftisrddarntvylqmnslkpedtavyycna
TIFMDSDLGdywgqgtqvtvss#AAGGAGATATACCATGGAAGTTCAACTGGTTGAATCTGGTGGCGGTTTAGTTCAAGCCGGTGATACCCTTCGTCTGAGCTG
CGCCGCAAGCGGAGCCATTGTGCATGTGTTCGCTATGGGTTGGTTTCGCCAGGCACCTGGTAAAGAACGTGAATTTGTGGCATCCATTAACCTTGACAACGA
CGCTACCAACTATGCCGATTCTGTTAAAGGTCGCTTCACTATTTCACGCGATGATGCGCGTAATACCGTGTACTTACAGATGAACTCACTGAAACCTGAGGAT
ACCGCCGTTTATTATTGTAATGCAACCATCTTTATGGATTCCGATTTGGGTGACTATTGGGGTCAGGGCACACAAGTCACGGTCTCAAGCGGCGGAAGCTCT
GGTGAACAGAAACTGATTTCAGAAG
AIVHVFA#LDNDA#TAISPISIVD#evqlvesggglvqagdslrlswaasgAIVHVFAmgwfrqapgkerefvasinLDNDAtnyadsvkgrftisrddarntvylqmnslkpedtavyycaa
TAISPISIVDeywgqgtqvtvss#ATATACCATGGAAGTTCAACTGGTTGAATCTGGTGGCGGTTTAGTTCAAGCCGGTGATAGCCTTCGTCTGAGCTGGGCCGCA
AGCGGAGCCATTGTGCATGTGTTCGCTATGGGTTGGTTTCGCCAGGCACCTGGTAAAGAACGTGAATTTGTGGCATCCATTAACCTTGACAACGACGCTACC
AACTATGCCGATTCTGTTAAAGGTCGCTTCACTATTTCACGCGATGATGCGCGTAATACCGTGTACTTACAGATGAACTCACTGAAACCTGAGGATACCGCC
GTTTATTATTGTGCGGCAACGGCTATTAGCCCTATCTCTATTGTGGATGAGTATTGGGGTCAGGGCACACAAGTCACGGTCTCAAGCGGCGGAAGCTCTGGT
GAACAGAAACTGATTTCAGAAG
AIVHVFA#LDNDA#TAISPISIVD#evqlvesggglvqagdslrlscaasgAIVHVFAmgwfcqapgkerefvasinLDNDAtnyadsvkgrftisrddarntvylqmnslkpedtavyycaa
TAISPISIVDeywgqgtqvtvss#ATATACCATGGAAGTTCAACTGGTTGAATCTGGTGGCGGTTTAGTTCAAGCCGGTGATAGCCTTCGTCTGAGCTGCGCCGCA
AGCGGAGCCATTGTGCATGTGTTCGCTATGGGTTGGTTTTGCCAGGCACCTGGTAAAGAACGTGAATTTGTGGCATCCATTAACCTTGACAACGACGCTACC
AACTATGCCGATTCTGTTAAAGGTCGCTTCACTATTTCACGCGATGATGCGCGTAATACCGTGTACTTACAGATGAACTCACTGAAACCTGAGGATACCGCC
GTTTATTATTGTGCGGCAACGGCTATTAGCCCTATCTCTATTGTGGATGAGTATTGGGGTCAGGGCACACAAGTCACGGTCTCAAGCGGCGGAAGCTCTGGT
GAACAGAAACTGATTTCAGAAG
AIVHVFA#LDNDA#TAISPISIVD#evqlvesggglvqagdslrlscaasgAIVHVFAmgwfrqapgkerefvasinLDNDAtnyadsvkgrftisrddarntvylqmnslkpedtavyycaa
TAISPISIVDeywvqgtqvtvss#ACCATGGAAGTTCAACTGGTTGAATCTGGTGGCGGTTTAGTTCAAGCCGGTGATAGCCTTCGTCTGAGCTGCGCCGCAAGCG
GAGCCATTGTGCATGTGTTCGCTATGGGTTGGTTTCGCCAGGCACCTGGTAAAGAACGTGAATTTGTGGCATCCATTAACCTTGACAACGACGCTACCAACT
ATGCCGATTCTGTTAAAGGTCGCTTCACTATTTCACGCGATGATGCGCGTAATACCGTGTACTTACAGATGAACTCACTGAAACCTGAGGATACCGCCGTTTA
TTATTGTGCGGCAACGGCTATTAGCCCTATCTCTATTGTGGATGAGTATTGGGTTCAGGGCACACAAGTCACGGTCTCAAGCGGCGGAAGCTCTGTTGAACA
GAAACTGATTTCAGAAG
AIVHVFA#LDNDA#TIFMDSNLG#evqlvesggglvqagdslrlscaasgAIVHVFAmgwfrqapgkerefvasinLDNDAtnyadsvkgrftisrddarntvylqmnslkpedtavyycn
aTIFMDSNLGdywgqgtqvtvss#ATATACCATGGAAGTTCAACTGGTTGAATCTGGTGGCGGTTTAGTTCAAGCCGGTGATAGCCTTCGCCTGAGCTGCGCCG
CAAGCGGAGCCATTGTGCATGTGTTCGCTATGGGTTGGTTTCGCCAGGCACCTGGTAAAGAACGTGAATTTGTGGCATCCATTAACCTTGACAACGACGCTA
CCAACTATGCCGATTCTGTTAAAGGTCGCTTCACTATTTCACGCGATGATGCGCGTAATACCGTGTACTTACAGATGAACTCACTGAAACCTGAGGATACCGC
CGTTTATTATTGTAATGCAACCATCTTTATGGATTCCAATTTGGGTGACTATTGGGGTCAGGGCACACAAGTCACGGTCTCAAGCGGCGGAAGCTCTGGTGA
ACAGAAACTGATTTCAGAAG
AIVHVFA#LDNDA#TIFMDSDLG#evqlvesggglvqagdslrlscaasgAIVHVFAmgwfrqapgkerefvasinLDNDAtnyadsvkgrftisrddarntvylqmnslkpedtavyycna
TIFMDSDLGdywsqgtqvtvss#AGGAGATATACCATGGAAGTTCAACTGGTTGAATCTGGTGGCGGTTTAGTTCAAGCCGGTGATAGCCTTCGTCTGAGCTGC
GCCGCAAGCGGAGCCATTGTGCATGTGTTCGCTATGGGTTGGTTTCGCCAGGCACCTGGTAAAGAACGTGAATTTGTGGCATCCATTAACCTTGACAACGAC
GCTACCAACTATGCCGATTCTGTTAAAGGTCGCTTCACTATTTCACGCGATGATGCGCGTAATACCGTGTACTTACAGATGAACTCACTGAAACCTGAGGATA
CCGCCGTTTACTATTGTAATGCAACCATCTTTATGGATTCCGATTTGGGTGACTATTGGAGTCAGGGCACACAAGTCACGGTCTCAAGCGGCGGAAGCTCTG
GTGAACAGAAACTGATTTCAGAAG
AIVHVFA#LDNDA#TLYHTIREAR#evqlvesggglvqagdslrlscaasgAIVHVFAmgwfrqapgkerefvasinLDNDAtnyadsvkgrstisrddarntvylqmnslkpedtavyycat
TLYHTIREARdywgqgtqvtvss#GAAGGAGATATACCATGGAAGTTCAACTGGTTGAATCTGGTGGCGGTTTAGTTCAAGCCGGTGATAGCCTTCGTCTGAGCT
GCGCCGCAAGCGGAGCCATTGTGCATGTGTTCGCTATGGGTTGGTTTCGCCAGGCACCTGGTAAAGAACGTGAATTTGTGGCATCCATTAACCTTGACAAC
GACGCTACCAACTATGCCGATTCTGTTAAAGGTCGCTCCACTATTTCACGCGATGATGCGCGTAATACCGTGTACTTACAGATGAACTCACTGAAACCTGAG
GATACCGCCGTTTATTATTGTGCGACAACTCTGTACCATACGATTCGGGAGGCCCGCGACTATTGGGGTCAGGGCACACAAGTCACGGTCTCAAGCGGCGG
AAGCTCTGGTGAACAGAAACTGATTTCAGAAG
AIVHVFA#LDNDA#TAISPISIVD#evqlvesggglvqagdslrlscaasgAIVHVFAmgwfrqapgkerefvasinLDNDAtnyansvkgrftisrddarntvylqmnslkpedtavyycaa
TAISPISIVDeywgqgtqvtvss#GAAGGAGATATACCATGGAAGTTCAACTGGTTGAATCTGGTGGCGGTTTAGTTCAAGCCGGTGATAGCCTTCGTCTGAGCTG
CGCCGCAAGCGGAGCCATTGTGCATGTGTTCGCTATGGGTTGGTTTCGCCAGGCACCTGGTAAAGAACGTGAATTTGTGGCATCCATTAACCTTGACAACGA
CGCTACCAACTATGCCAATTCTGTTAAAGGTCGCTTCACTATTTCACGCGATGATGCGCGTAATACCGTGTACTTACAGATGAACTCACTGAAACCTGAGGAT
ACCGCCGTTTATTATTGTGCGGCAACGGCTATTAGCCCTATCTCTATTGTGGATGAGTATTGGGGTCAGGGCACACAAGTCACGGTCTCAAGCGGCGGAAG
CTCTGGTGAACAGAAACTGATTTCAGAAG
AIVHVFA#LDNDA#TIFMDSDLG#evqlvvsggglvqagdslrlscaasgAIVHVFAmgwfrqapgkerefvasinLDNDAtnyadsvkgrftisrddarntvylqmnslkpedtavyycna
TIFMDSDLGdywgqgtqvtvss#GGAGATATACCATGGAAGTTCAACTGGTTGTATCTGGTGGCGGTTTAGTTCAAGCCGGTGATAGCCTTCGTCTGAGCTGCG
CCGCAAGCGGAGCCATTGTGCATGTGTTCGCTATGGGTTGGTTTCGCCAGGCACCTGGTAAAGAACGTGAATTTGTGGCATCCATTAACCTTGACAACGACG
CTACCAACTATGCCGATTCTGTTAAAGGTCGCTTCACTATTTCACGCGATGATGCGCGTAATACCGTGTACTTACAGATGAACTCACTGAAACCTGAGGATAC
CGCCGTTTATTATTGTAATGCAACCATCTTTATGGATTCCGATTTGGGTGACTATTGGGGTCAGGGCACACAAGTCACGGTCTCAAGCGGCGGAAGCTCTGG
TGAACAGAAACTGATTTCAGAAG
AIVHVFA#LDNDA#TIFMDSDLG#qvqlvesggglvqagdslrlscaasgAIVHVFAmgwfrqapgkerefvasinLDNDAtnyadsvkgrftisrddarntvylqmnslkpedtavyycn
aTIFMDSDLGdywgqdtqvtvss#AGATATACCATGCAGGTTCAACTGGTTGAATCTGGTGGCGGTTTAGTTCAAGCCGGTGATAGCCTTCGTCTGAGCTGCGCC
GCAAGCGGAGCCATTGTGCATGTGTTCGCTATGGGTTGGTTTCGCCAGGCACCTGGTAAAGAACGTGAATTTGTGGCATCCATTAACCTTGACAACGACGCT
ACCAACTATGCCGATTCTGTTAAAGGTCGCTTCACTATTTCACGCGATGATGCGCGTAATACCGTGTACTTACAGATGAACTCACTGAAACCTGAGGATACCG
CCGTTTATTATTGTAATGCAACCATCTTTATGGATTCCGATTTGGGTGACTATTGGGGTCAGGACACACAAGTCACGGTCTCAAGCGGCGGAAGCTCTGGTG
AACAGAAACTGATTTCAGAAG
AIVHVFA#LDNDA#TAISPISIVD#evqlvesggglvqagdslrlscaasgAIVHVFAmgwfrqapgkerefvasinLDNDAtnyadsvkgrftisrddarntvylqmnslkpedtavyycaa
TAISPISIVDeywgqgtrvtvss#AGGAGATATACCATGGAAGTTCAACTGGTTGAATCTGGTGGCGGTTTAGTTCAAGCCGGTGATAGCCTTCGTCTGAGCTGCG
CCGCAAGCGGAGCCATTGTGCATGTGTTCGCTATGGGTTGGTTTCGCCAGGCACCTGGTAAAGAACGTGAATTTGTGGCATCCATTAACCTTGACAACGACG
CTACCAACTATGCCGATTCTGTTAAAGGTCGCTTCACTATTTCACGCGATGATGCGCGTAATACCGTGTACTTACAGATGAACTCACTGAAACCTGAGGATAC
CGCCGTTTATTATTGTGCGGCAACGGCTATTAGCCCTATCTCTATTGTGGATGAGTATTGGGGTCAGGGCACACGAGTCACGGTCTCAAGCGGCGGAAGCTC
TGGTGAACAGAAACTGATTTCAGAAG
AIVHVFA#LDNDA#PFWINSSVV#evqlvesggglvqagdslrlscaasgAIVHVFAmgwfrqapgkehefvasinLDNDAtnyadsvkgrftisrddarntvylqmnslkpedtavyycn
aPFWINSSVVdywgqgtqvtvss#AAGGAGATATACCATGGAAGTTCAACTGGTTGAATCTGGTGGCGGTTTAGTTCAAGCCGGTGATAGCCTTCGTCTGAGCT
GCGCCGCAAGCGGAGCCATTGTGCATGTGTTCGCTATGGGTTGGTTTCGCCAGGCACCTGGTAAAGAACATGAATTTGTGGCATCCATTAACCTTGACAACG
ACGCTACCAACTATGCCGATTCTGTTAAAGGTCGCTTCACTATTTCACGCGATGATGCGCGTAATACCGTGTACTTACAGATGAACTCACTGAAACCTGAGGA
TACCGCCGTTTATTATTGTAATGCACCCTTCTGGATCAATAGTTCTGTTGTGGACTATTGGGGTCAGGGCACACAAGTCACGGTCTCAAGCGGCGGAAGCTC
TGGTGAACAGAAACTGATTTCAGAAG
AIVHVFA#LDNDA#ACSDYTYGSHGVR#evqlvesggglvqagdslrlscaasgAIVHVFAmgwfrqapgkerefvasinLDNDAtnyadsvkgrftisrddarntvylqmnslkpedtav
yycnaACSDYTYGSHGVRaswgqgtqvtvss#ATATACCATGGAAGTTCAACTGGTTGAATCTGGTGGCGGTTTAGTTCAAGCCGGTGATAGCCTTCGTCTGAGCT
GCGCCGCAAGCGGAGCCATTGTGCATGTGTTCGCTATGGGTTGGTTTCGCCAGGCACCTGGTAAAGAACGTGAATTTGTGGCATCCATTAACCTTGACAAC
GACGCTACCAACTATGCCGATTCTGTTAAAGGTCGCTTCACTATTTCACGCGATGATGCGCGTAATACCGTGTACTTACAGATGAACTCACTGAAACCTGAG
GATACCGCCGTTTATTATTGTAATGCAGCGTGTTCGGACTATACGTATGGCTCTCATGGTGTTCGGGCCTCTTGGGGTCAGGGCACACAAGTCACGGTCTCA
AGCGGCGGAAGCTCTGGTGAACAGAAACTGATTTCAGAAG
AIVHVFA#LDNDA#TIFMDSDLG#evqlvesggglvkagdslrlscaasgAIVHVFAmgwfrqapgkerefvasinLDNDAtnyadsvkgrftisrddarntvylqmnslkpedtavyycna
TIFMDSDLGdywgqgtqvtvss#AGGAGATATACCATGGAAGTTCAACTGGTTGAATCTGGTGGCGGTTTAGTTAAAGCCGGTGATAGCCTTCGTCTGAGCTGC
GCCGCAAGCGGAGCCATTGTGCATGTGTTCGCTATGGGTTGGTTTCGCCAGGCACCTGGTAAAGAACGTGAATTTGTGGCATCCATTAACCTTGACAACGAC
GCTACCAACTATGCCGATTCTGTTAAAGGTCGCTTCACTATTTCACGCGATGATGCGCGTAATACCGTGTACTTACAGATGAACTCACTGAAACCTGAGGATA
CCGCCGTTTATTATTGTAATGCAACCATCTTTATGGATTCCGATTTGGGTGACTATTGGGGTCAGGGCACACAAGTCACGGTCTCAAGCGGCGGAAGCTCTG
GTGAACAGAAACTGATTTCAGAAGCCAA
AIVHVFA#LDNDA#WSFTPSICTL#qvqlqesggglvqagdslrlscaasgAIVHVFAmgwfrqapgkerefvasinLDNDAtnyadsvkgrftisrddarntvylqmnslkpedtavyyca
aWSFTPSICTLeywgqgtqvtvss#ATATACCATGCAGGTTCAACTGCAAGAATCTGGTGGCGGTTTAGTTCAAGCCGGTGATAGCCTTCGTCTGAGCTGCGCCG
CAAGCGGAGCCATTGTGCATGTGTTCGCTATGGGTTGGTTTCGCCAGGCACCTGGTAAAGAACGTGAATTTGTGGCATCCATTAACCTTGACAACGACGCTA
CCAACTATGCCGATTCTGTTAAAGGTCGCTTCACTATTTCACGCGATGATGCGCGTAATACCGTGTACTTACAGATGAACTCACTGAAACCTGAGGATACCGC
CGTTTATTATTGTGCGGCATGGAGTTTCACCCCTTCTATCTGTACCTTGGAGTATTGGGGTCAGGGCACACAAGTCACGGTCTCAAGCGGCGGAAGCTCTGG
TGAACAGAAACTGATTTCAGAAGCCAA
AIVHVFA#LDNDA#TIFMDSDLG#evqlvesggglvqagdslrlscaasgAIVHVFAmgwfrqapgkerefvasinLDNDAtnyadsvkgrftiscddarntvylqmnslkpedtavyycn
aTIFMDSDLGdywgqgtqvtvss#AGATATACCATGGAAGTTCAACTGGTTGAATCTGGTGGCGGTTTAGTTCAAGCCGGTGATAGCCTTCGTCTGAGCTGCGCC
GCAAGCGGAGCCATTGTGCATGTGTTCGCTATGGGTTGGTTTCGCCAGGCACCTGGTAAAGAACGTGAATTTGTGGCATCCATTAACCTTGACAACGACGCT
ACCAACTATGCCGATTCTGTTAAAGGTCGCTTCACTATTTCATGCGATGATGCGCGTAATACCGTGTACTTACAGATGAACTCACTGAAACCTGAGGATACCG
CCGTTTATTATTGTAATGCAACCATCTTTATGGATTCCGATTTGGGTGACTATTGGGGTCAGGGCACACAAGTCACGGTCTCAAGCGGCGGAAGCTCTGGTG
AACAGAAACTGATTTCAGAAGCCAA
AIVHVFA#LDNDA#PFWINSSVV#evqlvesggglvqagdslrlscaasgAIVHVFAmgwfrqapgkerefvasinLDNDAtnyadsvkgrftisredarntvylqmnslkpedtavyycna
PFWINSSVVdywgqgtqvtvss#AGGAGATATACCATGGAAGTTCAACTGGTTGAATCTGGTGGCGGTTTAGTTCAAGCCGGTGATAGCCTTCGTCTGAGCTGC
GCCGCAAGCGGAGCCATTGTGCATGTGTTCGCTATGGGTTGGTTTCGCCAGGCACCTGGTAAAGAACGTGAATTTGTGGCATCCATTAACCTTGACAACGAC
GCTACCAACTATGCCGATTCTGTTAAAGGTCGCTTCACTATTTCACGCGAGGATGCGCGTAATACCGTGTACTTACAGATGAACTCACTGAAACCTGAGGAT
ACCGCCGTTTATTATTGTAATGCACCCTTCTGGATCAATAGTTCTGTTGTGGACTATTGGGGTCAGGGCACACAAGTCACGGTCTCAAGCGGCGGAAGCTCT
GGTGAACAGAAACTGATTTCAGAAGCCAA
AIVHVFA#LDNDA#TIFMDSDLG#evqlvesggglvqagdslrlscaasgAIVHVFAmgwfrqapgkerefvasinLDNDAtnyadsvkgrftisrddarntvylqInslkpedtavyycnaT
IFMDSDLGdywgqgtqvtvss#AGGAGATATACCATGGAAGTTCAACTGGTTGAATCTGGTGGCGGTTTAGTTCAAGCCGGTGATAGCCTTCGTCTGAGCTGCG
CCGCAAGCGGAGCCATTGTGCATGTGTTCGCTATGGGTTGGTTTCGCCAGGCACCTGGTAAAGAACGTGAATTTGTGGCATCCATTAACCTTGACAACGACG
CTACCAACTATGCCGATTCTGTTAAAGGTCGCTTCACTATTTCACGCGATGATGCGCGTAATACCGTGTACTTACAGTTGAACTCACTGAAACCTGAGGATAC
CGCCGTTTATTATTGTAATGCAACCATCTTTATGGATTCCGATTTGGGTGACTATTGGGGTCAGGGCACACAAGTCACGGTCTCAAGCGGCGGAAGCTCTGG
TGAACAGAAACTGATTTCAGAAGCCAA
AIVHVFA#LDNDA#TIFMDSHLG#evqlvesggglvqagdslrlscaasgAIVHVFAmgwfrqapgkerefvasinLDNDAtnyadsvkgrftisrddarntvylqmnslkpedtavyycna
TIFMDSHLGdywgqgtqvtvss#ACCATGGAAGTTCAACTGGTTGAATCTGGTGGCGGTTTAGTTCAAGCCGGTGATAGCCTTCGTCTGAGCTGCGCCGCAAGC
GGAGCCATTGTGCATGTGTTCGCTATGGGTTGGTTTCGCCAGGCACCTGGTAAAGAACGTGAATTTGTGGCATCCATTAACCTTGACAACGACGCTACCAAC
TATGCCGATTCTGTTAAAGGTCGCTTCACTATTTCACGCGATGATGCGCGTAATACCGTGTACTTACAGATGAACTCACTGAAACCTGAGGATACCGCCGTTT
ATTATTGTAATGCAACCATCTTTATGGATTCCCATTTGGGTGACTATTGGGGTCAGGGCACACAAGTCACGGTCTCAAGCGGCGGAAGCTCTGGTGAACAGA
AACTGATTTCAGAAGCCAA
AIVHVFA#LDNDA#TIFMDSDLG#evqlvesggglvqagdslrlscaasgAIVHVFAmgwfrqapgkerefvasinLDNDAtnyadsvkgrftisrddarntvylqmnslkpedtavyycna
TIFMDSDLGdywgqgtqgtvss#ATACCATGGAAGTTCAACTGGTTGAATCTGGTGGCGGTTTAGTTCAAGCCGGTGATAGCCTTCGTCTGAGCTGCGCCGCAA
GCGGAGCCATTGTGCATGTGTTCGCTATGGGTTGGTTTCGCCAGGCACCTGGTAAAGAACGTGAATTTGTGGCATCCATTAACCTTGACAACGACGCTACCA
ACTATGCCGATTCTGTTAAAGGTCGCTTCACTATTTCACGCGATGATGCGCGTAATACCGTGTACTTACAGATGAACTCACTGAAACCTGAGGATACCGCCGT
TTATTATTGTAATGCAACCATCTTTATGGATTCCGATTTGGGTGACTATTGGGGTCAGGGCACACAAGGCACGGTCTCAAGCGGCGGAAGCTCTGGTGAACA
GAAACTGATTTCAGAAGCCAA
AIVHVFA#LDNDA#PFWINSSVV#evqlvesggglvqvgdslrlscaasgAIVHVFAmgwfrqapgkerefvasinLDNDAtnyadsvkgrftisrddahntvylqmnslkpedtavyycn
aPFWINSSVVdywgqgtqvtvss#ACCATGGAAGTTCAACTGGTTGAATCTGGTGGCGGTTTAGTTCAAGTCGGTGATAGCCTTCGTCTGAGCTGCGCCGCAAG
CGGAGCCATTGTGCATGTGTTCGCTATGGGTTGGTTTCGCCAGGCACCTGGTAAAGAACGTGAATTTGTGGCATCCATTAACCTTGACAACGACGCTACCAA
CTATGCCGATTCTGTTAAAGGTCGCTTCACTATTTCACGTGATGATGCGCATAATACCGTGTACTTACAGATGAACTCACTGAAACCTGAGGATACCGCCGTT
TATTATTGTAATGCACCCTTCTGGATCAATAGTTCTGTTGTGGACTATTGGGGTCAGGGCACACAAGTCACGGTCTCAAGCGGCGGAAGCTCTGGTGAACAG
AAACTGATTTCAGAAGCCAA
AIVHVFA#LDNDA#TIFMDSDLG#evqlvesggglvqagdslrlscaasgAIVHVFAmgwfrqapgkerefvasinLDNDAtnyadsvkgrftisrddarntvylqmnslkpedtavhycn
aTIFMDSDLGdywgqgtqvtvss#ATACCATGGAAGTTCAACTGGTTGAATCTGGTGGCGGTTTAGTTCAAGCCGGTGATAGCCTTCGTCTGAGCTGCGCCGCA
AGCGGAGCCATTGTGCATGTGTTCGCTATGGGTTGGTTTCGCCAGGCACCTGGTAAAGAACGTGAATTTGTGGCATCCATTAACCTTGACAACGACGCTACC
AACTATGCCGATTCTGTTAAAGGTCGCTTCACTATTTCACGCGATGATGCGCGTAATACCGTGTACTTACAGATGAACTCACTGAAACCTGAGGATACCGCC
GTTCATTATTGTAATGCAACCATCTTTATGGATTCCGATTTGGGTGACTATTGGGGTCAGGGCACACAAGTCACGGTCTCAAGCGGCGGAAGCTCTGGTGAA
CAGAAACTGATTTCAGAAGCCAA
AIVHVFA#LDNDA#TIFMDSDLG#evqlvesggglvqagdslrlscaasgAIVHVFAmgwfrqapgkerefvasinLDNDAtnyvdsvkgrftisrddarntvylqmnslkpedtavyycna
TIFMDSDLGdywgqgtqvtvss#AAGGAGATATACCATGGAAGTTCAACTGGTTGAATCTGGTGGCGGTTTAGTTCAAGCCGGTGATAGCCTTCGTCTGAGCTG
CGCCGCAAGCGGAGCCATTGTGCATGTGTTCGCTATGGGTTGGTTTCGCCAGGCACCTGGTAAAGAACGTGAATTTGTGGCATCCATTAACCTTGACAACGA
CGCTACCAACTATGTCGATTCTGTTAAAGGTCGCTTCACTATTTCACGCGATGATGCGCGTAATACCGTGTACTTACAGATGAACTCACTGAAACCTGAGGAT
ACCGCCGTTTATTATTGTAATGCAACCATCTTTATGGATTCCGATTTGGGTGACTATTGGGGTCAGGGCACACAAGTCACGGTCTCAAGCGGCGGAAGCTCT
GGTGAACAGAAACTGATTTCAGAAGCCAA
AIVHVFA#LDNDA#PFWINSSVV#evqlvesggglvqagdslrlscaasgAIVHVFAmawfrqapgkerefvasinLDNDAtnyadsvkgrftisrddahntvylqmnslkpedtavyycn
aPFWINSSVVdywgqgtqvtvss#ATATACCATGGAAGTTCAACTGGTTGAATCTGGTGGCGGTTTAGTTCAAGCCGGTGATAGCCTTCGTCTGAGCTGCGCCGC
AAGCGGAGCCATTGTGCATGTGTTCGCTATGGCTTGGTTTCGCCAGGCACCTGGTAAAGAACGTGAATTTGTGGCATCCATTAACCTTGACAACGACGCTAC
CAACTATGCCGATTCTGTTAAAGGTCGCTTCACTATTTCACGCGATGATGCGCATAATACCGTGTACTTACAGATGAACTCACTGAAACCTGAGGATACCGCC
GTTTATTATTGTAATGCACCCTTCTGGATCAATAGTTCTGTTGTGGACTATTGGGGTCAGGGCACACAAGTCACAGTCTCAAGCGGCGGAAGCTCTGGTGAA
CAGAAACTGATTTCAGAAGCCAA
AIVHVFA#LDNDA#PFWINSSVV#evqlvesggglvqaggsIrlscaasgAIVHVFAmgwfrqapgkerefvasinLDNDAtnyadsvkgrftisrddahntvylqmnslkpedtavyycn
aPFWINSSVVdywgqgtqvtvss#GAAGGAGATATACCATGGAAGTTCAACTGGTTGAATCTGGTGGCGGTTTAGTTCAAGCCGGTGGTAGCCTTCGTCTGAGC
TGCGCCGCAAGCGGAGCCATTGTGCATGTGTTCGCTATGGGTTGGTTTCGCCAGGCACCTGGTAAAGAACGTGAATTTGTGGCATCCATTAACCTTGACAAC
GACGCTACCAACTATGCCGATTCTGTTAAAGGTCGCTTCACTATTTCACGCGATGATGCGCATAATACCGTGTACTTACAGATGAACTCACTGAAACCTGAGG
ATACCGCCGTTTATTATTGTAATGCACCCTTCTGGATCAATAGTTCTGTTGTGGACTATTGGGGTCAGGGCACACAAGTCACGGTCTCAAGCGGCGGAAGCT
CTGGTGAACAGAAACTGATTTCAGAAGCCAA
AIVHVFA#LDNDA#TIFMDSDLG#evqlvesggglvqagdrlrlscaasgAIVHVFAmgwfrqapgkerefvasinLDNDAtnyadsvkgrftisrddarntvylqmnslkpedtavyycna
TIFMDSDLGdywgqgtqvtvss#GAAGGAGATATACCATGGAAGTTCAACTGGTTGAATCTGGTGGCGGTTTAGTTCAAGCCGGTGATCGCCTTCGTCTGAGCT
GCGCCGCAAGCGGAGCCATTGTGCATGTGTTCGCTATGGGTTGGTTTCGCCAGGCACCTGGTAAAGAACGTGAATTTGTGGCATCCATTAACCTTGACAAC
GACGCTACCAACTATGCCGATTCTGTTAAAGGTCGCTTCACTATTTCACGCGATGATGCGCGTAATACCGTGTACTTACAGATGAACTCACTGAAACCTGAG
GATACCGCCGTTTATTATTGTAATGCAACCATCTTTATGGATTCCGATTTGGGTGACTATTGGGGTCAGGGCACACAAGTCACGGTCTCAAGCGGCGGAAGC
TCTGGTGAACAGAAACTGATTTCAGAAGCCAA
PIVHVFA#LDNDA#TIFMDSDLG#evqlvesggglvqagdslrlscaasgPIVHVFAmgwfrqapgkerefvasinLDNDAtnyadsvkgrftisrddarntvylqmnslkpedtavyycna
TIFMDSDLGdywgqgtqvtvss#GAATGCGATATACCATGGAAGTTCAACTGGTTGAATCTGGTGGCGGTTTAGTTCAAGCCGGTGATAGCCTTCGTCTGAGCT
GCGCCGCAAGCGGACCCATTGTGCATGTGTTCGCTATGGGTTGGTTTCGCCAGGCACCTGGTAAAGAACGTGAATTTGTGGCATCCATTAACCTTGACAACG
ACGCTACCAACTATGCCGATTCTGTTAAAGGTCGCTTCACTATTTCACGCGATGATGCGCGTAATACCGTGTACTTACAGATGAACTCACTGAAACCTGAGGA
TACCGCCGTTTATTATTGTAATGCAACCATCTTTATGGATTCCGATTTGGGTGACTATTGGGGTCAGGGCACACAAGTCACGGTCTCAAGCGGCGGAAGCTC
TGGTGAACAGAAACTGATTTCAGAAGCCAA
AIVHVFA#LDNDA#TIFMDSDLG#evqlvesggglvqagdslrlscatsgAIVHVFAmgwfrqapgkerefvasinLDNDAtnyadsvkgrftisrddarntvylqmnslkpedtavyycna
TIFMDSDLGdywgqgtqvtvss#ACCATGGAAGTTCAACTGGTTGAATCTGGTGGTGGTTTAGTTCAAGCCGGTGATAGCCTTCGTCTGAGCTGCGCCACAAGC
GGAGCCATTGTGCATGTGTTCGCTATGGGTTGGTTTCGCCAGGCACCTGGTAAAGAACGTGAATTTGTGGCATCCATTAACCTTGACAACGACGCTACCAAC
TATGCCGATTCTGTTAAAGGTCGCTTCACTATTTCACGCGATGATGCGCGTAATACCGTGTACTTACAGATGAACTCACTGAAACCTGAGGATACCGCCGTTT
ATTATTGTAATGCAACCATCTTTATGGATTCCGATTTGGGTGACTATTGGGGTCAGGGCACACAAGTCACGGTCTCAAGCGGCGGAAGCTCTGGTGAACAG
AAACTGATTTCAGAAGCCAA
AIVHVFA#LDNDA#TLYHTIREAR#evqlvesggglvqagdslrlscaasgAIVHVFAmgwfrqapgkerefvasinLDNDAtnyadsvkgrftisrddarntvylqmnslkpedtavyycat
TLYHTIREARdywgqgtqvtvss#AGGAGATATACCATGGAAGTTCAACTGGTTGAATCTGGTGGCGGTTTAGTTCAAGCCGGTGATAGCCTTCGTCTGAGCTGC
GCCGCAAGCGGAGCCATTGTGCATGTGTTCGCTATGGGTTGGTTTCGCCAGGCACCTGGTAAAGAACGTGAATTTGTGGCATCCATTAACCTTGACAACGAC
GCTACCAACTATGCCGATTCTGTTAAAGGTCGCTTCACTATTTCACGCGATGATGCGCGTAATACCGTGTACTTACAGATGAACTCACTGAAACCTGAGGATA
CCGCCGTTTATTATTGTGCGACAACTCTGTACCATACGATTCGGGAGGCCCGCGACTATTGGGGTCAGGGCACACAAGTCACGGTCTCAAGCGGCGGAAGC
TCTGGTGAACAGAAACTGATTTCAGAAGCCAA
AIVHVFA#LDNDA#PAYHLASMVT#evqlfesggglvqagdslrlscaasgAIVHVFAmgwfrqapgkerefvasinLDNDAtnyadsvkgrftisrddarntvylqmnslkpedtavyyc
aaPAYHLASMVTdywgqgtqvtvss#ATATACCATGGAAGTTCAACTGTTTGAATCTGGTGGCGGTTTAGTTCAAGCCGGTGATAGCCTTCGTCTGAGCTGCGCC
GCAAGCGGAGCCATTGTGCATGTGTTCGCTATGGGTTGGTTTCGCCAGGCACCTGGTAAAGAACGTGAATTTGTGGCATCCATTAACCTTGACAACGACGCT
ACCAACTATGCCGATTCTGTTAAAGGTCGCTTCACTATTTCACGCGATGATGCGCGTAATACCGTGTACTTACAGATGAACTCACTGAAACCTGAGGATACCG
CCGTTTATTATTGTGCGGCACCTGCCTACCATCTCGCCTCTATGGTTACCGACTATTGGGGTCAGGGCACACAAGTCACGGTCTCAAGCGGCGGAAGCTCTG
GTGAACAGAAACTGATTTCAGAAGCCAA
AIVNVFA#LDNDA#TIFMDSDLG#evqlvesggglvqagdslrlscaasgAIVNVFAmgwfrqapgkerefvasinLDNDAtnyadsvkgrftisrddarntvylqmnslkpedtavyycn
aTIFMDSDLGdywgqgtqvtvss#ATATACCATGGAAGTTCAACTGGTTGAATCTGGTGGCGGTTTAGTTCAAGCCGGTGATAGCCTTCGTCTGAGCTGCGCCGC
AAGCGGAGCCATTGTGAATGTGTTCGCTATGGGTTGGTTTCGCCAGGCACCTGGTAAAGAACGTGAATTTGTGGCATCCATTAACCTTGACAACGACGCTAC
CAACTATGCCGATTCTGTTAAAGGTCGCTTCACTATTTCACGCGATGATGCGCGTAATACCGTGTACTTACAGATGAACTCACTGAAACCTGAGGATACCGCC
GTTTATTATTGTAATGCAACCATCTTTATGGATTCCGATTTGGGTGACTATTGGGGTCAGGGCACACAAGTCACGGTCTCAAGCGGCGGAAGCTCTGGTGAA
CAGAAACTGATTTCAGAAGCCAA
AIVHVFA#LDNDA#TAISPISIVD#evqlvesggglvqagdslrlscaasgAIVHVFAmgwfrqapgkerefvasinLDNDAtnyadsikgrftisrddarntvylqmnslkpedtavyycaaT
AISPISIVDeywgqgtqvtvss#AGATATACCATGGAAGTTCAACTGGTTGAATCTGGTGGCGGTTTAGTTCAAGCCGGGGATAGCCTTCGTCTGAGCTGCGCCGC
AAGCGGAGCCATTGTGCATGTGTTCGCTATGGGTTGGTTTCGCCAGGCACCTGGTAAAGAACGTGAATTTGTGGCATCCATTAACCTTGACAACGACGCTAC
CAACTATGCCGATTCTATTAAAGGTCGCTTCACTATTTCACGCGATGATGCGCGTAATACCGTGTACTTACAGATGAACTCACTGAAACCTGAGGATACCGCC
GTTTATTATTGTGCGGCAACGGCTATTAGCCCTATCTCTATTGTGGATGAGTATTGGGGTCAGGGCACACAAGTCACGGTCTCAAGCGGCGGAAGCTCTGGT
GAACAGAAACTGATTTCAGAAGCCAA
AIVHVFA#LDNDA#TIFMDSDLG#evqlvesggglvqvgdslrlscaasgAIVHVFAmgwfrqapgkerefvasinLDNDAtnyadsvkgrftisrddarntvylqmnslkpedtavyycna
TIFMDSDLGdywgqgtqvtvss#ACCATGGAAGTTCAACTGGTTGAATCTGGTGGCGGTTTAGTTCAAGTCGGTGATAGCCTTCGTCTGAGCTGCGCCGCAAGC
GGAGCCATTGTGCATGTGTTCGCTATGGGTTGGTTTCGCCAGGCACCTGGTAAAGAACGTGAATTTGTGGCATCCATTAACCTTGACAACGACGCTACCAAC
TATGCCGATTCTGTTAAAGGTCGCTTCACTATTTCACGCGATGATGCGCGTAATACCGTGTACTTACAGATGAACTCACTGAAACCTGAGGATACCGCCGTTT
ATTATTGTAATGCAACCATCTTTATGGATTCCGATTTGGGTGACTATTGGGGTCAGGGCACACAAGTCACGGTCTCAAGCGGCGGAAGCTCTGGTGAACAG
AAACTGATTTCAGAAGCCAA
AIVHVFA#LDNDA#PFWINSSVV#evqlvesggglvqagdslrlscaasgAIVHVFAmgwfrqapgkerefvasinLDNDAsnyadsvkgrftisrddarntvylqmnslkpedtavyycn
aPFWINSSVVdywgqgtqvtvss#ATACCATGGAAGTTCAACTGGTTGAATCTGGTGGCGGTTTAGTTCAAGCCGGTGATAGCCTTCGTCTGAGCTGCGCCGCA
AGCGGAGCCATTGTGCATGTGTTCGCTATGGGTTGGTTTCGCCAGGCACCTGGTAAAGAACGTGAATTTGTGGCATCCATTAACCTTGACAACGACGCTTCC
AACTATGCCGATTCTGTTAAAGGTCGCTTCACTATTTCACGCGATGATGCGCGTAATACCGTGTACTTACAGATGAACTCACTGAAACCTGAGGATACCGCC
GTTTATTATTGTAATGCACCCTTCTGGATCAATAGTTCTGTTGTGGACTATTGGGGTCAGGGCACACAAGTCACGGTCTCAAGCGGCGGAAGCTCTGGTGAA
CAGAAACTGATTTCAGAAGCCAA
AIVHVFA#LDNDA#TIFIDSDLG#evqlvesggglvqggdslrlscaasgAIVHVFAmgwfrqapgkerefvasinLDNDAtnyadsvkgrftisrddarntvylqmnslkpedtavyycnaT
IFIDSDLGdywgqgtqvtvss#ATATACCATGGAAGTTCAACTGGTTGAATCTGGTGGCGGTTTAGTTCAAGGCGGTGATAGCCTTCGTCTGAGCTGCGCCGCAA
GCGGAGCCATTGTGCATGTGTTCGCTATGGGTTGGTTTCGCCAGGCACCTGGTAAAGAACGTGAATTTGTGGCATCCATTAACCTTGACAACGACGCTACCA
ACTATGCCGATTCTGTTAAAGGTCGCTTCACTATTTCACGCGATGATGCACGTAATACCGTGTACTTACAGATGAACTCACTGAAACCTGAGGATACCGCCGT
TTATTATTGTAATGCAACCATCTTTATAGATTCCGATTTGGGTGACTATTGGGGTCAGGGCACACAAGTCACGGTCTCAAGCGGCGGAAGCTCTGGTGAACA
GAAACTGATTTCAGAAGCCAA
AIVHVFA#LDNDA#PFWINSSVV#evqlvesggglvhagdrlrlscaasgAIVHVFAmgwfrqapgkerefvasinLDNDAtnyadsvkgrftisrddahntvylqmnslkpedtavyycn
aPFWINSSVVdywgqgtqvtvss#GAAGGAGATATACCATGGAAGTTCAACTGGTTGAATCTGGTGGCGGTTTAGTTCACGCCGGTGATCGCCTTCGTCTGAGC
TGCGCCGCAAGCGGAGCCATTGTGCATGTGTTCGCTATGGGTTGGTTTCGCCAGGCACCCGGTAAAGAACGTGAATTTGTGGCATCCATTAACCTTGACAAC
GACGCTACCAACTATGCCGATTCTGTTAAAGGTCGCTTCACTATTTCACGCGATGATGCGCATAATACCGTGTACTTACAGATGAACTCACTGAAACCTGAGG
ATACCGCCGTTTATTATTGTAATGCACCCTTCTGGATCAATAGTTCTGTTGTGGACTATTGGGGTCAGGGCACACAAGTCACGGTCTCAAGCGGCGGAAGCT
CTGGTGAACAGAAACTGATTTCAGAAGCCAA
AIVHVFA#LDNDA#TIFMDSDLG#evqlvesgggliqagdslrlscaasgAIVHVFAmgwfrqapgkerefvasinLDNDAtnyadsvkgrftisrddarntvylqmnslkpedtavyycna
TIFMDSDLGdywgqgtqvtvss#GAAGGAGATATACCATGGAAGTTCAACTGGTTGAATCTGGTGGCGGTTTAATTCAAGCCGGTGATAGCCTACGTCTGAGCT
GCGCCGCAAGCGGAGCCATTGTGCATGTGTTCGCTATGGGTTGGTTTCGCCAGGCACCTGGTAAAGAACGTGAATTTGTGGCATCCATTAACCTTGACAAC
GACGCTACCAACTATGCCGATTCTGTTAAAGGTCGCTTCACTATTTCACGCGATGATGCGCGTAATACCGTGTACTTACAGATGAACTCACTGAAACCTGAG
GATACCGCCGTTTATTATTGTAATGCAACCATCTTTATGGATTCCGATTTGGGTGACTATTGGGGTCAGGGCACACAAGTCACGGTCTCAAGCGGCGGAAGC
TCTGGTGAACAGAAACTGATTTCAGAAGCCAA
AIVHVFA#LDNDA#FCYVPLATC#evqlvesggglvqagdslrlscaasgAIVHVFAmgwfrqapgkerefvasinLDNDAtnyvdsvkgrftisrddarntvylqmnslkpedtavyycna
FCYVPLATCdylgqgtqvtvss#AGATATACCATGGAAGTTCAACTGGTTGAATCTGGTGGCGGTTTAGTTCAAGCCGGTGATAGCCTTCGTCTGAGCTGCGCCGC
AAGCGGAGCCATTGTGCATGTGTTCGCTATGGGTTGGTTTCGCCAGGCACCTGGTAAAGAACGTGAATTTGTGGCATCCATTAACCTTGACAACGACGCTAC
CAACTATGTCGATTCTGTTAAAGGTCGCTTCACTATTTCACGCGATGATGCGCGTAATACCGTGTACTTACAGATGAACTCACTGAAACCTGAGGATACCGCC
GTTTATTACTGTAATGCATTCTGCTACGTCCCTTTGGCCACGTGTGACTATTTGGGTCAGGGCACACAAGTCACGGTCTCAAGCGGCGGAAGCTCTGGTGAA
AAGAAACTGATTTCAGAAGCCAA
AIVHVFA#LDNDA#PFWINSSVV#evrlvesggglvqagdslrlscaasgAIVHVFAmgwfrqapgkerefvasinLDNDAtnyadsvkgrftisrddahntvylqmnslkpedtavyycn
aPFWINSSVVdywgqgtqvtvss#AGATATACCATGGAAGTTCGACTGGTTGAATCTGGTGGCGGTTTAGTTCAAGCCGGTGATAGCCTTCGTCTGAGCTGCGC
CGCAAGCGGAGCCATTGTGCATGTGTTCGCTATGGGTTGGTTTCGCCAGGCACCTGGTAAAGAACGTGAATTTGTGGCATCCATTAACCTTGACAACGACGC
TACCAACTATGCCGATTCTGTTAAAGGTCGCTTCACTATTTCACGCGATGATGCGCATAATACCGTGTACTTACAGATGAACTCACTGAAACCTGAGGATACC
GCCGTTTATTATTGTAATGCACCCTTCTGGATCAATAGTTCTGTTGTGGACTATTGGGGTCAGGGCACACAAGTCACGGTCTCAAGCGGCGGAAGCTCTGGT
GAACAGAAACTGATTTCAGAAGCCAA
AIVHVFA#LDNDA#TIFMDSDLG#evklvesggglvkagdslrlscaasgAIVHVFAmgwfrqapgkerefvasinLDNDAtnyadsvkgrftisrddarntvylqmnslkpedtavyycna
TIFMDSDLGdywgqgtqvtvss#AGGAGATATACCATGGAAGTTAAACTGGTTGAATCTGGTGGCGGTTTAGTTAAAGCCGGTGATAGCCTTCGTCTGAGCTGC
GCCGCAAGCGGAGCCATTGTGCATGTGTTCGCTATGGGTTGGTTTCGCCAGGCACCTGGTAAAGAACGTGAATTTGTGGCATCCATTAACCTTGACAACGAC
GCTACCAACTATGCCGATTCTGTTAAAGGTCGCTTCACTATTTCACGCGATGATGCGCGTAATACCGTGTACTTACAGATGAACTCACTGAAACCTGAGGATA
CCGCCGTTTATTATTGTAATGCAACCATCTTTATGGATTCCGATTTGGGTGACTATTGGGGTCAGGGCACACAAGTCACGGTCTCAAGCGGCGGAAGCTCTG
GTGAACAGAAACTGATTTCAGAAGCCAA
AIVHVFA#LDNDA#FCYVPLATC#evqlvesggglvqagdslrlscaasgAIVHVFAmgwfrqapgkerefvasinLDNDAtnyadsvkgrftisrddarntvylqmnslkpedtavyycna
FCYVPLATCdyrgqgtqvtvss#ACCATGGAAGTTCAACTGGTTGAATCTGGTGGCGGTTTAGTTCAAGCCGGTGATAGCCTTCGTCTGAGCTGTGCCGCAAGCG
GAGCCATTGTGCATGTGTTCGCTATGGGTTGGTTTCGCCAGGCACCTGGTAAAGAACGTGAATTTGTGGCATCCATTAACCTTGACAACGACGCTACCAACT
ATGCCGATTCTGTTAAAGGTCGCTTCACTATTTCACGCGATGATGCGCGTAATACCGTGTACTTACAGATGAACTCACTGAAACCTGAGGATACCGCCGTTTA
TTATTGTAATGCATTCTGCTACGTCCCTTTGGCCACGTGTGACTATAGGGGTCAGGGCACACAAGTCACGGTCTCAAGCGGCGGAAGCTCTGGTGAACAGA
AACTGATTTCAGAAGCCAA
AIVHVFA#LDNDA#FCYVPLATC#qvqlvesggglvqagdslrlscaasgAIVHVFAmgwfrqapgkerefvasinLDNDAtnyadsvkgrftisrddarntvylqmnslkpedtavyycna
FCYVPLATCdywgqgtqvtvss#ATATACCATGCAGGTTCAACTGGTTGAATCTGGTGGCGGTTTAGTTCAAGCCGGTGATAGCCTTCGTCTGAGCTGCGCCGCA
AGCGGAGCCATTGTGCATGTGTTCGCTATGGGTTGGTTTCGCCAGGCACCTGGTAAAGAACGTGAATTTGTGGCATCCATTAACCTTGACAACGACGCTACC
AACTATGCCGATTCTGTTAAAGGTCGCTTCACTATTTCACGCGATGATGCGCGTAATACCGTGTACTTACAGATGAACTCACTGAAACCTGAGGATACCGCC
GTTTATTATTGTAATGCATTCTGCTACGTCCCTTTGGCCACGTGTGACTATTGGGGTCAGGGCACACAAGTCACGGTCTCAAGCGGCGGAAGCTCTGGTGAA
CAGAAACTGATTTCAGAAGCCAA
AIVHVFA#LDNDA#TIFMDSDLG#evqlvesggglvqagdslrlscaasgAIVHVFAmgcfrqapgkerefvasinLDNDAtnyadsvkgrftisrddarntvylqmnslkpedtavyycna
TIFMDSDLGdywvqgtqvtvss#ACCATGGAAGTTCAACTGGTTGAATCTGGTGGCGGTTTAGTTCAAGCCGGTGATAGCCTTCGTCTGAGCTGCGCCGCAAGC
GGAGCCATTGTGCATGTGTTCGCTATGGGTTGTTTTCGCCAGGCACCTGGTAAAGAACGTGAATTTGTGGCATCCATTAACCTTGACAACGACGCTACCAAC
TATGCCGATTCTGTTAAAGGTCGCTTCACTATTTCACGCGATGATGCGCGTAATACCGTGTACTTACAGATGAACTCACTGAAACCTGAGGATACCGCCGTTT
ATTATTGTAATGCAACCATCTTTATGGATTCCGATTTGGGTGACTATTGGGTTCAGGGCACACAAGTCACGGTCTCAAGCGGCGGAAGCTCTGGTGAAAAGA
AACTGATTTCAGAAGCCAA
AIVHVFA#LDNDA#TIFMDSDLG#evqlvesggglvqagdslrlscaasgAIVHVFAmgwfrqapgkerefvasinLDNDAtnyadsvkgrftisrddarntvylqmnslkpedtafyycna
TIFMDSDLGdywgqgtqvtvss#GAAGGAGATATACCATGGAAGTTCAACTGGTTGAATCTGGTGGCGGTTTAGTTCAAGCCGGTGATAGCCTTCGTCTGAGCT
GCGCCGCAAGCGGAGCCATTGTGCATGTGTTCGCTATGGGTTGGTTTCGCCAGGCACCTGGTAAAGAACGTGAATTTGTGGCATCCATTAACCTTGACAAC
GACGCTACCAACTATGCCGATTCTGTTAAAGGTCGCTTCACTATTTCACGCGATGATGCGCGTAATACCGTGTACTTACAGATGAACTCACTGAAACCTGAG
GATACCGCTTTTTATTATTGTAATGCAACCATCTTTATGGATTCCGATTTGGGTGACTATTGGGGTCAGGGCACACAAGTCACGGTCTCAAGCGGCGGAAGC
TCTGGTGAACAGAAACTGATTTCAGAAGCCAA
AIVHVFA#LDNDA#PFWINSSVV#gvqlvesggglvqagdslrlscaasgAIVHVFAmgwfrqapgkerefvasinLDNDAtnyadsvkgrftisrddahntvylqmnslkpedtavyycn
aPFWINSSVVdywgqgtqvtvss#AGGAGATATACCATGGGAGTTCAACTGGTTGAATCTGGTGGCGGTTTAGTTCAAGCCGGTGATAGCCTTCGTCTGAGCTG
CGCCGCAAGCGGAGCCATTGTGCATGTGTTCGCTATGGGTTGGTTTCGCCAGGCACCTGGTAAAGAACGTGAATTTGTGGCATCCATTAACCTTGACAACGA
CGCTACCAACTATGCCGATTCTGTTAAAGGTCGCTTCACTATTTCACGCGATGATGCGCATAATACCGTGTACTTACAGATGAACTCACTGAAACCTGAGGAT
ACCGCCGTTTATTATTGTAATGCACCCTTCTGGATCAATAGTTCTGTTGTGGACTATTGGGGGCAGGGCACACAAGTCACGGTCTCAAGCGGCGGAAGCTCT
GGTGAACAGAAAATGATTTCAGAAGCCAA
AIVHVFA#LDNDA#TIFMDSDLG#evqlvesggglvqagdslrlscaasgAIVHVFAmgwfrqapgkerefvasidLDNDAtnyadsvkgrftisrddarntvylqmnslkpedtavyycna
TIFMDSDLGdywgqgtqvtvss#GAAGGAGATATACCATGGAAGTTCAACTGGTTGAATCTGGTGGCGGTTTAGTTCAAGCCGGTGATAGCCTTCGTCTGAGCT
GCGCCGCAAGCGGAGCCATTGTGCATGTGTTCGCTATGGGTTGGTTTCGCCAGGCACCTGGTAAAGAACGTGAATTTGTGGCATCCATTGACCTTGACAAC
GACGCTACCAACTATGCCGATTCTGTTAAAGGTCGCTTCACTATTTCACGCGATGATGCGCGTAATACCGTGTACTTACAGATGAACTCACTGAAACCTGAG
GATACCGCCGTTTATTATTGTAATGCAACCATCTTTATGGATTCCGATTTGGGTGACTATTGGGGTCAGGGCACACAAGTCACGGTCTCAAGCGGCGGAAGC
TCTGGTGAACAGAAACTGATTTCAGAAGCCAA
AIVLVFA#LDNDA#TIFMDSDLG#evqlvesggglvqagdslrlscaasgAIVLVFAmgwfrqapgkerefvasinLDNDAtnyadsvkgrftisrddarntvylqmnslkpedtavyycna
TIFMDSDLGdywgqgtqvtvss#ATACCATGGAAGTTCAACTGGTTGAATCTGGTGGCGGTTTAGTTCAAGCCGGTGATAGCCTTCGTCTGAGCTGCGCCGCAA
GCGGAGCCATTGTGCTTGTGTTCGCTATGGGTTGGTTTCGCCAGGCACCTGGTAAAGAACGTGAATTTGTGGCATCCATTAACCTTGACAACGACGCTACCA
ACTATGCCGATTCTGTTAAAGGTCGCTTTACTATTTCACGCGATGATGCGCGTAATACCGTGTACTTACAGATGAACTCACTGAAACCTGAGGATACCGCCGT
TTATTATTGTAATGCAACCATCTTTATGGATTCCGATTTGGGTGACTATTGGGGTCAGGGCACACAAGTCACGGTCTCAAGCGGCGGAAGCTCTGGTGAACA
GAAACTGATTTCAGAAGCCAA
AIVHVFA#LDNDA#WSFTPSICTL#evqlvesggglvqagdslrlscaasgAIVHVFAmgwfrqapgkerefvasinLDNDAtnyadsvkgrftisrddarntvylqmnslkpedtavyyca
aWSFTPSICTLeywgqgtqgtvss#AAGGAGATATACCATGGAAGTTCAACTGGTTGAATCTGGTGGCGGTTTAGTTCAAGCCGGTGATAGCCTTCGTCTGAGCT
GCGCCGCAAGCGGAGCCATTGTGCATGTGTTCGCTATGGGTTGGTTTCGCCAGGCACCTGGTAAAGAACGTGAATTTGTGGCATCCATTAACCTTGACAAC
GACGCTACCAACTATGCCGATTCTGTTAAAGGTCGCTTCACTATTTCACGCGATGATGCGCGTAATACCGTGTACTTACAGATGAACTCACTGAAACCTGAG
GATACCGCCGTTTATTATTGTGCGGCATGGAGTTTCACCCCTTCTATCTGTACCTTGGAGTATTGGGGTCAGGGCACACAAGGCACGGTCTCAAGCGGCGGA
AGCTCTGGTGAACAGAAACTGATTTCAGAAGCCAA
AIVHVFA#LDNDA#TIFMDSDLG#evqlvesggglvqagdslrlscaasgAIVHVFAmdwfrqapgkerefvasinLDNDAtnyadsvkgrftisrddarntvylqmnslkpedtavyycn
aTIFMDSDLGdywgqgtqgtvss#ATACCATGGAAGTTCAACTGGTTGAATCTGGTGGCGGTTTAGTTCAAGCCGGTGATAGCCTTCGTCTGAGCTGCGCCGCA
AGCGGAGCCATTGTGCATGTGTTCGCTATGGATTGGTTTCGCCAGGCACCTGGTAAAGAACGTGAATTTGTGGCATCCATTAACCTTGACAACGACGCTACC
AACTATGCCGATTCTGTTAAAGGTCGCTTCACTATTTCACGCGATGATGCGCGTAATACCGTGTACTTACAGATGAACTCACTGAAACCTGAGGATACCGCC
GTTTATTATTGTAATGCAACCATCTTTATGGATTCCGATTTGGGTGACTATTGGGGTCAGGGCACACAAGGCACGGTCTCAAGCGGCGGAAGCTCTGGTGAA
CAGAAACTGATTTCAGAAGCCAA
AIVHVFA#LDNDA#TIFMDSDLG#qvqlvesggglvqagdslrlscaasgAIVHVFAmgwfrqapgkerefvasinLDNDAtnyadsvkgrftisrddarntvylqmnslkpedtavyycn
aTIFMDSDLGdywgqgtqgtvss#ATACCATGCAGGTTCAACTGGTTGAATCTGGTGGCGGTTTAGTTCAAGCCGGTGATAGCCTTCGTCTGAGCTGCGCCGCAA
GCGGAGCCATTGTGCATGTGTTCGCTATGGGTTGGTTTCGCCAGGCACCTGGTAAAGAACGTGAATTTGTGGCATCCATTAACCTTGACAACGACGCTACCA
ACTATGCCGATTCTGTTAAAGGTCGCTTCACTATTTCACGCGATGATGCGCGTAATACCGTGTACTTACAGATGAACTCACTGAAACCTGAGGATACCGCCGT
TTATTATTGTAATGCAACCATCTTTATGGATTCCGATTTGGGTGACTATTGGGGTCAGGGCACACAAGGCACGGTCTCAAGCGGCGGAAGCTCTGGTGAACA
GAAACTGATTTCAGAAGCCAA
AIVHVFA#LDNDA#PFWINSSVV#evqlvesggglvqagdslrlscaasgAIVHVFAmgwfrqapgkerefvasinLDNDAtnyadsvkgrftisrddahntvylqmnslkpedtavyycn
aPFWINSSVVdywgqgtqgtvss#GAAGGAGATATACCATGGAAGTTCAACTGGTTGAATCTGGTGGCGGTTTAGTTCAAGCCGGTGATAGCCTTCGTCTGAGC
TGCGCCGCAAGCGGAGCCATTGTGCATGTGTTCGCTATGGGTTGGTTTCGCCAGGCACCTGGTAAAGAACGTGAATTTGTGGCATCCATTAACCTTGACAAC
GACGCTACCAACTATGCCGATTCTGTTAAAGGTCGCTTCACTATTTCACGCGATGATGCGCATAATACCGTGTACTTACAGATGAACTCACTGAAACCTGAGG
ATACCGCCGTTTATTATTGTAATGCACCCTTCTGGATCAATAGTTCTGTTGTGGACTATTGGGGTCAGGGCACACAAGGCACGGTCTCAAGCGGCGGAAGCT
CTGGTGAACAGAAACTGATTTCAGAAGCCAA
AIVHVFA#LDNDA#PFWINSSVV#evqlvdsggglvqagdrlrlscaasgAIVHVFAmgwfrqapgkerefvasinLDNDAtnyadsvkgrftisrddahntvylqmnslkpedtavyycn
aPFWINSSVVdywgqgtqgtvss#GAAGGAGATATACCATGGAAGTTCAACTGGTTGACTCTGGTGGCGGTTTAGTTCAAGCCGGTGATCGCCTTCGTCTGAGC
TGCGCCGCAAGCGGAGCCATTGTGCATGTGTTCGCTATGGGTTGGTTTCGCCAGGCACCTGGTAAAGAACGTGAATTTGTGGCATCCATTAACCTTGACAAC
GACGCTACCAACTATGCCGATTCTGTTAAAGGTCGCTTCACTATTTCACGCGATGATGCGCATAATACCGTGTACTTACAGATGAACTCACTGAAACCTGAGG
ATACCGCCGTTTATTATTGTAATGCACCCTTCTGGATCAATAGTTCTGTTGTGGACTATTGGGGTCAGGGCACACAAGGCACGGTCTCAAGCGGCGGAAGCT
CTGGTGAACAGAAACTGATTTCAGAAGCCAA
AIVHVFA#LDNDA#ACSDYTYGSHGVR#evqlvesggglvqagdslrlscaasgAIVHVFAmgwfrqapgkerefvasinLDNDAtnyadsvkgrftisrddarntvylqmnslkpedtav
yycnaACSDYTYGSHGVRdywgqgtqgtvss#GGAGATATACCATGGAAGTTCAACTGGTTGAATCTGGTGGCGGTTTAGTTCAAGCCGGTGATAGCCTTCGTCT
GAGCTGCGCCGCAAGCGGAGCCATTGTGCATGTGTTCGCTATGGGTTGGTTTCGCCAGGCACCTGGTAAAGAACGTGAATTTGTGGCATCCATTAACCTTG
ACAACGACGCTACCAACTATGCCGATTCTGTTAAAGGTCGCTTCACTATTTCACGCGATGATGCGCGTAATACCGTGTACTTACAGATGAACTCACTGAAACC
TGAGGATACCGCCGTTTATTATTGTAATGCAGCGTGTTCGGACTATACGTATGGCTCTCATGGTGTTCGGGACTATTGGGGTCAGGGCACACAAGGCACTGT
CTCAAGCGGCGGAAGCTCTGGTGAACAGAAACTGATTTCAGAAGCCAA
AIVHVFA#LDNDA#ACSDYTYGSHGVR#evqlvesggglvqagdslrlscaasgAIVHVFAmgwfrqapgkerefvasinLDNDAtnyadsvkgrftisrddarntvylqmnslkpedtav
yycnaACSDYTYGSHGVRdswgqgtqgtvss#GGAGATATACCATGGAAGTTCAACTGGTTGAATCTGGTGGCGGTTTAGTTCAAGCCGGTGATAGTCTTCGTCT
GAGCTGCGCCGCAAGCGGAGCCATTGTGCATGTGTTCGCTATGGGTTGGTTTCGCCAGGCACCTGGTAAAGAACGTGAATTTGTGGCATCCATTAACCTTG
ACAACGACGCTACCAACTATGCCGATTCTGTTAAAGGTCGCTTCACTATTTCACGCGATGATGCGCGTAATACCGTGTACTTACAGATGAACTCACTGAAACC
TGAGGATACCGCCGTTTATTATTGTAATGCAGCGTGTTCGGACTATACGTATGGCTCTCATGGTGTTCGGGACTCTTGGGGTCAGGGCACACAAGGCACGG
TCTCAAGCGGCGGAAGCTCTGGTGAACAGAAACTGATTTCAGAAGCCAA
AIVHVFA#LDNDA#PFWINSSVV#qvqlvesggglvqagdslrlscaasgAIVHVFAmgwfrqapgkerefvasinLDNDAtnyadsvkgrftisrddahntvylqmnspkpedtavyyc
naPFWINSSVVdywgqgtqvtvss#AAGGAGATATACCATGCAGGTTCAACTGGTTGAATCTGGTGGCGGTTTAGTTCAAGCCGGTGATAGCCTTCGTCTGAGC
TGCGCCGCAAGCGGAGCCATTGTGCATGTGTTCGCTATGGGTTGGTTTCGCCAGGCACCTGGTAAAGAACGTGAATTTGTGGCATCCATTAACCTTGACAAC
GACGCTACCAACTATGCCGATTCTGTTAAAGGTCGCTTCACTATTTCACGCGATGATGCGCATAATACCGTGTACTTACAGATGAACTCACCGAAACCTGAG
GATACCGCCGTTTATTATTGTAATGCACCCTTCTGGATCAATAGTTCTGTTGTGGACTATTGGGGTCAGGGCACACAAGTCACGGTCTCAAGCGGCGGAAGC
TCTGGTGAACAGAAACTGATTTCAGAAGCCAA
AIVHVFA#LDNDA#ACSDYTYGSHGVR#evqlfesggglvqagdslrlscaasgAIVHVFAmgwfrqapgkerefvasinLDNDAtnyadsvkgrftisrddarntvylqmnslkpedtav
yycnaACSDYTYGSHGVRdswgqgtqvtvss#ATATACCATGGAAGTTCAACTGTTTGAATCTGGTGGCGGTTTAGTTCAAGCCGGTGATAGCCTTCGTCTGAGCT
GCGCCGCAAGCGGAGCCATTGTGCATGTGTTCGCTATGGGTTGGTTTCGCCAGGCACCTGGTAAAGAACGTGAATTTGTGGCATCCATTAACCTTGACAAC
GACGCTACCAACTATGCCGATTCTGTTAAAGGTCGCTTCACTATTTCACGCGATGATGCGCGTAATACCGTGTACTTACAGATGAACTCACTGAAACCTGAG
GATACCGCCGTTTATTATTGTAATGCAGCGTGTTCGGACTATACGTATGGCTCTCATGGTGTTCGGGACTCTTGGGGTCAGGGCACACAAGTCACGGTCTCA
AGCGGCGGAAGCTCTGGTGAACAGAAACTGATTTCAGAAGCCAA
AIVHVFA#LDNDA#FCYVPLATC#evqlvesggglvqagdslrlscaasgAIVHVFAmgwfrqapgkereivasinLDNDAtnyadsvkgrftisrddarntvylqmnslkpedtavyycna
FCYVPLATCdylgqgtqvtvss#AGGAGATATACCATGGAAGTTCAACTGGTTGAATCTGGTGGCGGTTTAGTTCAAGCCGGTGATAGCCTTCGTCTGAGCTGCG
CCGCAAGCGGAGCCATTGTGCATGTGTTCGCTATGGGTTGGTTTCGCCAGGCACCTGGTAAAGAACGTGAAATTGTGGCATCCATTAACCTTGACAACGAC
GCTACCAACTATGCCGATTCTGTTAAAGGTCGCTTCACTATTTCACGCGATGATGCGCGTAATACCGTGTACTTACAGATGAACTCACTGAAACCTGAGGATA
CCGCCGTTTATTACTGTAATGCATTCTGCTACGTCCCTTTGGCCACGTGTGACTATTTGGGTCAGGGCACACAAGTCACGGTCTCAAGCGGCGGAAGCTCTG
GTGAACAGAAACTGATTTCAGAAGCCAA
AIVHVFA#LDNDA#PFWINSSVV#evqlvesggglvqagdslrlscaasgAIVHVFAmgwfrqapgkerefvasinLDNDAtnyadsvkgrftisrddahntvylqmnslkpedtavyycn
aPFWINSSVVdywgqgtqvavss#ACCATGGAAGTTCAACTGGTTGAATCTGGTGGCGGTTTAGTTCAAGCCGGTGATAGCCTTCGTCTGAGCTGCGCCGCAAG
CGGAGCCATTGTGCATGTGTTCGCTATGGGTTGGTTTCGTCAGGCACCTGGTAAAGAACGTGAATTTGTGGCATCCATTAACCTTGACAACGACGCTACCAA
CTATGCCGATTCTGTTAAAGGTCGCTTCACTATTTCACGCGATGATGCGCATAATACCGTGTACTTACAGATGAACTCACTGAAACCTGAGGATACCGCCGTT
TATTATTGTAATGCACCCTTCTGGATCAATAGTTCTGTTGTGGACTATTGGGGTCAGGGCACACAAGTCGCGGTCTCAAGCGGCGGAAGCTCTGGTGAACAG
AAACTGATTTCAGAAGCCAA
AIVHVFA#LDNDA#TIFMDSDSG#evqlvesggglvqagdslrlscaasgAIVHVFAmgwfrqapgkerefvasinLDNDAtnyadsvkgrftisrddarntvylqmnslkpedtavyycn
aTIFMDSDSGdywgqdtqgtvss#GAAGGAGATATACCATGGAAGTTCAACTGGTTGAATCTGGTGGCGGTTTAGTTCAAGCCGGTGATAGCCTTCGTCTGAGC
TGCGCCGCAAGCGGAGCCATTGTGCATGTGTTCGCTATGGGTTGGTTTCGCCAGGCACCTGGTAAAGAACGTGAATTTGTGGCATCCATTAACCTTGACAAC
GACGCTACCAACTATGCCGATTCTGTTAAAGGTCGCTTCACTATTTCACGCGATGATGCGCGTAATACCGTGTACTTACAGATGAACTCACTGAAACCTGAG
GATACCGCCGTTTATTATTGTAATGCAACCATCTTTATGGATTCCGATTCGGGTGACTATTGGGGTCAGGACACACAAGGCACGGTCTCAAGCGGCGGAAGC
TCTGGTGAACAGAAAATGATTTCAGAAGCCAA
AIVHVFA#LDNDA#FCYVPLATC#evqlvesggglvqagdslrlscaasgAIVHVFAmgwfrqapgkerefvasinLDNDAtnyadsvkgrftisrddarntvylqmnslkpedtavyycna
FCYVPLATCdywgqgtqgtvss#GGAGATATACCATGGAAGTTCAACTGGTTGAATCTGGTGGCGGTTTAGTTCAAGCCGGTGATAGCCTTCGTCTGAGCTGCG
CCGCAAGCGGAGCCATTGTGCATGTGTTCGCTATGGGTTGGTTTCGCCAGGCACCTGGTAAAGAACGTGAATTTGTGGCATCCATTAACCTTGACAACGACG
CTACCAACTATGCCGATTCTGTTAAAGGTCGCTTCACTATTTCACGCGATGATGCGCGTAATACCGTGTACTTACAGATGAACTCACTGAAACCTGAGGATAC
CGCCGTTTATTATTGTAATGCATTCTGCTACGTCCCTTTGGCCACGTGTGACTATTGGGGTCAGGGCACACAAGGCACGGTCTCAAGCGGCGGAAGCTCTGG
TGAACAGAAAATGATTTCAGAAGCCAA
AIVHVFA#LDNDA#TAISPISIVD#kvqlvesggglvqagdslrlscaasgAIVHVFAmgwfrqapgkerefvasinLDNDAtnyadsvkgrftisrddarntvylqmnslkpedtavyycaa
TAISPISIVDeywgqgtqvtvss#ATACCATGAAAGTTCAACTGGTTGAATCTGGTGGCGGTTTAGTTCAAGCCGGTGATAGCCTTCGTCTGAGCTGCGCCGCAAG
CGGAGCCATTGTGCATGTGTTCGCTATGGGTTGGTTTCGCCAGGCACCTGGTAAAGAACGTGAATTTGTGGCATCCATTAACCTTGACAACGACGCTACCAA
CTATGCCGATTCTGTTAAAGGTCGCTTCACTATTTCACGCGATGATGCGCGTAATACCGTGTACTTACAGATGAACTCACTGAAACCTGAGGATACCGCCGTT
TATTATTGTGCGGCAACGGCTATTAGCCCTATCTCTATTGTGGATGAGTATTGGGGTCAGGGCACACAAGTCACGGTCTCAAGCGGCGGAAGCTCTGGTGA
ACAGAAACTGATTTCAGAAGCCAA
AIVHVFA#LDNDA#TIFMDSDLG#egqlvesggglvqagdslrlscaasgAIVHVFAmgwfrqapgkerefvasinLDNDAtnyadsvkgrftisrddarntvylqmnslkpedtavyycn
aTIFMDSDLGdywgqgtqgtvss#ACCATGGAAGGTCAACTGGTTGAATCTGGTGGCGGTTTAGTTCAAGCCGGTGATAGCCTTCGTCTGAGCTGCGCCGCAAG
CGGAGCCATTGTGCATGTGTTCGCTATGGGTTGGTTTCGCCAGGCACCTGGTAAAGAACGTGAATTTGTGGCATCCATTAACCTTGACAACGACGCTACCAA
CTATGCCGATTCTGTTAAAGGTCGCTTCACTATTTCACGCGATGATGCGCGTAATACCGTGTACTTACAGATGAACTCACTGAAACCTGAGGATACCGCCGTT
TATTATTGTAATGCAACCATCTTTATGGATTCCGATTTGGGTGACTATTGGGGTCAGGGCACACAAGGCACGGTCTCAAGCGGCGGAAGCTCTGGTGAAAA
GAAAATGATTTCAGAAGCCAA
AIVHVFA#LDNDA#TIFMDSDLG#evqlvesggglvqagdslrlscdasgAIVHVFAmgwfrqapgkerefvasinLDNDAtnyadsvkgrftisrddarntvylqmnslkpedtavyycn
aTIFMDSDLGdywgqgtqgtvss#AGATATACCATGGAAGTTCAACTGGTTGAATCTGGTGGCGGTTTAGTTCAAGCCGGTGATAGCCTTCGTCTGAGCTGCGA
CGCAAGCGGAGCCATTGTGCATGTGTTCGCTATGGGTTGGTTTCGCCAGGCACCTGGTAAAGAACGTGAATTTGTGGCATCCATTAACCTTGACAACGACGC
TACCAACTATGCCGATTCTGTTAAAGGTCGCTTCACTATTTCACGCGATGATGCGCGTAATACCGTGTACTTACAGATGAACTCACTGAAACCTGAGGATACC
GCCGTTTATTATTGTAATGCAACCATCTTTATGGATTCCGATTTGGGTGACTATTGGGGTCAGGGCACACAAGGCACGGTCTCAAGCGGCGGAAGCTCTGGT
GAACAGAAAATGATTTCAGAAGCCAA

TABLE 7
List of RBD binder clusters. A list containing key information for all predicted RBD binding clusters. Cluster ID, size, CDR representative sequences, CDR consensus sequences, CDR scores
(see Materials and Methods), and whether each CDR is unique to RBD and not found in EGFP clusters were shown.
Column 3 - CDR1_rep - SEQ ID NOS: 2756-3644
Column 4 - CDR2_rep: SEQ ID NOS: 3645-4551
Column 5 - CDR3_rep: SEQ ID NOS: 4552-5460

| clus- | clus- | | | | | | | | | | | | | |
|---|---|---|---|---|---|---|---|---|---|---|---|---|---|---|
| ter_{—} | ter_{—} | | | | | | | CDR1_{—} | CDR2_{—} | CDR3_{—} | total_{—} | CDR1_{—} | CDR2_{—} | CDR3_{—} |
| ID | size | CDR1_rep | CDR2_rep | CDR3_rep | CDR1_consensus | CDR2_consensus | CDR3_consensus | score | score | score | score | unique | unique | unique |
| 17 | 991 | YSCDTVR | IVSGW | QLVANTRLPVAVM | Y99B00.S99B00. | I99B00.V99B00. | B00 | 21 | 15 | 0 | 36 | Yes | Yes | Yes |
| | | | | | C99C99.D99B00. | S99B00.G99B00. | | | | | | | | |
| | | | | | T99B00.V99B00. | W99W99. | | | | | | | | |
| | | | | | R99R99. | | | | | | | | | |
| 22 | 679 | DCHVLWR | LDGLF | MPFF | D99D99.C99B00. | L99B00.D99B00. | B00 | 21 | 15 | 0 | 36 | Yes | Yes | Yes |
| | | | | | H99B00.V99B00. | G99B00.L99B00. | | | | | | | | |
| | | | | | L99L99.W99B00. | F99B00. | | | | | | | | |
| | | | | | R99B00. | | | | | | | | | |
| 112 | 574 | AIVHVFA | LDNDA | TIFMDSDLG | A99B00.I99I99. | L99L99.D99D99. | T67B00.I59B00. | 21 | 15 | 19 | 55 | Yes | Yes | Yes |
| | | | | | V99B00.H99B00. | N99B00.D99D99. | F60B00.M58B00. | | | | | | | |
| | | | | | V99V99.F99B00. | A99A99. | D59B00.S82B00. | | | | | | | |
| | | | | | A99B00. | | D58B00.L58B00. | | | | | | | |
| | | | | | | | G59B00. | | | | | | | |
| 67 | 393 | DYCMDCF | PYSFK | NPLDPNWTNS | D99D99.Y99B00. | P99B00.Y99B00. | B00B00.P35B00. | 21 | 15 | 11 | 47 | Yes | Yes | Yes |
| | | | | | C99C99.M99M99. | S99B00.F99B00. | L47B00.I40B00. | | | | | | | |
| | | | | | D99D99.C99B00. | K99B00. | B00B00.B00B00. | | | | | | | |
| | | | | | F99F99. | | B00B00.T51B00. | | | | | | | |
| | | | | | | | B00B00.S39B00. | | | | | | | |
| 33 | 31 | PYCMGNQ | QMSRQ | LRSFLE | P99B00.Y97B00. | Q99B00.M99B00. | L99B00.R99B00. | 21 | 15 | 18 | 54 | Yes | Yes | Yes |
| | | | | | C99B00.M99B00. | S99B00.R98B00. | S99B00.F99B00. | | | | | | | |
| | | | | | G99B00.N98B00. | Q99B00. | L99B00.E99B00. | | | | | | | |
| | | | | | Q99B00. | | | | | | | | | |
| 129 | 225 | WFQRQVY | RTLDS | ICYNRRDVML | W99W99.F99F99. | R99B00.T99T99. | I99B00.C99B00. | 21 | 15 | 30 | 66 | Yes | Yes | Yes |
| | | | | | Q98B00.R99R99. | L99B00.D99D99. | Y99Y99.N99B00. | | | | | | | |
| | | | | | Q99B00.V99B00. | S99S99. | R99B00.R99B00. | | | | | | | |
| | | | | | Y99Y99. | | D99B00.V98B00. | | | | | | | |
| | | | | | | | M99B00.L99B00. | | | | | | | |
| 278 | 202 | FQLSCYC | QHAFR | AETPNILVYE | F99F99.Q99B00. | Q99Q99.H99H99. | B00 | 21 | 15 | 0 | 36 | Yes | Yes | Yes |
| | | | | | L99L99.S99S99. | A99B00.F99F99. | | | | | | | | |
| | | | | | C99C99.Y99B00. | R99R99. | | | | | | | | |
| | | | | | C99C99. | | | | | | | | | |
| 75 | 198 | VCGIVSR | FMNFI | FTRFTH | V99V99.C99C99. | F99F99.M99B00. | F99B00.T99B00. | 21 | 15 | 18 | 54 | Yes | Yes | Yes |
| | | | | | G99G99.I99I99. | N99N99.F99B00. | R99B00.F99B00. | | | | | | | |
| | | | | | V99V99.S99S99. | I99I99. | T99T99.H99B00. | | | | | | | |
| | | | | | R98B00. | | | | | | | | | |
| 90 | 185 | IGLTWVC | TWNAS | FTSAVH | I96B00.G99B00. | T99B00.W99B00. | F99F99.T99T99. | 21 | 15 | 18 | 54 | Yes | Yes | Yes |
| | | | | | L99B00.T99T99. | N99N99.A99A99. | S99S99.A99B00. | | | | | | | |
| | | | | | W99B00.V98B00. | S99S99. | V99V99.H99B00. | | | | | | | |
| | | | | | C99B00. | | | | | | | | | |
| 7 | 172 | KTGRSVI | RGDDT | VYFVNDCIV | K98B00.T98B00. | R99B00.G99B00. | V83B00.Y83B00. | 21 | 15 | 27 | 63 | Yes | Yes | Yes |
| | | | | | G99B00.R99B00. | D99B00.D98B00. | F83B00.V83B00. | | | | | | | |
| | | | | | S98B00.V98B00. | T99B00. | N83B00.D83B00. | | | | | | | |
| | | | | | I97B00. | | C83B00.I83B00. | | | | | | | |
| | | | | | | | V83B00. | | | | | | | |
| 227 | 164 | AFGSNVF | PHHTV | AIYRNASVL | A99B00.F99F99. | P99P99.H99H99. | A99B00.I99I99. | 21 | 15 | 27 | 63 | Yes | Yes | Yes |
| | | | | | G99G99.S99B00. | H99H99.T99T99. | Y99Y99.R99B00. | | | | | | | |
| | | | | | N98B00.V99V99. | V99B00. | N99B00.A99A99. | | | | | | | |
| | | | | | F99B00. | | S99S99.V99B00. | | | | | | | |
| | | | | | | | L99B00. | | | | | | | |
| 82 | 12 | IRHDFLL | FGGRR | SLFGEDLSVR | I98B00.R98B00. | F99F99.G99G99. | S52B00.L53B00. | 21 | 15 | 20 | 56 | Yes | Yes | Yes |
| | | | | | H99H99.D98B00. | G99G99.R99R99. | F52B00.G52B00. | | | | | | | |
| | | | | | F99F99.L99B00. | R99R99. | E52B00.D61B00. | | | | | | | |
| | | | | | L99L99. | | L79B00.S52B00. | | | | | | | |
| | | | | | | | V52B00.R80B00. | | | | | | | |
| 163 | 156 | IGERCLF | AFSFR | LDTAALFPEF | I98B00.G99B00. | A99A99.F99F99. | L98B00.D86B00. | 21 | 15 | 30 | 66 | Yes | Yes | Yes |
| | | | | | E99E99.R99B00. | S99S99.F99F99. | T99B00.A87B00. | | | | | | | |
| | | | | | C99C99.L99L99. | R99R99. | A86B00.L86B00. | | | | | | | |
| | | | | | F99F99. | | F86B00.P99B00. | | | | | | | |
| | | | | | | | E99B00.F86B00. | | | | | | | |
| 120 | 15 | IFSGCVF | RSSQG | MCLDGCYIC | I97B00.F99B00. | R99B00.S99S99. | M99B00.C98B00. | 21 | 15 | 27 | 63 | Yes | Yes | Yes |
| | | | | | S99S99.G99G99. | S99S99.Q99B00. | L99B00.D99B00. | | | | | | | |
| | | | | | C99C99.V99B00. | G99G99. | G99B00.C98B00. | | | | | | | |
| | | | | | F99F99. | | Y98B00.I99B00. | | | | | | | |
| | | | | | | | C99B00. | | | | | | | |
| 46 | 132 | CNARQVY | RGPED | AYLGEDMSCS | C98B00.N96B00. | R99R99.G99B00. | A99A99.Y99B00. | 21 | 15 | 30 | 66 | Yes | Yes | Yes |
| | | | | | A99B00.R99B00. | P99B00.E98B00. | L99L99.G99G99. | | | | | | | |
| | | | | | Q99B00.V99B00. | D98B00. | E99E99.D99D99. | | | | | | | |
| | | | | | Y98B00. | | M99B00.S99S99. | | | | | | | |
| | | | | | | | C99C99.S99S99. | | | | | | | |
| 210 | 124 | FKLPCL | DHGGR | VFIVKYEEELLVE | F98B00.K95B00. | D99D99.H99B00. | V99V99.F99F99. | 18 | 15 | 39 | 72 | Yes | Yes | Yes |
| | | | | | L99L99.P99P99. | G99G99.G99G99. | I99I99.V99V99. | | | | | | | |
| | | | | | C99C99.L99L99. | R99B00. | K99K99.Y99Y99. | | | | | | | |
| | | | | | | | E99E99.E99E99. | | | | | | | |
| | | | | | | | E99E99.L99B00. | | | | | | | |
| | | | | | | | L99L99.V99V99. | | | | | | | |
| | | | | | | | E99E99. | | | | | | | |
| 137 | 118 | IWMGTRV | GCYGT | LTRPPFDPLW | I96B00.W99B00. | G99G99.C99B00. | L99L99.T99T99. | 21 | 15 | 30 | 66 | Yes | Yes | Yes |
| | | | | | M98B00.G99B00. | Y98B00.G99G99. | R99R99.P99P99. | | | | | | | |
| | | | | | T98B00.R99B00. | T99T99. | P99P99.F99F99. | | | | | | | |
| | | | | | V98B00. | | D99D99.P99P99. | | | | | | | |
| | | | | | | | L99L99.W99W99. | | | | | | | |
| 29 | 116 | IMIGTQS | ANEMF | ITAMGW | I97B00.M99M99. | A99A99.N99N99. | B00 | 21 | 15 | 0 | 36 | Yes | Yes | Yes |
| | | | | | I98B00.G99G99. | E99E99.M99M99. | | | | | | | | |
| | | | | | T99T99.Q99B00. | F99F99. | | | | | | | | |
| | | | | | S99S99. | | | | | | | | | |
| 54 | 11 | ALCRRVY | CAGWR | AVFASDGNVV | A99A99.L99L99. | C99C99.A99A99. | A99A99.V99V99. | 21 | 15 | 30 | 66 | Yes | Yes | Yes |
| | | | | | C99C99.R99R99. | G99G99.W99W99. | F99F99.A99A99. | | | | | | | |
| | | | | | R99R99.V99B00. | R99R99. | S99B00.D99D99. | | | | | | | |
| | | | | | Y98B00. | | G99B00.N99N99. | | | | | | | |
| | | | | | | | V99V99.V99V99. | | | | | | | |
| 71 | 108 | LCLSVLA | GSAAA | WLLTYSHDVM | L99L99.C99B00. | G99G99.S99S99. | W99W99.L99L99. | 21 | 15 | 30 | 66 | Yes | Yes | Yes |
| | | | | | L99L99.S99S99. | A99A99.A99A99. | L99L99.T99T99. | | | | | | | |
| | | | | | V99V99.L99L99. | A99A99. | Y99B00.S99S99. | | | | | | | |
| | | | | | A99A99. | | H99H99.D99D99. | | | | | | | |
| | | | | | | | V99V99.M99M99. | | | | | | | |
| 189 | 100 | TACGLLG | SVTSF | VCSCMY | T99T99.A99A99. | S99S99.V99V99. | V99B00.C99B00. | 21 | 15 | 18 | 54 | Yes | Yes | Yes |
| | | | | | C99C99.G99G99. | T99T99.S99S99. | S99S99.C99B00. | | | | | | | |
| | | | | | L99L99.L99L99. | F99B00. | M99B00.Y99B00. | | | | | | | |
| | | | | | G99G99. | | | | | | | | | |
| 62 | 99 | VLGVTIS | LSFDV | RTRFGH | V99V99.L99L99. | L98B00.S99S99. | R99R99.T99T99. | 21 | 15 | 18 | 54 | Yes | Yes | Yes |
| | | | | | G98B00.V98B00. | F99F99.D99D99. | R99R99.F99F99. | | | | | | | |
| | | | | | T97B00.I98B00. | V99V99. | G99G99.H98B00. | | | | | | | |
| | | | | | S98B00. | | | | | | | | | |
| 209 | 92 | ASFYNTM | SVSHV | KVVGVA | A99A99.S99S99. | S99S99.V99V99. | K98B00.V98B00. | 21 | 15 | 18 | 54 | Yes | Yes | Yes |
| | | | | | F99F99.Y99Y99. | S99S99.H99H99. | V98B00.G98B00. | | | | | | | |
| | | | | | N99N99.T99T99. | V99V99. | V98B00.A98B00. | | | | | | | |
| | | | | | M97B00. | | | | | | | | | |
| 213 | 90 | ATNFCVQ | TFDDY | SLSPDCLHIS | A99A99.T99T99. | T98B00.F99F99. | S92B00.L92B00. | 21 | 15 | 30 | 66 | Yes | Yes | Yes |
| | | | | | N94B00.F99F99. | D99D99.D98B00. | S92B00.P91B00. | | | | | | | |
| | | | | | C99C99.V99V99. | Y99Y99. | D93B00.C91B00. | | | | | | | |
| | | | | | Q99Q99. | | L92B00.H91B00. | | | | | | | |
| | | | | | | | I91B00.S93B00. | | | | | | | |
| 134 | 87 | FWSNAIF | SSA | IDCYGV | F99F99.W99W99. | S99S99.S99S99. | I99I99.D99D99. | 21 | 9 | 18 | 48 | Yes | Yes | Yes |
| | | | | | S99S99.N99N99. | A99A99. | C98B00.Y99Y99. | | | | | | | |
| | | | | | A99A99.I99I99. | | G98B00.V99V99. | | | | | | | |
| | | | | | F99F99. | | | | | | | | | |
| 24 | 87 | RLLRLVY | TCVGA | ILFDTNVN | R99R99.L99L99. | T99T99.C99C99. | I99I99.L99L99. | 21 | 15 | 24 | 60 | Yes | Yes | Yes |
| | | | | | L99L99.R99R99. | V99V99.G99G99. | F99F99.D99D99. | | | | | | | |
| | | | | | L99L99.V99V99. | A99A99. | T99T99.N98B00. | | | | | | | |
| | | | | | Y99Y99. | | V99V99.N99N99. | | | | | | | |
| 65 | 83 | LRSVVF | TIALD | VIYNGCYTM | L99L99.R97B00. | T98B00.I98B00. | V93B00.I90B00. | 18 | 15 | 27 | 60 | Yes | Yes | Yes |
| | | | | | S97B00.V98B00. | A98B00.L97B00. | Y90B00.N90B00. | | | | | | | |
| | | | | | V98B00.F98B00. | D98B00. | G90B00.C90B00. | | | | | | | |
| | | | | | | | Y90B00.T95B00. | | | | | | | |
| | | | | | | | M90B00. | | | | | | | |
| 180 | 82 | MKCIHAG | LDSSW | FVGCHYSNYYDFA | M98B00.K96B00. | L98B00.D99D99. | F98B00.V98B00. | 21 | 15 | 39 | 75 | Yes | Yes | Yes |
| | | | | | C99C99.I99I99. | S99S99.S99S99. | G98B00.C98B00. | | | | | | | |
| | | | | | H99H99.A99A99. | W99W99. | H98B00.Y98B00. | | | | | | | |
| | | | | | G99G99. | | S98B00.N98B00. | | | | | | | |
| | | | | | | | Y98B00.Y98B00. | | | | | | | |
| | | | | | | | D98B00.F97B00. | | | | | | | |
| | | | | | | | A98B00. | | | | | | | |
| 378 | 82 | WVTFMVF | QVTGH | CQNVAKSAWYAVG | W99W99.V99V99. | Q99Q99.V99V99. | B00 | 21 | 15 | 0 | 36 | Yes | Yes | Yes |
| | | | | | T97B00.F99F99. | T99T99.G99G99. | | | | | | | | |
| | | | | | M99M99.V99V99. | H99H99. | | | | | | | | |
| | | | | | F99F99. | | | | | | | | | |
| 240 | 78 | RSVG | RCVSD | WLLTPGCIR | R99R99.S99S99. | R99R99.C99C99. | W70B00.L70B00. | 12 | 15 | 18 | 45 | Yes | Yes | Yes |
| | | | | | V99V99.G99G99. | V99V99.S99S99. | L70B00.T70B00. | | | | | | | |
| | | | | | | D99D99. | P69B00.G70B00. | | | | | | | |
| | | | | | | | C70B00.I70B00. | | | | | | | |
| | | | | | | | R70B00. | | | | | | | |
| 214 | 77 | RARNIVY | LGEGL | HRFDTTLMCVVRA | R99R99.A98B00. | L99L99.G99G99. | H99H99.R99R99. | 21 | 15 | 39 | 75 | Yes | Yes | Yes |
| | | | | | R98B00.N98B00. | E99E99.G99G99. | F99F99.D99D99. | | | | | | | |
| | | | | | I99I99.V99V99. | L99L99. | T99T99.T99T99. | | | | | | | |
| | | | | | Y99Y99. | | L99L99.M99M99. | | | | | | | |
| | | | | | | | C99C99.V99V99. | | | | | | | |
| | | | | | | | V99V99.R99R99. | | | | | | | |
| | | | | | | | A99A99. | | | | | | | |
| 397 | 77 | FPCSYVF | CVTGI | TNNTLR | F98B00.P98B00. | C99C99.V99V99. | T99T99.N99N99. | 21 | 15 | 18 | 54 | Yes | Yes | Yes |
| | | | | | C98B00.S98B00. | T99T99.G99G99. | N99N99.T99T99. | | | | | | | |
| | | | | | Y98B00.V98B00. | I99I99. | L99L99.R99R99. | | | | | | | |
| | | | | | F98B00. | | | | | | | | | |
| 133 | 75 | SRCALVV | SVTCS | INNELN | S99S99.R99R99. | S99S99.V99V99. | I97B00.N97B00. | 21 | 15 | 18 | 54 | Yes | Yes | Yes |
| | | | | | C99C99.A99A99. | T99T99.C99C99. | N97B00.E97B00. | | | | | | | |
| | | | | | L99L99.V99V99. | S99S99. | L97B00.N97B00. | | | | | | | |
| | | | | | V99V99. | | | | | | | | | |
| 39 | 75 | YVMMWCE | PRNFD | LVCPGS | Y99Y99.V99V99. | P99P99.R98B00. | L99L99.V99V99. | 21 | 15 | 18 | 54 | Yes | Yes | Yes |
| | | | | | M98B00.M99M99. | N99N99.F99F99. | C99C99.P99P99. | | | | | | | |
| | | | | | W99W99.C99C99. | D99D99. | G99G99.S99S99. | | | | | | | |
| | | | | | E98B00. | | | | | | | | | |
| 501 | 73 | VYVGSAT | AYLGY | QCSVIL | V99V99.Y95B00. | A99A99.Y99Y99. | Q98B00.C98B00. | 21 | 15 | 18 | 54 | Yes | Yes | Yes |
| | | | | | V97B00.G99G99. | L99L99.G99G99. | S99S99.V99V99. | | | | | | | |
| | | | | | S99S99.A99A99. | Y99Y99. | I99I99.L99L99. | | | | | | | |
| | | | | | T98B00. | | | | | | | | | |
| 78 | 71 | IANKIVF | QSTGV | VRFRTHGAVT | I98B00.A99A99. | Q99Q99.S98B00. | V98B00.R98B00. | 21 | 15 | 30 | 66 | Yes | Yes | Yes |
| | | | | | N97B00.K99K99. | T99T99.G99G99. | F98B00.R98B00. | | | | | | | |
| | | | | | I99I99.V99V99. | V99V99. | T98B00.H98B00. | | | | | | | |
| | | | | | F99F99. | | G98B00.A98B00. | | | | | | | |
| | | | | | | | V98B00.T98B00. | | | | | | | |
| 116 | 70 | FLFRVVH | ISSGG | HFFTADLSVV | F99F99.L99L99. | I99I99.S99S99. | H99H99.F99F99. | 21 | 15 | 30 | 66 | Yes | Yes | Yes |
| | | | | | F99F99.R99R99. | S99S99.G99G99. | F98B00.T99T99. | | | | | | | |
| | | | | | V99V99.V99V99. | G99G99. | A99A99.D99D99. | | | | | | | |
| | | | | | H99H99. | | L99L99.S99S99. | | | | | | | |
| | | | | | | | V99V99.V99V99. | | | | | | | |
| 95 | 68 | SVYGPSN | IAAQV | RTVTPNYMID | S95B00.V99V99. | I99I99.A99A99. | R97B00.T97B00. | 21 | 15 | 30 | 66 | Yes | Yes | Yes |
| | | | | | Y99Y99.G99G99. | A99A99.Q99Q99. | V97B00.T97B00. | | | | | | | |
| | | | | | P98B00.S99S99. | V99V99. | P97B00.N97B00. | | | | | | | |
| | | | | | N98B00. | | Y97B00.M97B00. | | | | | | | |
| | | | | | | | I97B00.D97B00. | | | | | | | |
| 228 | 65 | HFVRIMA | NRHSC | YLLDAHSTCN | H98B00.F98B00. | N99N99.R99R99. | Y99Y99.L99L99. | 21 | 15 | 30 | 66 | Yes | Yes | Yes |
| | | | | | V99V99.R98B00. | H99H99.S99S99. | L99L99.D99D99. | | | | | | | |
| | | | | | I98B00.M98B00. | C98B00. | A99A99.H99H99. | | | | | | | |
| | | | | | A96B00. | | S99S99.T99T99. | | | | | | | |
| | | | | | | | C99C99.N99N99. | | | | | | | |
| 148 | 64 | GLYVSIV | NTRQW | NPHLHPHLS | G98B00.L99L99. | N99N99.T99T99. | N98B00.P99P99. | 21 | 15 | 27 | 63 | Yes | Yes | Yes |
| | | | | | Y99Y99.V99V99. | R99R99.Q99Q99. | H98B00.L99L99. | | | | | | | |
| | | | | | S99S99.I98B00. | W99W99. | H98B00.P98B00. | | | | | | | |
| | | | | | V99V99. | | H98B00.L98B00. | | | | | | | |
| | | | | | | | S98B00. | | | | | | | |
| 60 | 64 | LVLSYFT | AQDRG | LYNLFE | L99L99.V99V99. | A99A99.Q99Q99. | L96B00.Y98B00. | 21 | 15 | 18 | 54 | Yes | Yes | Yes |
| | | | | | L99L99.S99S99. | D99D99.R99R99. | N98B00.L98B00. | | | | | | | |
| | | | | | Y99Y99.F99F99. | G99G99. | F98B00.E98B00. | | | | | | | |
| | | | | | T99T99. | | | | | | | | | |
| 315 | 63 | GLYWQND | RYPCY | IPCRWFWIE | G99G99.L99L99. | R99R99.Y98B00. | I99I99.P99P99. | 21 | 15 | 27 | 63 | Yes | Yes | Yes |
| | | | | | Y99Y99.W99W99. | P99P99.C99C99. | C99C99.R99R99. | | | | | | | |
| | | | | | Q99Q99.N99N99. | Y99Y99. | W99W99.F99F99. | | | | | | | |
| | | | | | D99D99. | | W99W99.I99I99. | | | | | | | |
| | | | | | | | E99E99. | | | | | | | |
| 14 | 62 | LLAVPVD | WCGLS | IRRASFTFYW | L98B00.L96B00. | W98B00.C98B00. | I99I99.R99R99. | 21 | 15 | 30 | 66 | Yes | Yes | Yes |
| | | | | | A98B00.V98B00. | G98B00.L98B00. | R99R99.A99A99. | | | | | | | |
| | | | | | P96B00.V99V99. | S98B00. | S99S99.F99F99. | | | | | | | |
| | | | | | D96B00. | | T99T99.F95B00. | | | | | | | |
| | | | | | | | Y95B00.W95B00. | | | | | | | |
| 259 | 62 | ACCDAH | ATPSA | IQWHARGRY | A99A99.C99C99. | A99A99.T99T99. | I98B00.Q98B00. | 18 | 15 | 27 | 60 | Yes | Yes | Yes |
| | | | | | C98B00.D96B00. | P99P99.S99S99. | W98B00.H98B00. | | | | | | | |
| | | | | | A99A99.H98B00. | A99A99. | A98B00.R98B00. | | | | | | | |
| | | | | | | | G98B00.R98B00. | | | | | | | |
| | | | | | | | Y98B00. | | | | | | | |
| 290 | 62 | TGFCHYW | ASSSR | ADMYFF | T98B00.G98B00. | A99A99.S99S99. | A99A99.D98B00. | 21 | 15 | 18 | 54 | Yes | Yes | Yes |
| | | | | | F96B00.C98B00. | S99S99.S99S99. | M99M99.Y99Y99. | | | | | | | |
| | | | | | H98B00.Y98B00. | R99R99. | F99F99.F99F99. | | | | | | | |
| | | | | | W98B00. | | | | | | | | | |
| 474 | 62 | HSAHASQ | RSAAN | PWALDPAFRA | H98B00.S98B00. | R99R99.S99S99. | P99P99.W99W99. | 21 | 15 | 30 | 66 | Yes | Yes | Yes |
| | | | | | A98B00.H98B00. | A98B00.A99A99. | A99A99.L99L99. | | | | | | | |
| | | | | | A98B00.S98B00. | N99N99. | D99D99.P99P99. | | | | | | | |
| | | | | | Q96B00. | | A99A99.F99F99. | | | | | | | |
| | | | | | | | R98B00.A98B00. | | | | | | | |
| 485 | 60 | VLLRRVF | CNNHS | HTLSNKFFVN | V99V99.L99L99. | C99C99.N98B00. | H96B00.T98B00. | 21 | 15 | 23 | 59 | Yes | Yes | Yes |
| | | | | | L99L99.R99R99. | N99N99.H98B00. | L98B00.S98B00. | | | | | | | |
| | | | | | R99R99.V99V99. | S99S99. | N51D46.K51N46. | | | | | | | |
| | | | | | F99F99. | | F51Y46.F50S46. | | | | | | | |
| | | | | | | | V51I46.N51I46. | | | | | | | |
| 52 | 60 | VTRGLLN | ASMLT | NIFSDTESVR | V99V99.T99T99. | A99A99.S99S99. | N99N99.I99I99. | 21 | 15 | 30 | 66 | Yes | Yes | Yes |
| | | | | | R99R99.G99G99. | M99M99.L98B00. | F99F99.S99S99. | | | | | | | |
| | | | | | L99L99.L99L99. | T99T99. | D99D99.T99T99. | | | | | | | |
| | | | | | N98B00. | | E99E99.S99S99. | | | | | | | |
| | | | | | | | V99V99.R99R99. | | | | | | | |
| 147 | 57 | GVAQVVF | VDAMN | FRLQSPGLVT | G98B00.V98B00. | V99V99.D99D99. | F99F99.R99R99. | 21 | 15 | 30 | 66 | Yes | Yes | Yes |
| | | | | | A98B00.Q98B00. | A99A99.M99M99. | L99L99.Q99Q99. | | | | | | | |
| | | | | | V99V99.V98B00. | N99N99. | S99S99.P99P99. | | | | | | | |
| | | | | | F98B00. | | G98B00.L99L99. | | | | | | | |
| | | | | | | | V99V99.T99T99. | | | | | | | |
| 30 | 57 | TFCMFVC | SYSEG | WISCTQ | T98B00.F99F99. | S99S99.Y99Y99. | W99W99.I99I99. | 21 | 15 | 18 | 54 | Yes | Yes | Yes |
| | | | | | C99C99.M99M99. | S99S99.E99E99. | S99S99.C99C99. | | | | | | | |
| | | | | | F99F99.V99V99. | G99G99. | T98B00.Q98B00. | | | | | | | |
| | | | | | C99C99. | | | | | | | | | |
| 170 | 56 | LRCDSAS | LGG | HTINRYAPWLGCA | L99L99.R99R99. | L99L99.G99G99. | H99H99.T99T99. | 21 | 9 | 39 | 69 | Yes | Yes | Yes |
| | | | | | C99C99.D99D99. | G99G99. | I99I99.N99N99. | | | | | | | |
| | | | | | S99S99.A99A99. | | R99R99.Y99Y99. | | | | | | | |
| | | | | | S99S99. | | A99A99.P99P99. | | | | | | | |
| | | | | | | | W99W99.L99L99. | | | | | | | |
| | | | | | | | G99G99.C99C99. | | | | | | | |
| | | | | | | | A99A99. | | | | | | | |
| 273 | 56 | TLRSCVN | SGSVH | MCLTLTWSIA | T98B00.L98B00. | S98B00.G98B00. | M57H42.C57R42. | 21 | 15 | 20 | 56 | Yes | Yes | Yes |
| | | | | | R98B00.S98B00. | S98B00.V98B00. | L57F42.T57V42. | | | | | | | |
| | | | | | C98B00.V98B00. | H98B00. | L57C42.T57G42. | | | | | | | |
| | | | | | N98B00. | | W57S42.S57V42. | | | | | | | |
| | | | | | | | I57R42.A57B42. | | | | | | | |
| 286 | 56 | R | PHNLG | MNHAYPIFGLADD | R99R99. | P99P99.H99H99. | M99M99.N99N99. | 3 | 15 | 39 | 57 | Yes | Yes | Yes |
| | | | | | | N99N99.L99L99. | H99H99.A99A99. | | | | | | | |
| | | | | | | G98B00. | Y99Y99.P99P99. | | | | | | | |
| | | | | | | | I99I99.F99F99. | | | | | | | |
| | | | | | | | G99G99.L99L99. | | | | | | | |
| | | | | | | | A99A99.D99D99. | | | | | | | |
| | | | | | | | D99D99. | | | | | | | |
| 19 | 55 | VIFRESF | PGAYR | FDPTSGTLAV | V99V99.I99I99. | P99P99.G98B00. | B00 | 21 | 15 | 0 | 36 | Yes | Yes | Yes |
| | | | | | F99F99.R99R99. | A99A99.Y99Y99. | | | | | | | | |
| | | | | | E99E99.S99S99. | R98B00. | | | | | | | | |
| | | | | | F99F99. | | | | | | | | | |
| 42 | 55 | RCGSVVF | ISGEF | CYYVNHGCCV | R99R99.C99C99. | I99I99.S99S99. | C99C99.Y99Y99. | 21 | 15 | 30 | 66 | Yes | Yes | Yes |
| | | | | | G99G99.S98B00. | G99G99.E98B00. | Y99Y99.V99V99. | | | | | | | |
| | | | | | V99V99.V99V99. | F99F99. | N99N99.H99H99. | | | | | | | |
| | | | | | F99F99. | | G99G99.C99C99. | | | | | | | |
| | | | | | | | C99C99.V99V99. | | | | | | | |
| 165 | 54 | GILLRTC | FRLAL | TPWPAFIGLV | G99G99.I99I99. | F99F99.R99R99. | T99T99.P99P99. | 21 | 15 | 30 | 66 | Yes | Yes | Yes |
| | | | | | L99L99.L99L99. | L99L99.A99A99. | W98B00.P99P99. | | | | | | | |
| | | | | | R99R99.T99T99. | L99L99. | A99A99.F99F99. | | | | | | | |
| | | | | | C99C99. | | I99I99.G99G99. | | | | | | | |
| | | | | | | | L99L99.V99V99. | | | | | | | |
| 87 | 54 | SLRLVVY | RCGGL | SNLTSNSTGNEVT | S94B00.L99L99. | R99R99.C99C99. | B00 | 21 | 15 | 0 | 36 | Yes | Yes | Yes |
| | | | | | R99R99.L99L99. | G99G99.G98B00. | | | | | | | | |
| | | | | | V99V99.V99V99. | L99L99. | | | | | | | | |
| | | | | | Y99Y99. | | | | | | | | | |
| 211 | 54 | FVIPRYA | YMLRC | IDPTPAVVNL | F99F99.V98B00. | Y98B00.M99M99. | I99I99.D98B00. | 21 | 15 | 30 | 66 | Yes | Yes | Yes |
| | | | | | I96B00.P99P99. | L99L99.R98B00. | P99P99.T99T99. | | | | | | | |
| | | | | | R98B00.Y98B00. | C99C99. | P99P99.A99A99. | | | | | | | |
| | | | | | A99A99. | | V98B00.V99V99. | | | | | | | |
| | | | | | | | N99N99.L99L99. | | | | | | | |
| 266 | 54 | PVFRCVY | NDIND | ISLQTNGSLQ | P99P99.V99V99. | N99N99.D99D99. | I51A48.S51A46. | 21 | 15 | 22 | 58 | Yes | Yes | Yes |
| | | | | | F99F99.R99R99. | I99I99.N99N99. | L51Y46.Q51L46. | | | | | | | |
| | | | | | C99C99.V99V99. | D99D99. | T98B00.N51P46. | | | | | | | |
| | | | | | Y99Y99. | | G53F46.S98B00. | | | | | | | |
| | | | | | | | L51V48.Q51C46. | | | | | | | |
| 388 | 54 | VCRGVVA | DCHSD | FCLDTRSAATVC | V99V99.C99C99. | D99D99.C99C99. | B00 | 21 | 15 | 0 | 36 | Yes | Yes | Yes |
| | | | | | R99R99.G99G99. | H98B00.S99S99. | | | | | | | | |
| | | | | | V96B00.V98B00. | D99D99. | | | | | | | | |
| | | | | | A99A99. | | | | | | | | | |
| 256 | 53 | WGYRMRV | HPSCV | VYLVGNTMV | W99W99.G99G99. | H99H99.P99P99. | V99V99.Y99Y99. | 21 | 15 | 27 | 63 | Yes | Yes | Yes |
| | | | | | Y99Y99.R99R99. | S99S99.C99C99. | L99L99.V99V99. | | | | | | | |
| | | | | | M99M99.R99R99. | V99V99. | G99G99.N99N99. | | | | | | | |
| | | | | | V99V99. | | T99T99.M98B00. | | | | | | | |
| | | | | | | | V99V99. | | | | | | | |
| 91 | 53 | RLRHVVF | TTACG | ALYHPMHSVL | R99R99.L98B00. | T99T99.T99T99. | A94B00.L92B00. | 21 | 15 | 30 | 66 | Yes | Yes | Yes |
| | | | | | R98B00.H99H99. | A99A99.C99C99. | Y96B00.H94B00. | | | | | | | |
| | | | | | V99V99.V99V99. | G99G99. | P94B00.M94B00. | | | | | | | |
| | | | | | F99F99. | | H94B00.S94B00. | | | | | | | |
| | | | | | | | V94B00.L96B00. | | | | | | | |
| 93 | 52 | VLGILST | SFD | ATRWSS | V99V99.L99L99. | S98B00.F99F99. | A99A99.T99T99. | 21 | 0 | 18 | 48 | Yes | Yes | Yes |
| | | | | | G99G99.I99I99. | D99D99. | R99R99.W99W99. | | | | | | | |
| | | | | | L99L99.S99S99. | | S99S99.S99S99. | | | | | | | |
| | | | | | T99T99. | | | | | | | | | |
| 141 | 51 | DFANIHG | MYGEY | HIITSSFSGIESR | D98B00.F98B00. | M98B00.Y98B00. | H99H99.I99I99. | 21 | 15 | 39 | 75 | Yes | Yes | Yes |
| | | | | | A98B00.N98B00. | G98B00.E98B00. | I99I99.T99T99. | | | | | | | |
| | | | | | I98B00.H98B00. | Y98B00. | S99S99.S99S99. | | | | | | | |
| | | | | | G96B00. | | F98B00.S99S99. | | | | | | | |
| | | | | | | | G99G99.I99I99. | | | | | | | |
| | | | | | | | E99E99.S99S99. | | | | | | | |
| | | | | | | | R99R99. | | | | | | | |
| 292 | 50 | LDRAVL | DCGHQ | YRLTHDKVVS | L99L99.D98B00. | D99D99.C99C99. | Y99Y99.R99R99. | 18 | 15 | 30 | 63 | Yes | Yes | Yes |
| | | | | | R98B00.A98B00. | G99G99.H98B00. | L99L99.T99T99. | | | | | | | |
| | | | | | V99V99.L98B00. | Q99Q99. | H99H99.D98B00. | | | | | | | |
| | | | | | | | K99K99.V99V99. | | | | | | | |
| | | | | | | | V99V99.S99S99. | | | | | | | |
| 175 | 49 | ARDRLLG | ISFRL | WTEYSS | A99A99.R99R99. | I97B00.S99S99. | W99W99.T99T99. | 21 | 15 | 18 | 54 | Yes | Yes | Yes |
| | | | | | D99D99.R99R99. | F99F99.R99R99. | E99E99.Y99Y99. | | | | | | | |
| | | | | | L99L99.L99L99. | L99L99. | S99S99.S97B00. | | | | | | | |
| | | | | | G99G99. | | | | | | | | | |
| 202 | 49 | MPAFGGR | TCNCW | FNLPTFYSFA | M97B00.P97B00. | T99T99.C99C99. | F99F99.N99N99. | 21 | 15 | 30 | 66 | Yes | Yes | Yes |
| | | | | | A95B00.F97B00. | N99N99.C99C99. | L99L99.P99P99. | | | | | | | |
| | | | | | G99G99.G97B00. | W99W99. | T99T99.F99F99. | | | | | | | |
| | | | | | R97B00. | | Y99Y99.S99S99. | | | | | | | |
| | | | | | | | F99F99.A99A99. | | | | | | | |
| 277 | 49 | HSQHVFY | AYDAN | GIFEMFGCR | H99H99.S99S99. | A99A99.Y99Y99. | G99G99.I99I99. | 21 | 15 | 27 | 63 | Yes | Yes | Yes |
| | | | | | Q99Q99.H97B00. | D99D99.A99A99. | F99F99.E99E99. | | | | | | | |
| | | | | | V99V99.F99F99. | N99N99. | M97B00.F99F99. | | | | | | | |
| | | | | | Y99Y99. | | G99G99.C99C99. | | | | | | | |
| | | | | | | | R99R99. | | | | | | | |
| 56 | 49 | LGSGLLF | GCFNL | SALSSENDVR | L99L99.G99G99. | G99G99.C99C99. | S99S99.A99A99. | 21 | 15 | 30 | 66 | Yes | Yes | Yes |
| | | | | | S99S99.G99G99. | F99F99.N99N99. | L97B00.S99S99. | | | | | | | |
| | | | | | L99L99.L99L99. | L99L99. | S97B00.E99E99. | | | | | | | |
| | | | | | F99F99. | | N99N99.D99D99. | | | | | | | |
| | | | | | | | V99V99.R99R99. | | | | | | | |
| 118 | 48 | HTTRRIY | VDARC | VYFAGEGPV | H99H99.T99T99. | V99V99.D99D99. | V99V99.Y97B00. | 21 | 15 | 27 | 63 | Yes | Yes | Yes |
| | | | | | T97B00.R99R99. | A99A99.R99R99. | F99F99.A99A99. | | | | | | | |
| | | | | | R99R99.I99I99. | C99C99. | G99G99.E99E99. | | | | | | | |
| | | | | | Y99Y99. | | G99G99.P99P99. | | | | | | | |
| | | | | | | | V99V99. | | | | | | | |
| 293 | 48 | VFGIVRS | ITNSH | ISRFTT | V99V99.F99F99. | I99I99.T97B00. | I97B00.S99S99. | 21 | 15 | 18 | 54 | Yes | Yes | Yes |
| | | | | | G99G99.I99I99. | N99N99.S99S99. | R97B00.F97B00. | | | | | | | |
| | | | | | V99V99.R99R99. | H99H99. | T97B00.T97B00. | | | | | | | |
| | | | | | S99S99. | | | | | | | | | |
| 340 | 48 | HLDALVY | SNMHT | RTAFHDHWN | H99H99.L97B00. | S99S99.N99N99. | R99R99.T99T99. | 21 | 15 | 27 | 63 | Yes | Yes | Yes |
| | | | | | D99D99.A99A99. | M97B00.H99H99. | A99A99.F99F99. | | | | | | | |
| | | | | | L97B00.V99V99. | T99T99. | H99H99.D99D99. | | | | | | | |
| | | | | | Y99Y99. | | H99H99.W99W99. | | | | | | | |
| | | | | | | | N99N99. | | | | | | | |
| 371 | 48 | QAIVVSW | FGKHG | LIFDIHGYGF | Q99Q99.A99A99. | F99F99.G99G99. | L99L99.I99I99. | 21 | 15 | 30 | 66 | Yes | Yes | Yes |
| | | | | | I97B00.V99V99. | K99K99.H99H99. | F99F99.D99D99. | | | | | | | |
| | | | | | V99V99.S97B00. | G99G99. | I99I99.H99H99. | | | | | | | |
| | | | | | W99W99. | | G99G99.Y97B00. | | | | | | | |
| | | | | | | | G99G99.F99F99. | | | | | | | |
| 157 | 47 | SFRGLRW | VRLSC | HPIVCDLWV | S97B00.F99F99. | V99V99.R99R99. | H99H99.P99P99. | 21 | 15 | 27 | 63 | Yes | Yes | Yes |
| | | | | | R95B00.G99G99. | L99L99.S99S99. | I99I99.V99V99. | | | | | | | |
| | | | | | L99L99.R99R99. | C99C99. | C99C99.D99D99. | | | | | | | |
| | | | | | W99W99. | | L99L99.W99W99. | | | | | | | |
| | | | | | | | V99V99. | | | | | | | |
| 534 | 47 | RLVNVVY | AGNSW | CVFDTADVR | R99R99.L99L99. | A99A99.G99G99. | C91B00.V87B00. | 21 | 15 | 27 | 63 | Yes | Yes | Yes |
| | | | | | V99V99.N99N99. | N99N99.S99S99. | F91B00.D91B00. | | | | | | | |
| | | | | | V99V99.V99V99. | W99W99. | T93B00.A91B00. | | | | | | | |
| | | | | | Y97B00. | | D93B00.V95B00. | | | | | | | |
| | | | | | | | R91B00. | | | | | | | |
| 12 | 46 | DPRGLVY | CSTSC | AYCRQLLVT | D99D99.P99P99. | C99C99.S99S99. | A99A99.Y99Y99. | 21 | 15 | 27 | 63 | Yes | Yes | Yes |
| | | | | | R99R99.G99G99. | T99T99.S99S99. | C99C99.R99R99. | | | | | | | |
| | | | | | L99L99.V99V99. | C99C99. | Q99Q99.L99L99. | | | | | | | |
| | | | | | Y95B00. | | L99L99.V97B00. | | | | | | | |
| | | | | | | | T99T99. | | | | | | | |
| 270 | 46 | NSIVCCA | FRGTV | AHPSAD | N97B00.S99S99. | F99F99.R99R99. | A99A99.H99H99. | 21 | 15 | 18 | 54 | Yes | Yes | Yes |
| | | | | | I99I99.V99V99. | G99G99.T99T99. | P99P99.S99S99. | | | | | | | |
| | | | | | C99C99.C99C99. | V99V99. | A99A99.D99D99. | | | | | | | |
| | | | | | A99A99. | | | | | | | | | |
| 314 | 46 | HYPDARW | LATVV | THYSPYFSRC | H99H99.Y99Y99. | L99L99.A97B00. | T99T99.H99H99. | 21 | 15 | 30 | 66 | Yes | Yes | Yes |
| | | | | | P99P99.D97B00. | T99T99.V97B00. | Y99Y99.S99S99. | | | | | | | |
| | | | | | A99A99.R99R99. | V99V99. | P99P99.Y99Y99. | | | | | | | |
| | | | | | W99W99. | | F99F99.S99S99. | | | | | | | |
| | | | | | | | R97B00.C99C99. | | | | | | | |
| 64 | 46 | SCWQWHR | RSFSD | FCVGYH | S99S99.C99C99. | R99R99.S99S99. | F99F99.C99C99. | 21 | 15 | 18 | 54 | Yes | Yes | Yes |
| | | | | | W99W99.Q99Q99. | F99F99.S99S99. | V99V99.G99G99. | | | | | | | |
| | | | | | W99W99.H97B00. | D99D99. | Y99Y99.H99H99. | | | | | | | |
| | | | | | R99R99. | | | | | | | | | |
| 200 | 45 | NPVDIQC | HRLMA | ESTSYF | N99N99.P97B00. | H99H99.R99R99. | B00 | 21 | 15 | 0 | 36 | Yes | Yes | Yes |
| | | | | | V99V99.D99D99. | L99L99.M99M99. | | | | | | | | |
| | | | | | I99I99.Q97B00. | A99A99. | | | | | | | | |
| | | | | | C99C99. | | | | | | | | | |
| 3 | 45 | VRGLVLN | RSG | PIHFLNRTV | V99V99.R99R99. | R99R99.S99S99. | P99P99.I99I99. | 21 | 9 | 27 | 57 | Yes | Yes | Yes |
| | | | | | G99G99.L99L99. | G99G99. | H99H99.F99F99. | | | | | | | |
| | | | | | V99V99.L99L99. | | L99L99.N99N99. | | | | | | | |
| | | | | | N97B00. | | R99R99.T99T99. | | | | | | | |
| | | | | | | | V99V99. | | | | | | | |
| 382 | 45 | ITHSLVY | NNGKW | VFLSGDSVCH | I97B00.T99T99. | N99N99.N99N99. | V99V99.F88B00. | 21 | 15 | 30 | 66 | Yes | Yes | Yes |
| | | | | | H99H99.S99S99. | G99G99.K99K99. | L88B00.S99S99. | | | | | | | |
| | | | | | L99L99.V99V99. | W99W99. | G88B00.D88B00. | | | | | | | |
| | | | | | Y99Y99. | | S88B00.V88B00. | | | | | | | |
| | | | | | | | C88B00.H88B00. | | | | | | | |
| 408 | 45 | MGTSLSG | CGALL | YNLSTV | M97B00.G99G99. | C99C99.G99G99. | B00 | 21 | 15 | 0 | 36 | Yes | Yes | Yes |
| | | | | | T97B00.S99S99. | A99A99.L99L99. | | | | | | | | |
| | | | | | L99L99.S99S99. | L99L99. | | | | | | | | |
| | | | | | G99G99. | | | | | | | | | |
| 108 | 44 | VNCLVW | FWDGR | GPDFVV | V99V99.N97B00. | F99F99.W99W99. | G88B00.P88B00. | 18 | 15 | 18 | 51 | Yes | Yes | Yes |
| | | | | | C99C99.L99L99. | D99D99.G99G99. | D88B00.F88B00. | | | | | | | |
| | | | | | V99V99.W99W99. | R99R99. | V88B00.V99V99. | | | | | | | |
| 276 | 44 | APCVLLS | RGVHH | HEGACRRLLDQSA | A99A99.P99P99. | R99R99.G99G99. | H99H99.E99E99. | 21 | 15 | 39 | 75 | Yes | Yes | Yes |
| | | | | | C99C99.V99V99. | V99V99.H99H99. | G99G99.A99A99. | | | | | | | |
| | | | | | L99L99.L99L99. | H99H99. | C99C99.R99R99. | | | | | | | |
| | | | | | S99S99. | | R99R99.L99L99. | | | | | | | |
| | | | | | | | L99L99.D99D99. | | | | | | | |
| | | | | | | | Q99Q99.S99S99. | | | | | | | |
| | | | | | | | A99A99. | | | | | | | |
| 424 | 44 | AMTGVYM | PGTGF | AHLISK | A99A99.M99M99. | P99P99.G99G99. | A99A99.H99H99. | 21 | 15 | 18 | 54 | Yes | Yes | Yes |
| | | | | | T97B00.G99G99. | T99T99.G99G99. | L99L99.I97B00. | | | | | | | |
| | | | | | V99V99.Y99Y99. | F99F99. | S99S99.K99K99. | | | | | | | |
| | | | | | M99M99. | | | | | | | | | |
| 142 | 43 | LHHRVVF | PACSD | AVCLDHLVIH | L99L99.H93B00. | P99P99.A99A99. | A99A99.V93B00. | 21 | 15 | 30 | 66 | Yes | Yes | Yes |
| | | | | | H99H99.R99R99. | C99C99.S99S99. | C93B00.L93B00. | | | | | | | |
| | | | | | V99V99.V99V99. | D99D99. | D93B00.H93B00. | | | | | | | |
| | | | | | F99F99. | | L93B00.V93B00. | | | | | | | |
| | | | | | | | I93B00.H93B00. | | | | | | | |
| 425 | 43 | EMSRIVY | SGACL | IKIQGEELA | E99E99.M99M99. | S99S99.G97B00. | I99I99.K99K99. | 21 | 15 | 27 | 63 | Yes | Yes | Yes |
| | | | | | S97B00.R99R99. | A99A99.C99C99. | I99I99.Q99Q99. | | | | | | | |
| | | | | | I99I99.V99V99. | L99L99. | G99G99.E97B00. | | | | | | | |
| | | | | | Y99Y99. | | E99E99.L99L99. | | | | | | | |
| | | | | | | | A99A99. | | | | | | | |
| 237 | 42 | R | PHNLG | IHYGAK | R99R99. | P99P99.H99H99. | I99I99.H99H99. | 3 | 15 | 18 | 36 | Yes | Yes | Yes |
| | | | | | | N99N99.L99L99. | Y99Y99.G99G99. | | | | | | | |
| | | | | | | G99G99. | A99A99.K99K99. | | | | | | | |
| 375 | 42 | RLPCVVF | SGSIV | HTFLST | R99R99.L99L99. | S99S99.G99G99. | H99H99.T99T99. | 21 | 15 | 18 | 54 | Yes | Yes | Yes |
| | | | | | P99P99.C99C99. | S99S99.I99I99. | F99F99.L99L99. | | | | | | | |
| | | | | | V99V99.V99V99. | V99V99. | S99S99.T99T99. | | | | | | | |
| | | | | | F99F99. | | | | | | | | | |
| 155 | 41 | RHFHIVA | GWQGI | YIFNQSNCCF | R99R99.H99H99. | G99G99.W99W99. | Y99Y99.I97B00. | 21 | 15 | 30 | 66 | Yes | Yes | Yes |
| | | | | | F99F99.H99H99. | Q99Q99.G99G99. | F97B00.N97B00. | | | | | | | |
| | | | | | I97B00.V99V99. | I99I99. | Q97B00.S97B00. | | | | | | | |
| | | | | | A99A99. | | N97B00.C97B00. | | | | | | | |
| | | | | | | | C97B00.F97B00. | | | | | | | |
| 81 | 41 | RNSGCVF | ACDSI | SYFGLRVVS | R97B00.N97B00. | A99A99.C99C99. | S87B00.Y95B00. | 21 | 15 | 27 | 63 | Yes | Yes | Yes |
| | | | | | S99S99.G99G99. | D99D99.S99S99. | F95B00.G87B00. | | | | | | | |
| | | | | | C99C99.V99V99. | I99I99. | L92B00.R87B00. | | | | | | | |
| | | | | | F99F99. | | V87B00.V87B00. | | | | | | | |
| | | | | | | | S87B00. | | | | | | | |
| 177 | 40 | GNFDVFS | TFSRG | LCCPVCVIV | G97B00.N99N99. | T99T99.F99F99. | L99L99.C99C99. | 21 | 15 | 27 | 63 | Yes | Yes | Yes |
| | | | | | F99F99.D99D99. | S99S99.R99R99. | C99C99.P99P99. | | | | | | | |
| | | | | | V99V99.F99F99. | G99G99. | V99V99.C99C99. | | | | | | | |
| | | | | | S99S99. | | V99V99.I99I99. | | | | | | | |
| | | | | | | | V99V99. | | | | | | | |
| 242 | 40 | NSNVVYA | TFLGN | IIPYASRLHY | N95B00.S97B00. | T99T99.F99F99. | I90B00.I90B00. | 21 | 15 | 30 | 66 | Yes | Yes | Yes |
| | | | | | N99N99.V99V99. | L99L99.G99G99. | P99P99.Y90B00. | | | | | | | |
| | | | | | V99V99.Y99Y99. | N99N99. | A90B00.S90B00. | | | | | | | |
| | | | | | A99A99. | | R90B00.L90B00. | | | | | | | |
| | | | | | | | H90B00.Y90B00. | | | | | | | |
| 131 | 39 | DKCAYIM | GVTIN | LTNECL | D97B00.K97B00. | G99G99.V99V99. | L99L99.T99T99. | 21 | 15 | 18 | 54 | Yes | Yes | Yes |
| | | | | | C99C99.A99A99. | T99T99.I99I99. | N99N99.E99E99. | | | | | | | |
| | | | | | Y99Y99.I97B00. | N99N99. | C99C99.L99L99. | | | | | | | |
| | | | | | M97B00. | | | | | | | | | |
| 317 | 39 | AGCFVSN | FRSLQ | HTPDAS | A99A99.G99G99. | F99F99.R99R99. | H99H99.T99T99. | 21 | 15 | 18 | 54 | Yes | Yes | Yes |
| | | | | | C99C99.F99F99. | S99S99.L99L99. | P99P99.D99D99. | | | | | | | |
| | | | | | V97B00.S99S99. | Q99Q99. | A99A99.S99S99. | | | | | | | |
| | | | | | N94B00. | | | | | | | | | |
| 384 | 38 | YYEALRG | IDSYS | KHFNTGLQRWIYV | Y99Y99.Y99Y99. | I99I99.D97B00. | K99K99.H99H99. | 21 | 15 | 39 | 75 | Yes | Yes | Yes |
| | | | | | E99E99.A99A99. | S99S99.Y99Y99. | F99F99.N99N99. | | | | | | | |
| | | | | | L99L99.R99R99. | S99S99. | T97B00.G99G99. | | | | | | | |
| | | | | | G99G99. | | L99L99.Q99Q99. | | | | | | | |
| | | | | | | | R99R99.W99W99. | | | | | | | |
| | | | | | | | I99I99.Y99Y99. | | | | | | | |
| | | | | | | | V99V99. | | | | | | | |
| 470 | 38 | VTTKQVY | MVLGS | VCLVGTSCV | V99V99.T99T99. | M99M99.V99V99. | V99V99.C99C99. | 21 | 15 | 27 | 63 | Yes | Yes | Yes |
| | | | | | T99T99.K99K99. | L99L99.G99G99. | L99L99.V99V99. | | | | | | | |
| | | | | | Q99Q99.V99V99. | S99S99. | G99G99.T99T99. | | | | | | | |
| | | | | | Y97B00. | | S99S99.C97B00. | | | | | | | |
| | | | | | | | V97B00. | | | | | | | |
| 630 | 38 | KVFLTVW | NDGHT | VSFQPRHPVV | K97B00.V99V99. | N99N99.D99D99. | V99V99.S99S99. | 21 | 15 | 30 | 66 | Yes | Yes | Yes |
| | | | | | F99F99.L99L99. | G99G99.H99H99. | F99F99.Q99Q99. | | | | | | | |
| | | | | | T99T99.V99V99. | T99T99. | P99P99.R99R99. | | | | | | | |
| | | | | | W99W99. | | H99H99.P99P99. | | | | | | | |
| | | | | | | | V99V99.V99V99. | | | | | | | |
| 96 | 38 | RARGKVF | CSGVD | IFYDRTDRLS | R97B00.A97B00. | C99C99.S99S99. | I99I99.F99F99. | 21 | 15 | 30 | 66 | Yes | Yes | Yes |
| | | | | | R97B00.G97B00. | G99G99.V99V99. | Y99Y99.D99D99. | | | | | | | |
| | | | | | K97B00.V97B00. | D99D99. | R99R99.T99T99. | | | | | | | |
| | | | | | F97B00. | | D99D99.R99R99. | | | | | | | |
| | | | | | | | L99L99.S99S99. | | | | | | | |
| 111 | 37 | LESLCG | VGAIR | WNYDCLGIS | L99L99.E99E99. | V99V99.G99G99. | B00 | 18 | 15 | 0 | 33 | Yes | Yes | Yes |
| | | | | | S99S99.L99L99. | A99A99.I99I99. | | | | | | | | |
| | | | | | C99C99.G99G99. | R99R99. | | | | | | | | |
| 32 | 37 | RLMNEVF | RSAGT | AFYISFMVY | R99R99.L99L99. | R99R99.S99S99. | A99A99.F99F99. | 21 | 15 | 27 | 63 | Yes | Yes | Yes |
| | | | | | M99M99.N99N99. | A99A99.G99G99. | Y99Y99.I99I99. | | | | | | | |
| | | | | | E99E99.V99V99. | T99T99. | S99S99.F99F99. | | | | | | | |
| | | | | | F99F99. | | M99M99.V97B00. | | | | | | | |
| | | | | | | | Y99Y99. | | | | | | | |
| 436 | 37 | IYLEAYG | LYSFR | LQPTPSGWRE | I99I99.Y94B00. | L99L99.Y99Y99. | L99L99.Q99Q99. | 21 | 15 | 30 | 66 | Yes | Yes | Yes |
| | | | | | L99L99.E99E99. | S99S99.F99F99. | P99P99.T99T99. | | | | | | | |
| | | | | | A99A99.Y99Y99. | R99R99. | P99P99.S99S99. | | | | | | | |
| | | | | | G99G99. | | G99G99.W99W99. | | | | | | | |
| | | | | | | | R99R99.E99E99. | | | | | | | |
| 614 | 37 | SCIRWLS | EYVKF | LENPHIASKY | S99S99.C99C99. | E99E99.Y99Y99. | L97B00.E97B00. | 21 | 15 | 30 | 66 | Yes | Yes | Yes |
| | | | | | I99I99.R99R99. | V99V99.K99K99. | N97B00.P97B00. | | | | | | | |
| | | | | | W99W99.L99L99. | F99F99. | H97B00.I97B00. | | | | | | | |
| | | | | | S99S99. | | A97B00.S97B00. | | | | | | | |
| | | | | | | | K97B00.Y97B00. | | | | | | | |
| 70 | 37 | TVIPYS | CMFLH | PVPIPEESIT | T97B00.V97B00. | C99C99.M99M99. | P99P99.V86B00. | 18 | 15 | 30 | 63 | Yes | Yes | Yes |
| | | | | | I94B00.P97B00. | F99F99.L99L99. | P86B00.I86B00. | | | | | | | |
| | | | | | Y97B00.S94B00. | H99H99. | P86B00.E86B00. | | | | | | | |
| | | | | | | | E86B00.S86B00. | | | | | | | |
| | | | | | | | I99I99.T86B00. | | | | | | | |
| 76 | 37 | RTYRMVF | VCSSV | VSLLRTITAH | R99R99.T99T99. | V99V99.C99C99. | V99V99.S37B00. | 21 | 15 | 13 | 49 | Yes | Yes | Yes |
| | | | | | Y99Y99.R99R99. | S97B00.S99S99. | L37B00.L37B00. | | | | | | | |
| | | | | | M99M99.V99V99. | V99V99. | R37B00.T37B00. | | | | | | | |
| | | | | | F99F99. | | I37B00.T70B00. | | | | | | | |
| | | | | | | | A37B00.H37B00. | | | | | | | |
| 109 | 36 | CVTRRYR | NVLTL | VDSTLFGV | C99C99.V99V99. | N99N99.V99V99. | V99V99.D99D99. | 21 | 15 | 24 | 60 | Yes | Yes | Yes |
| | | | | | T99T99.R99R99. | L99L99.T99T99. | S97B00.T97B00. | | | | | | | |
| | | | | | R99R99.Y99Y99. | L99L99. | L99L99.F99F99. | | | | | | | |
| | | | | | R99R99. | | G99G99.V97B00. | | | | | | | |
| 298 | 36 | IDFCYRF | PYAFR | DCPLFSLCF | I94B00.D99D99. | P99P99.Y99Y99. | D99D99.C99C99. | 21 | 15 | 27 | 63 | Yes | Yes | Yes |
| | | | | | F99F99.C99C99. | A97B00.F99F99. | P99P99.L99L99. | | | | | | | |
| | | | | | Y99Y99.R99R99. | R99R99. | F99F99.S97B00. | | | | | | | |
| | | | | | F99F99. | | L99L99.C97B00. | | | | | | | |
| | | | | | | | F99F99. | | | | | | | |
| 336 | 36 | MSE | DWRGC | SNPPISYRVD | M99M99.S99S99. | D99D99.W99W99. | S99S99.N99N99. | 9 | 15 | 30 | 54 | Yes | Yes | Yes |
| | | | | | E99E99. | R99R99.G99G99. | P99P99.P99P99. | | | | | | | |
| | | | | | | C99C99. | I99I99.S99S99. | | | | | | | |
| | | | | | | | Y99Y99.R99R99. | | | | | | | |
| | | | | | | | V99V99.D99D99. | | | | | | | |
| 352 | 36 | PECPIIY | HGIGE | VHYCHGQVF | P99P99.E99E99. | H99H99.G99G99. | V99V99.H99H99. | 21 | 15 | 27 | 63 | Yes | Yes | Yes |
| | | | | | C99C99.P99P99. | I99I99.G97B00. | Y99Y99.C99C99. | | | | | | | |
| | | | | | I99I99.I99I99. | E99E99. | H99H99.G99G99. | | | | | | | |
| | | | | | Y99Y99. | | Q99Q99.V99V99. | | | | | | | |
| | | | | | | | F99F99. | | | | | | | |
| 387 | 36 | SFMPFIR | NPRGT | QLVLVIEQW | S99S99.F99F99. | N99N99.P99P99. | Q99Q99.L99L99. | 21 | 15 | 27 | 63 | Yes | Yes | Yes |
| | | | | | M97B00.P99P99. | R99R99.G99G99. | V99V99.L99L99. | | | | | | | |
| | | | | | F99F99.I99I99. | T99T99. | V99V99.I99I99. | | | | | | | |
| | | | | | R99R99. | | E99E99.Q99Q99. | | | | | | | |
| | | | | | | | W99W99. | | | | | | | |
| 540 | 36 | VQPGVVY | ACDS | WCMSGVAIM | V99V99.Q99Q99. | A99A99.C99C99. | W99W99.C99C99. | 21 | 12 | 27 | 60 | Yes | Yes | Yes |
| | | | | | P99P99.G99G99. | D99D99.S99S99. | M99M99.S99S99. | | | | | | | |
| | | | | | V99V99.V99V99. | | G99G99.V99V99. | | | | | | | |
| | | | | | Y99Y99. | | A99A99.I99I99. | | | | | | | |
| | | | | | | | M99M99. | | | | | | | |
| 619 | 36 | LSIEGCQ | SSRWS | VTISIICHILHVH | L97B00.S99S99. | S99S99.S99S99. | V99V99.T99T99. | 21 | 15 | 39 | 75 | Yes | Yes | Yes |
| | | | | | I99I99.E99E99. | R99R99.W99W99. | I99I99.S99S99. | | | | | | | |
| | | | | | G99G99.C99C99. | S99S99. | I99I99.I99I99. | | | | | | | |
| | | | | | Q99Q99. | | C99C99.H99H99. | | | | | | | |
| | | | | | | | I99I99.L99L99. | | | | | | | |
| | | | | | | | H99H99.V99V99. | | | | | | | |
| | | | | | | | H99H99. | | | | | | | |
| 19 | 35 | SCGSVVY | SWGAA | AIFLKSSVVL | S94B00.C99C99. | S99S99.W99W99. | A99A99.I99I99. | 21 | 15 | 30 | 66 | Yes | Yes | Yes |
| | | | | | G99G99.S99S99. | G99G99.A99A99. | F99F99.L99L99. | | | | | | | |
| | | | | | V99V99.V97B00. | A99A99. | K99K99.S99S99. | | | | | | | |
| | | | | | Y99Y99. | | S99S99.V99V99. | | | | | | | |
| | | | | | | | V99V99.L99L99. | | | | | | | |
| 121 | 35 | YICHVTM | PVYND | ISLQSDFSMH | Y97B00.I94B00. | P94B00.V91B00. | I99I99.S97B00. | 21 | 15 | 30 | 66 | Yes | Yes | Yes |
| | | | | | C97B00.H97B00. | Y94B00.N94B00. | L99L99.Q97B00. | | | | | | | |
| | | | | | V97B00.T97B00. | D94B00. | S97B00.D97B00. | | | | | | | |
| | | | | | M94B00. | | F94B00.S97B00. | | | | | | | |
| | | | | | | | M97B00.H97B00. | | | | | | | |
| 135 | 35 | QSGKGCR | TGGVG | WTWSDHYYLS | Q99Q99.S97B00. | T99T99.G99G99. | W99W99.T99T99. | 21 | 15 | 30 | 66 | Yes | Yes | Yes |
| | | | | | G99G99.K99K99. | G99G99.V99V99. | W99W99.S99S99. | | | | | | | |
| | | | | | G99G99.C99C99. | G99G99. | D99D99.H99H99. | | | | | | | |
| | | | | | R99R99. | | Y99Y99.Y99Y99. | | | | | | | |
| | | | | | | | L99L99.S99S99. | | | | | | | |
| 281 | 35 | SVSAVF | KTIGS | FQYQDGSVF | S99S99.I99I99. | K99K99.T99T99. | F99F99.Q99Q99. | 21 | 15 | 27 | 63 | Yes | Yes | Yes |
| | | | | | V99V99.S99S99. | I99I99.G99G99. | Y99Y99.Q97B00. | | | | | | | |
| | | | | | A94B00.V99V99. | S99S99. | D99D99.G99G99. | | | | | | | |
| | | | | | F99F99. | | S99S99.V99V99. | | | | | | | |
| | | | | | | | F99F99. | | | | | | | |
| 400 | 35 | AWEDLVC | GFTRT | VDNGLC | A99A99.W99W99. | G97B00.F99F99. | V99V99.D99D99. | 21 | 15 | 18 | 54 | Yes | Yes | Yes |
| | | | | | E99E99.D99D99. | T99T99.R99R99. | N99N99.G99G99. | | | | | | | |
| | | | | | L99L99.V99V99. | T99T99. | L99L99.C99C99. | | | | | | | |
| | | | | | C99C99. | | | | | | | | | |
| 542 | 35 | VLGIVGG | GGARQ | SSRFGA | V99V99.L99L99. | G99G99.G99G99. | S99S99.S97B00. | 21 | 15 | 18 | 54 | Yes | Yes | Yes |
| | | | | | G99G99.I99I99. | A99A99.R99R99. | R99R99.F99F99. | | | | | | | |
| | | | | | V99V99.G99G99. | Q99Q99. | G99G99.A99A99. | | | | | | | |
| | | | | | G99G99. | | | | | | | | | |
| 74 | 35 | YRVYYAL | GHSDA | LHLLGR | Y99Y99.R99R99. | G97B00.H99H99. | L97B00.H97B00. | 21 | 15 | 18 | 54 | Yes | Yes | Yes |
| | | | | | V99V99.Y99Y99. | S99S99.D99D99. | L97B00.L97B00. | | | | | | | |
| | | | | | Y99Y99.A99A99. | A99A99. | G97B00.R94B00. | | | | | | | |
| | | | | | L99L99. | | | | | | | | | |
| 221 | 34 | LGCVWGQ | AYSGS | LIDYTRDDGWQSV | L94B00.G94B00. | A94B00.Y94B00. | L99L99.I94B00. | 21 | 15 | 39 | 75 | Yes | Yes | Yes |
| | | | | | C99C99.V91B00. | S94B00.G94B00. | D94B00.Y99Y99. | | | | | | | |
| | | | | | W99W99.G99G99. | S99S99. | T94B00.R94B00. | | | | | | | |
| | | | | | Q91B00. | | D99D99.D94B00. | | | | | | | |
| | | | | | | | G94B00.W99W99. | | | | | | | |
| | | | | | | | Q94B00.S94B00. | | | | | | | |
| | | | | | | | V94B00. | | | | | | | |
| 248 | 34 | WFGRLVY | ADGCT | ATFVKYEVL | W99W99.F99F99. | A99A99.D99D99. | A99A99.T99T99. | 21 | 15 | 27 | 63 | Yes | Yes | Yes |
| | | | | | G99G99.R99R99. | G97B00.C99C99. | F99F99.V99V99. | | | | | | | |
| | | | | | L99L99.V99V99. | T99T99. | K99K99.Y99Y99. | | | | | | | |
| | | | | | Y99Y99. | | E99E99.V99V99. | | | | | | | |
| | | | | | | | L99L99. | | | | | | | |
| 319 | 34 | SFGL | FPFGL | VARR | S99S99.F99F99. | F99F99.P99P99. | V99V99.A99A99. | 12 | 15 | 12 | 39 | Yes | Yes | Yes |
| | | | | | G99G99.L99L99. | F99F99.G99G99. | R99R99.R99R99. | | | | | | | |
| | | | | | | L99L99. | | | | | | | | |
| 105 | 33 | LDVRYFV | FYSCV | NYFDAM | L99L99.D96B00. | F99F99.Y99Y99. | N78B00.Y78B00. | 21 | 15 | 12 | 48 | Yes | Yes | Yes |
| | | | | | V99V99.R99R99. | S99S99.C99C99. | F75B00.D75B00. | | | | | | | |
| | | | | | Y99Y99.F99F99. | V99V99. | A75B00.M75B00. | | | | | | | |
| | | | | | V99V99. | | | | | | | | | |
| 160 | 33 | VIGHFVY | ADSSR | ATLISNVGVK | V99V99.I99I99. | A99A99.D99D99. | A96B00.T96B00. | 21 | 15 | 30 | 66 | Yes | Yes | Yes |
| | | | | | G96B00.H99H99. | S99S99.S99S99. | L96B00.I96B00. | | | | | | | |
| | | | | | F99F99.V99V99. | R99R99. | S96B00.N96B00. | | | | | | | |
| | | | | | Y99Y99. | | V96B00.G96B00. | | | | | | | |
| | | | | | | | V96B00.K96B00. | | | | | | | |
| 258 | 33 | NFVCNHQ | WSVAV | TLTVITRCR | N96B00.F99F99. | W99W99.S99S99. | T99T99.L99L99. | 21 | 15 | 20 | 56 | Yes | Yes | Yes |
| | | | | | V99V99.C99C99. | V99V99.A99A99. | T63S36.V60L36. | | | | | | | |
| | | | | | N99N99.H99H99. | V99V99. | I63S36.T60S36. | | | | | | | |
| | | | | | Q96B00. | | R63S36.C63P36. | | | | | | | |
| | | | | | | | R63K36. | | | | | | | |
| 274 | 33 | VHPHIFG | LWASD | TAFLGCDMLL | V99V99.H96B00. | L99L99.W99W99. | T93B00.A93B00. | 21 | 15 | 30 | 66 | Yes | Yes | Yes |
| | | | | | P99P99.H99H99. | A99A99.S99S99. | F93B00.L99L99. | | | | | | | |
| | | | | | I99I99.F99F99. | D96B00. | G93B00.C93B00. | | | | | | | |
| | | | | | G99G99. | | D90B00.M93B00. | | | | | | | |
| | | | | | | | L93B00.L93B00. | | | | | | | |
| 460 | 33 | VLGLLRL | CLAHG | VTRFDA | V96B00.L96B00. | C99C99.L96B00. | V99V99.T99T99. | 21 | 15 | 18 | 54 | Yes | Yes | Yes |
| | | | | | G96B00.L96B00. | A99A99.H99H99. | R99R99.F99F99. | | | | | | | |
| | | | | | L96B00.R96B00. | G99G99. | D96B00.A99A99. | | | | | | | |
| | | | | | L96B00. | | | | | | | | | |
| 592 | 33 | ITHSCVY | HDVAS | VSLTHGGIV | I96B00.T99T99. | H99H99.D99D99. | V72B00.S72B00. | 21 | 15 | 18 | 54 | Yes | Yes | Yes |
| | | | | | H99H99.S99S99. | V99V99.A99A99. | L72B00.T72B00. | | | | | | | |
| | | | | | C99C99.V99V99. | S99S99. | H72B00.G72B00. | | | | | | | |
| | | | | | Y99Y99. | | G72B00.I72B00. | | | | | | | |
| | | | | | | | V72B00. | | | | | | | |
| 685 | 33 | NGGHVFA | PDTMC | TQWLVEEVM | N90B00.G99G99. | P99P99.D99D99. | T99T99.Q99Q99. | 21 | 15 | 27 | 63 | Yes | Yes | Yes |
| | | | | | G99G99.H99H99. | T99T99.M99M99. | W99W99.L99L99. | | | | | | | |
| | | | | | V99V99.F99F99. | C99C99. | V99V99.E99E99. | | | | | | | |
| | | | | | A99A99. | | E99E99.V99V99. | | | | | | | |
| | | | | | | | M99M99. | | | | | | | |
| 114 | 32 | SIPRVVI | DLGRG | YIFHYTSSVV | S99S99.I99I99. | D99D99.L99L99. | Y99Y99.I99I99. | 21 | 15 | 30 | 66 | Yes | Yes | Yes |
| | | | | | P99P99.R99R99. | G99G99.R96B00. | F99F99.H99H99. | | | | | | | |
| | | | | | V99V99.V99V99. | G99G99. | Y99Y99.T99T99. | | | | | | | |
| | | | | | I99I99. | | S99S99.S96B00. | | | | | | | |
| | | | | | | | V99V99.V99V99. | | | | | | | |
| 136 | 32 | CLRGICW | YNCVR | SRFDSF | C99C99.L99L99. | Y99Y99.N99N99. | S99S99.R99R99. | 21 | 15 | 18 | 54 | Yes | Yes | Yes |
| | | | | | R99R99.G99G99. | C99C99.V99V99. | F99F99.D99D99. | | | | | | | |
| | | | | | I99I99.C99C99. | R99R99. | S99S99.F99F99. | | | | | | | |
| | | | | | W99W99. | | | | | | | | | |
| 31 | 32 | HLGIEVA | RFPEN | SMLADNGVTS | H96B00.L96B00. | R96B00.F96B00. | S99S99.M99M99. | 21 | 15 | 30 | 66 | Yes | Yes | Yes |
| | | | | | G96B00.I96B00. | P96B00.E96B00. | L99L99.A99A99. | | | | | | | |
| | | | | | E96B00.V96B00. | N96B00. | D99D99.N99N99. | | | | | | | |
| | | | | | A96B00. | | G99G99.V99V99. | | | | | | | |
| | | | | | | | T99T99.S99S99. | | | | | | | |
| 447 | 32 | KCSLIVY | RDSRG | CYFGASYIS | K99K99.C99C99. | R99R99.D99D99. | C71B00.Y71B00. | 21 | 15 | 19 | 55 | Yes | Yes | Yes |
| | | | | | S96B00.L99L99. | S99S99.R99R99. | F71B00.G71B00. | | | | | | | |
| | | | | | I99I99.V99V99. | G99G99. | A87B00.S71B00. | | | | | | | |
| | | | | | Y99Y99. | | Y71B00.I71B00. | | | | | | | |
| | | | | | | | S71B00. | | | | | | | |
| 59 | 32 | GGLFDMF | PKQHN | LRPPSC | G99G99.G99G99. | P96B00.K99K99. | B00 | 21 | 15 | 0 | 36 | Yes | Yes | Yes |
| | | | | | L99L99.F99F99. | Q99Q99.H99H99. | | | | | | | | |
| | | | | | D99D99.M93B00. | N99N99. | | | | | | | | |
| | | | | | F99F99. | | | | | | | | | |
| 604 | 32 | LFLRNVY | HSSGD | VYLLQACIVK | L99L99.F99F99. | H99H99.S99S99. | V99V99.Y99Y99. | 21 | 15 | 30 | 66 | Yes | Yes | Yes |
| | | | | | L99L99.R99R99. | S99S99.G99G99. | L99L99.L99L99. | | | | | | | |
| | | | | | N99N99.V99V99. | D99D99. | Q99Q99.A99A99. | | | | | | | |
| | | | | | Y99Y99. | | C99C99.I99I99. | | | | | | | |
| | | | | | | | V99V99.K99K99. | | | | | | | |
| 33 | 31 | IRCTLGW | LAAQV | PYWYFGEVR | I96B00.R99R99. | L99L99.A99A99. | P99P99.Y99Y99. | 21 | 15 | 27 | 63 | Yes | Yes | Yes |
| | | | | | C93B00.T96B00. | A99A99.Q99Q99. | W99W99.Y99Y99. | | | | | | | |
| | | | | | L93B00.G96B00. | V99V99. | F99F99.G96B00. | | | | | | | |
| | | | | | W96B00. | | E99E99.V99V99. | | | | | | | |
| | | | | | | | R96B00. | | | | | | | |
| 44 | 31 | FIYRLVY | RAAEN | YSLGYLADIS | F96B00.I96B00. | R99R99.A99A99. | Y96B00.S93B00. | 21 | 15 | 30 | 66 | Yes | Yes | Yes |
| | | | | | Y96B00.R96B00. | A99A99.E99E99. | L96B00.G99G99. | | | | | | | |
| | | | | | L96B00.V96B00. | N99N99. | Y96B00.L96B00. | | | | | | | |
| | | | | | Y96B00. | | A96B00.D96B00. | | | | | | | |
| | | | | | | | I96B00.S96B00. | | | | | | | |
| 450 | 31 | INVRVCC | ALYIG | CLPNAH | I96B00.N99N99. | A99A99.L99L99. | C61S38.L61H38. | 21 | 15 | 13 | 49 | Yes | Yes | Yes |
| | | | | | V99V99.R99R99. | Y99Y99.I99I99. | P99P99.N61S38. | | | | | | | |
| | | | | | V99V99.C99C99. | G99G99. | A61S38.H58T38. | | | | | | | |
| | | | | | C99C99. | | | | | | | | | |
| 477 | 31 | SINGGVY | RAGCWW | AFLRGNRVI | S99S99.I99I99. | R99R99.A99A99. | A99A99.F99F99. | 21 | 15 | 27 | 63 | Yes | Yes | Yes |
| | | | | | N96B00.G99G99. | G99G99.C99C99. | L99L99.R99R99. | | | | | | | |
| | | | | | G99G99.V99V99. | W99W99. | G99G99.N99N99. | | | | | | | |
| | | | | | Y96B00. | | R99R99.V99V99. | | | | | | | |
| | | | | | | | I99I99. | | | | | | | |
| 184 | 30 | FLSSVWF | TCHMD | RYGWCT | F99F99.L99L99. | T99T99.C99C99. | R70B00.Y70B00. | 21 | 15 | 13 | 49 | Yes | Yes | Yes |
| | | | | | S99S99.S99S99. | H99H99.M99M99. | G96B00.W70B00. | | | | | | | |
| | | | | | V99V99.W99W99. | D99D99. | C70B00.T70B00. | | | | | | | |
| | | | | | F99F99. | | | | | | | | | |
| 196 | 30 | FNCCDVQ | GVSCE | LLGYSSEVRW | F99F99.N96B00. | G99G99.V99V99. | L99L99.L99L99. | 21 | 15 | 30 | 66 | Yes | Yes | Yes |
| | | | | | C99C99.C99C99. | S99S99.C99C99. | G99G99.Y99Y99. | | | | | | | |
| | | | | | D99D99.V99V99. | E99E99. | S99S99.S99S99. | | | | | | | |
| | | | | | Q99Q99. | | E99E99.V99V99. | | | | | | | |
| | | | | | | | R99R99.W99W99. | | | | | | | |
| 204 | 30 | GIFVYGG | GVTAN | LHDTHLKAVDSN | G99G99.I99I99. | G99G99.V99V99. | L99L99.H99H99. | 21 | 15 | 36 | 72 | Yes | Yes | Yes |
| | | | | | F99F99.V99V99. | T99T99.A99A99. | D99D99.T99T99. | | | | | | | |
| | | | | | Y99Y99.G99G99. | N99N99. | H99H99.L99L99. | | | | | | | |
| | | | | | G99G99. | | K99K99.A99A99. | | | | | | | |
| | | | | | | | V96B00.D99D99. | | | | | | | |
| | | | | | | | S99S99.N99N99. | | | | | | | |
| 245 | 30 | GRSRQSD | ISCCD | FWRGRIDCSIMRL | G99G99.R99R99. | I99I99.S99S99. | F99F99.W99W99. | 21 | 15 | 39 | 75 | Yes | Yes | Yes |
| | | | | | S99S99.R99R99. | C99C99.C99C99. | R99R99.G99G99. | | | | | | | |
| | | | | | Q99Q99.S99S99. | D99D99. | R99R99.I99I99. | | | | | | | |
| | | | | | D99D99. | | D99D99.C99C99. | | | | | | | |
| | | | | | | | S99S99.I99I99. | | | | | | | |
| | | | | | | | M99M99.R99R99. | | | | | | | |
| | | | | | | | L96B00. | | | | | | | |
| 356 | 30 | GCSGWR | RELVG | YVISEAYGSD | G99G99.C99C99. | R99R99.E99E99. | Y99Y99.V99V99. | 21 | 15 | 30 | 66 | Yes | Yes | Yes |
| | | | | | S99S99.G99G99. | L99L99.V99V99. | I99I99.S99S99. | | | | | | | |
| | | | | | I99I99.W99W99. | G99G99. | E99E99.A99A99. | | | | | | | |
| | | | | | R99R99. | | Y99Y99.G99G99. | | | | | | | |
| | | | | | | | S96B00.D99D99. | | | | | | | |
| 393 | 30 | GAEFVGC | IWYSS | AHLHLGAVC | G99G99.A99A99. | I99I99.W99W99. | B00 | 21 | 15 | 0 | 36 | Yes | Yes | Yes |
| | | | | | E99E99.F99F99. | Y99Y99.S99S99. | | | | | | | | |
| | | | | | V99V99.G99G99. | S96B00. | | | | | | | | |
| | | | | | C99C99. | | | | | | | | | |
| 101 | 29 | NIGILLV | TPNGV | HIVEPPRHVS | N99N99.I99I99. | T99T99.P99P99. | H96B00.I96B00. | 21 | 15 | 30 | 66 | Yes | Yes | Yes |
| | | | | | G99G99.I99I99. | N99N99.G99G99. | V96B00.E96B00. | | | | | | | |
| | | | | | L99L99.L99L99. | V99V99. | P96B00.P96B00. | | | | | | | |
| | | | | | V99V99. | | R96B00.H96B00. | | | | | | | |
| | | | | | | | V96B00.S93B00. | | | | | | | |
| 102 | 29 | R | PHNLG | LDFQNTQIDR | R99R99. | P96B00.H99H99. | L99L99.D99D99. | 3 | 15 | 30 | 48 | Yes | Yes | Yes |
| | | | | | | N99N99.L99L99. | F93B00.Q99Q99. | | | | | | | |
| | | | | | | G99G99. | N99N99.T96B00. | | | | | | | |
| | | | | | | | Q99Q99.I99I99. | | | | | | | |
| | | | | | | | D99D99.R99R99. | | | | | | | |
| 123 | 29 | VVGVIVV | DRERV | TTRFSY | V99V99.V99V99. | D96B00.R96B00. | T96B00.T99T99. | 21 | 15 | 18 | 54 | Yes | Yes | Yes |
| | | | | | G99G99.V96B00. | E96B00.R96B00. | R96B00.F99F99. | | | | | | | |
| | | | | | I96B00.V99V99. | V96B00. | S96B00.Y99Y99. | | | | | | | |
| | | | | | V96B00. | | | | | | | | | |
| 301 | 29 | VMMPGPT | RCVFG | FTSADT | V99V99.M96B00. | R99R99.C99C99. | F99F99.T99T99. | 21 | 15 | 18 | 54 | Yes | Yes | Yes |
| | | | | | M99M99.P99P99. | V99V99.F99F99. | S99S99.A99A99. | | | | | | | |
| | | | | | G99G99.P99P99. | G99G99. | D99D99.T99T99. | | | | | | | |
| | | | | | T99T99. | | | | | | | | | |
| 529 | 29 | IVGVCVG | VRTAD | HTRFGW | I86B00.V86B00. | V86B00.R99R99. | H99H99.T99T99. | 21 | 15 | 18 | 54 | Yes | Yes | Yes |
| | | | | | G99G99.V86B00. | T86B00.A86B00. | R99R99.F99F99. | | | | | | | |
| | | | | | C86B00.V86B00. | D86B00. | G86B00.W99W99. | | | | | | | |
| | | | | | G86B00. | | | | | | | | | |
| 641 | 29 | ERYRSVY | GGSVF | ASFFMGAVS | E99E99.R99R99. | G99G99.G99G99. | A99A99.S99S99. | 21 | 15 | 27 | 63 | Yes | Yes | Yes |
| | | | | | Y99Y99.R99R99. | S99S99.V99V99. | F96B00.F99F99. | | | | | | | |
| | | | | | S99S99.V99V99. | F99F99. | M99M99.G99G99. | | | | | | | |
| | | | | | Y99Y99. | | A99A99.V99V99. | | | | | | | |
| | | | | | | | S99S99. | | | | | | | |
| 167 | 28 | VVDRWVC | SWSST | TLTWHTVHGAHLE | V99V99.V99V99. | S99S99.W99W99. | T99T99.L99L99. | 21 | 15 | 39 | 75 | Yes | Yes | Yes |
| | | | | | D96B00.R99R99. | S99S99.S99S99. | T99T99.W99W99. | | | | | | | |
| | | | | | W99W99.V99V99. | T99T99. | H99H99.T99T99. | | | | | | | |
| | | | | | C99C99. | | V99V99.H99H99. | | | | | | | |
| | | | | | | | G99G99.A99A99. | | | | | | | |
| | | | | | | | H96B00.L99L99. | | | | | | | |
| | | | | | | | E99E99. | | | | | | | |
| 171 | 28 | NIVGF | ASLSG | MTLHANLCIS | N96B00.I99I99. | A99A99.S99S99. | M99M99.T99T99. | 21 | 15 | 30 | 66 | Yes | Yes | Yes |
| | | | | | V99V99.G99G99. | L99L99.S99S99. | L99L99.H99H99. | | | | | | | |
| | | | | | C99C99.V99V99. | G99G99. | A99A99.N99N99. | | | | | | | |
| | | | | | F99F99. | | L99L99.C99C99. | | | | | | | |
| | | | | | | | I99I99.S99S99. | | | | | | | |
| 25 | 28 | AGLCMYQ | YPCFD | TLSVYGFQLR | A99A99.G99G99. | Y99Y99.P99P99. | T96B00.L96B00. | 21 | 15 | 30 | 66 | Yes | Yes | Yes |
| | | | | | L99L99.C99C99. | C99C99.F99F99. | S96B00.V96B00. | | | | | | | |
| | | | | | M99M99.Y99Y99. | D99D99. | Y96B00.G96B00. | | | | | | | |
| | | | | | Q96B00. | | F96B00.Q96B00. | | | | | | | |
| | | | | | | | L99L99.R96B00. | | | | | | | |
| 364 | 28 | IMPIISW | FHLDR | FTRFRH | I96B00.M99M99. | F99F99.H99H99. | F99F99.T99T99. | 21 | 15 | 18 | 54 | Yes | Yes | Yes |
| | | | | | P99P99.I99I99. | L99L99.D99D99. | R99R99.F99F99. | | | | | | | |
| | | | | | I99I99.S99S99. | R99R99. | R99R99.H99H99. | | | | | | | |
| | | | | | W99W99. | | | | | | | | | |
| 493 | 28 | LFTRVVF | ANACS | YIFTESGAVI | L99L99.F99F99. | A99A99.N99N99. | Y67B00.I67B00. | 21 | 15 | 20 | 56 | Yes | Yes | Yes |
| | | | | | T99T99.R99R99. | A99A99.C99C99. | F67B00.T67B00. | | | | | | | |
| | | | | | V99V99.V99V99. | S99S99. | E67B00.S67B00. | | | | | | | |
| | | | | | F99F99. | | G78B00.A67B00. | | | | | | | |
| | | | | | | | V78B00.I67B00. | | | | | | | |
| 495 | 28 | VCNRLVF | CGNRC | ISLSLDSCLQ | V99V99.C99C99. | C99C99.G99G99. | I99I99.S99S99. | 21 | 15 | 30 | 66 | Yes | Yes | Yes |
| | | | | | N96B00.R99R99. | N99N99.R99R99. | L99L99.S99S99. | | | | | | | |
| | | | | | L99L99.V99V99. | C99C99. | L99L99.D99D99. | | | | | | | |
| | | | | | F99F99. | | S99S99.C99C99. | | | | | | | |
| | | | | | | | L99L99.Q99Q99. | | | | | | | |
| 52 | 28 | GSVTFVH | NHSCR | YGSDMCSLLS | G99G99.S99S99. | N99N99.H99H99. | Y99Y99.G99G99. | 21 | 15 | 30 | 66 | Yes | Yes | Yes |
| | | | | | V99V99.T99T99. | S99S99.C99C99. | S99S99.D99D99. | | | | | | | |
| | | | | | F99F99.V99V99. | R99R99. | M99M99.C99C99. | | | | | | | |
| | | | | | H99H99. | | S99S99.L99L99. | | | | | | | |
| | | | | | | | L99L99.S99S99. | | | | | | | |
| 580 | 28 | VAGHLSR | PSILF | LPKLT | V99V99.A99A99. | P99P99.S99S99. | L99L99.P99P99. | 21 | 15 | 15 | 51 | Yes | Yes | Yes |
| | | | | | G99G99.H99H99. | I99I99.L99L99. | K99K99.L99L99. | | | | | | | |
| | | | | | L99L99.S99S99. | F99F99. | T99T99. | | | | | | | |
| | | | | | R99R99. | | | | | | | | | |
| 629 | 28 | VVGIVHE | GNCPR | TTVFSH | V99V99.V99V99. | G99G99.N99N99. | T99T99.T99T99. | 21 | 15 | 18 | 54 | Yes | Yes | Yes |
| | | | | | G99G99.I99I99. | C99C99.P99P99. | V99V99.F99F99. | | | | | | | |
| | | | | | V99V99.H96B00. | R99R99. | S99S99.H99H99. | | | | | | | |
| | | | | | E99E99. | | | | | | | | | |
| 634 | 28 | MADITSG | MDNVA | DLIRVSFGRLVLY | M92B00.A96B00. | M99M99.D96B00. | D99D99.L99L99. | 21 | 15 | 39 | 75 | Yes | Yes | Yes |
| | | | | | D99D99.I99I99. | N99N99.V99V99. | I99I99.R99R99. | | | | | | | |
| | | | | | T99T99.S99S99. | A99A99. | V99V99.S99S99. | | | | | | | |
| | | | | | G99G99. | | F99F99.G99G99. | | | | | | | |
| | | | | | | | R99R99.L96B00. | | | | | | | |
| | | | | | | | V99V99.L99L99. | | | | | | | |
| | | | | | | | Y99Y99. | | | | | | | |
| 657 | 28 | LFRRIVF | AGSVA | TTLLRTGSCS | L99L99.F99F99. | A99A99.G99G99. | T99T99.T99T99. | 21 | 15 | 30 | 66 | Yes | Yes | Yes |
| | | | | | R99R99.R99R99. | S99S99.V99V99. | L99L99.L99L99. | | | | | | | |
| | | | | | I99I99.V99V99. | A99A99. | R99R99.T99T99. | | | | | | | |
| | | | | | F99F99. | | G99G99.S99S99. | | | | | | | |
| | | | | | | | C99C99.S99S99. | | | | | | | |
| 779 | 28 | VV | EYGYR | LHGDPDDG | V99V99.V99V99. | E99E99.Y99Y99. | L99L99.H99H99. | 6 | 15 | 24 | 45 | Yes | Yes | Yes |
| | | | | | | G99G99.Y99Y99. | G99G99.D99D99. | | | | | | | |
| | | | | | | R99R99. | P99P99.D99D99. | | | | | | | |
| | | | | | | | D99D99.G99G99. | | | | | | | |
| 835 | 28 | SPCIFCC | FADKT | CVNHAIIWLS | S99S99.P99P99. | F99F99.A99A99. | C99C99.V99V99. | 21 | 15 | 30 | 66 | Yes | Yes | Yes |
| | | | | | C96B00.I99I99. | D99D99.K99K99. | N99N99.H99H99. | | | | | | | |
| | | | | | F99F99.C99C99. | T99T99. | A96B00.I99I99. | | | | | | | |
| | | | | | C99C99. | | I99I99.W99W99. | | | | | | | |
| | | | | | | | L99L99.S99S99. | | | | | | | |
| 106 | 27 | VVGTLSD | CFGTQ | TTRFKH | V99V99.V99V99. | C99C99.F99F99. | T99T99.T99T99. | 21 | 15 | 18 | 54 | Yes | Yes | Yes |
| | | | | | G99G99.T96B00. | G99G99.T99T99. | R99R99.F99F99. | | | | | | | |
| | | | | | L99L99.S99S99. | Q99Q99. | K96B00.H99H99. | | | | | | | |
| | | | | | D99D99. | | | | | | | | | |
| 179 | 27 | MFSSFWF | SGYYD | RFGFAG | M99M99.F99F99. | S99S99.G99G99. | R99R99.F99F99. | 21 | 15 | 18 | 54 | Yes | Yes | Yes |
| | | | | | S99S99.S99S99. | Y99Y99.Y99Y99. | G99G99.F99F99. | | | | | | | |
| | | | | | F99F99.W99W99. | D99D99. | A99A99.G99G99. | | | | | | | |
| | | | | | F99F99. | | | | | | | | | |
| 191 | 27 | SLHGVVF | KWLHE | MCLESTLVR | S99S99.L96B00. | K99K99.W99W99. | M96B00.C96B00. | 21 | 15 | 27 | 63 | Yes | Yes | Yes |
| | | | | | H99H99.G99G99. | L99L99.H99H99. | L96B00.E96B00. | | | | | | | |
| | | | | | V99V99.V99V99. | E99E99. | S96B00.T96B00. | | | | | | | |
| | | | | | F99F99. | | L96B00.V96B00. | | | | | | | |
| | | | | | | | R96B00. | | | | | | | |
| 272 | 27 | FMLRVVE | PMHNM | PYTPIDSVLDGIR | F99F99.M99M99. | P99P99.M99M99. | P99P99.Y99Y99. | 21 | 15 | 39 | 75 | Yes | Yes | Yes |
| | | | | | L99L99.R99R99. | H99H99.N99N99. | T99T99.P99P99. | | | | | | | |
| | | | | | V99V99.V99V99. | M99M99. | I99I99.D99D99. | | | | | | | |
| | | | | | E99E99. | | S99S99.V99V99. | | | | | | | |
| | | | | | | | L99L99.D99D99. | | | | | | | |
| | | | | | | | G99G99.I99I99. | | | | | | | |
| | | | | | | | R99R99. | | | | | | | |
| 45 | 27 | NERHCVF | PGHSG | VLFHPTFDPE | N92B00.E99E99. | P99P99.G99G99. | V99V99.L99L99. | 21 | 15 | 30 | 66 | Yes | Yes | Yes |
| | | | | | R99R99.H99H99. | H99H99.S99S99. | F99F99.H99H99. | | | | | | | |
| | | | | | C99C99.V99V99. | G99G99. | P99P99.T99T99. | | | | | | | |
| | | | | | F99F99. | | F96B00.D99D99. | | | | | | | |
| | | | | | | | P99P99.E99E99. | | | | | | | |
| 457 | 27 | PVKRCVY | ADLVG | VVMDTDIVGRDVI | P96B00.V96B00. | A99A99.D96B00. | V99V99.V99V99. | 21 | 15 | 39 | 75 | Yes | Yes | Yes |
| | | | | | K88B00.R96B00. | L96B00.V99V99. | M99M99.D99D99. | | | | | | | |
| | | | | | C96B00.V96B00. | G96B00. | T99T99.D99D99. | | | | | | | |
| | | | | | Y96B00. | | I99I99.V99V99. | | | | | | | |
| | | | | | | | G99G99.R99R99. | | | | | | | |
| | | | | | | | D99D99.V99V99. | | | | | | | |
| | | | | | | | I99I99. | | | | | | | |
| 63 | 27 | RIGCLVFE | AGNLI | VAYVTALSIC | R99R99.I99I99. | A99A99.G99G99. | V77B00.A77B00. | 21 | 15 | 20 | 56 | Yes | Yes | Yes |
| | | | | | G99G99.C99C99. | N99N99.L99L99. | Y77B00.V77B00. | | | | | | | |
| | | | | | L99L99.V99V99. | I99I99. | T77B00.A77B00. | | | | | | | |
| | | | | | F99F99. | | L77B00.S77B00. | | | | | | | |
| | | | | | | | I77B00.C77B00. | | | | | | | |
| 201 | 26 | R | PHNLG | LQFNPHYPLC | B00 | P96B00.H96B00. | L99L99.Q99Q99. | 0 | 15 | 30 | 45 | Yes | Yes | Yes |
| | | | | | | N96B00.L96B00. | F99F99.N99N99. | | | | | | | |
| | | | | | | G96B00. | P99P99.H99H99. | | | | | | | |
| | | | | | | | Y99Y99.P99P99. | | | | | | | |
| | | | | | | | L99L99.C99C99. | | | | | | | |
| 217 | 26 | CSFKYFI | DGSSI | FPTLHDSTAF | C99C99.S99S99. | D99D99.G96B00. | F99F99.P99P99. | 21 | 15 | 30 | 66 | Yes | Yes | Yes |
| | | | | | F99F99.K99K99. | S99S99.S99S99. | T99T99.L99L99. | | | | | | | |
| | | | | | Y99Y99.F99F99. | I99I99. | H99H99.D99D99. | | | | | | | |
| | | | | | I96B00. | | S99S99.T99T99. | | | | | | | |
| | | | | | | | A99A99.F99F99. | | | | | | | |
| 302 | 26 | PEAVLIA | FYPSG | NAVSSRGRWYGCI | P99P99.E99E99. | F96B00.Y99Y99. | B00 | 21 | 15 | 0 | 36 | Yes | Yes | Yes |
| | | | | | A96B00.V99V99. | P99P99.S99S99. | | | | | | | | |
| | | | | | L99L99.I96B00. | G99G99. | | | | | | | | |
| | | | | | A99A99. | | | | | | | | | |
| 584 | 26 | RIVQCVF | AGAVT | SRLTHQMYVL | R99R99.I99I99. | A99A99.G99G99. | S99S99.R99R99. | 21 | 15 | 30 | 66 | Yes | Yes | Yes |
| | | | | | V99V99.Q99Q99. | A99A99.V99V99. | L99L99.T99T99. | | | | | | | |
| | | | | | C99C99.V99V99. | T99T99. | H99H99.Q99Q99. | | | | | | | |
| | | | | | F99F99. | | M99M99.Y99Y99. | | | | | | | |
| | | | | | | | V99V99.L99L99. | | | | | | | |
| 618 | 26 | LVGFLGH | CNNAV | PYYDCLLGVL | L99L99.V96B00. | C99C99.N99N99. | P99P99.Y99Y99. | 21 | 15 | 30 | 66 | Yes | Yes | Yes |
| | | | | | G99G99.F99F99. | N99N99.A99A99. | Y99Y99.D99D99. | | | | | | | |
| | | | | | L99L99.G99G99. | V99V99. | C99C99.L99L99. | | | | | | | |
| | | | | | H99H99. | | L99L99.G99G99. | | | | | | | |
| | | | | | | | V99V99.L99L99. | | | | | | | |
| 687 | 26 | VTAHCFA | LDSRC | EVWRYVSVA | V99V99.T99T99. | L99L99.D99D99. | E57B00.V57B00. | 21 | 15 | 19 | 55 | Yes | Yes | Yes |
| | | | | | A99A99.H99H99. | S99S99.R99R99. | W57B00.R57B00. | | | | | | | |
| | | | | | C99C99.F99F99. | C99C99. | Y53B00.V57B00. | | | | | | | |
| | | | | | A99A99. | | S57B00.V88B00. | | | | | | | |
| | | | | | | | A57B00. | | | | | | | |
| 413 | 25 | VMFRACF | CEGFR | NDKHSYYSW | V99V99.M99M99. | C99C99.E99E99. | L99L99.N99N99. | 21 | 15 | 30 | 66 | Yes | Yes | Yes |
| | | | | | F99F99.R99R99. | G99G99.F99F99. | D99D99.K99K99. | | | | | | | |
| | | | | | A99A99.C99C99. | R99R99. | H99H99.S99S99. | | | | | | | |
| | | | | | F99F99. | | Y99Y99.Y99Y99. | | | | | | | |
| | | | | | | | S99S99.W99W99. | | | | | | | |
| 449 | 25 | R | PHNLG | LATLHYGGFSGAG | R99R99. | P99P99.H99H99. | L99L99.A99A99. | 3 | 15 | 39 | 57 | Yes | Yes | Yes |
| | | | | | | N99N99.L99L99. | T99T99.L99L99. | | | | | | | |
| | | | | | | G99G99. | H99H99.Y99Y99. | | | | | | | |
| | | | | | | | G99G99.G99G99. | | | | | | | |
| | | | | | | | F99F99.S99S99. | | | | | | | |
| | | | | | | | G99G99.A99A99. | | | | | | | |
| | | | | | | | G99G99. | | | | | | | |
| 608 | 25 | FLIRDMI | GRCSV | ITQHPDASFLLAD | F99F99.L99L99. | G99G99.R99R99. | I99I99.T99T99. | 21 | 15 | 39 | 75 | Yes | Yes | Yes |
| | | | | | I99I99.R99R99. | C99C99.S99S99. | Q99Q99.H99H99. | | | | | | | |
| | | | | | D99D99.M99M99. | V99V99. | P99P99.D96B00. | | | | | | | |
| | | | | | I99I99. | | A99A99.S99S99. | | | | | | | |
| | | | | | | | F99F99.L99L99. | | | | | | | |
| | | | | | | | L99L99.A99A99. | | | | | | | |
| | | | | | | | D99D99. | | | | | | | |
| 613 | 25 | VRPVPYQ | YCRCV | LACITTSQSW | V99V99.R99R99. | Y99Y99.C99C99. | L99L99.A99A99. | 21 | 15 | 30 | 66 | Yes | Yes | Yes |
| | | | | | P99P99.V99V99. | R99R99.C99C99. | C96B00.I99I99. | | | | | | | |
| | | | | | P99P99.Y99Y99. | V99V99. | T99T99.T99T99. | | | | | | | |
| | | | | | Q99Q99. | | S99S99.Q99Q99. | | | | | | | |
| | | | | | | | S99S99.W99W99. | | | | | | | |
| 195 | 24 | RMNGVCF | ICGAD | MICRATVEVV | R99R99.M99M99. | I99I99.C95B00. | M58H41.I58L41. | 21 | 15 | 21 | 57 | Yes | Yes | Yes |
| | | | | | N99N99.G99G99. | G99G99.A99A99. | C58Y41.R58H41. | | | | | | | |
| | | | | | V99V99.C99C99. | D99D99. | A58R41.T58H41. | | | | | | | |
| | | | | | F99F99. | | V58L37.E58G41. | | | | | | | |
| | | | | | | | V99V99.V58R41. | | | | | | | |
| 300 | 24 | GRTLV | LGYGN | HMCSSFNVS | G99G99.R99R99. | L99L99.G99G99. | B00 | 15 | 15 | 0 | 30 | Yes | Yes | Yes |
| | | | | | T99T99.L99L99. | Y99Y99.G99G99. | | | | | | | | |
| | | | | | V99V99. | N99N99. | | | | | | | | |
| 362 | 24 | IKVYYLV | NVS | MYGSSLSCY | I95B00.K99K99. | N99N99.V99V99. | B00 | 21 | 9 | 0 | 30 | Yes | Yes | Yes |
| | | | | | V99V99.Y99Y99. | S99S99. | | | | | | | | |
| | | | | | Y99Y99.L99L99. | | | | | | | | | |
| | | | | | V99V99. | | | | | | | | | |
| 434 | 24 | GMHSVVF | LARIQ | ARLCWDGVA | G99G99.M99M99. | L99L99.A99A99. | A99A99.R99R99. | 21 | 15 | 27 | 63 | Yes | Yes | Yes |
| | | | | | H99H99.S99S99. | R99R99.I99I99. | L99L99.C99C99. | | | | | | | |
| | | | | | V99V99.V99V99. | Q99Q99. | W99W99.D99D99. | | | | | | | |
| | | | | | F99F99. | | G99G99.V99V99. | | | | | | | |
| | | | | | | | A99A99. | | | | | | | |
| 451 | 24 | CQSLPCA | MLYFM | ERPHHSIQF | C99C99.Q95B00. | M99M99.L99L99. | E99E99.R99R99. | 21 | 15 | 27 | 63 | Yes | Yes | Yes |
| | | | | | S99S99.L99L99. | Y99Y99.F99F99. | P99P99.H95B00. | | | | | | | |
| | | | | | P99P99.C99C99. | M99M99. | H99H99.S99S99. | | | | | | | |
| | | | | | A99A99. | | I99I99.Q99Q99. | | | | | | | |
| | | | | | | | F99F99. | | | | | | | |
| 572 | 24 | LCVCRSS | NVLSF | YLIETNEGAVVRC | L99L99.C99C99. | N99N99.V99V99. | Y99Y99.L99L99. | 21 | 15 | 39 | 75 | Yes | Yes | Yes |
| | | | | | V95B00.C99C99. | L99L99.S99S99. | I99I99.E99E99. | | | | | | | |
| | | | | | R99R99.S99S99. | F99F99. | T99T99.N99N99. | | | | | | | |
| | | | | | S99S99. | | E99E99.G99G99. | | | | | | | |
| | | | | | | | A99A99.V99V99. | | | | | | | |
| | | | | | | | V99V99.R99R99. | | | | | | | |
| | | | | | | | C99C99. | | | | | | | |
| 582 | 24 | VPMDVLS | IHSVL | VDTSPVREMMRVK | V99V99.P99P99. | I99I99.H99H99. | V99V99.D99D99. | 21 | 15 | 39 | 75 | Yes | Yes | Yes |
| | | | | | M99M99.D99D99. | S99S99.V99V99. | T99T99.S99S99. | | | | | | | |
| | | | | | V99V99.L99L99. | L99L99. | P99P99.V99V99. | | | | | | | |
| | | | | | S99S99. | | R99R99.E99E99. | | | | | | | |
| | | | | | | | M99M99.M99M99. | | | | | | | |
| | | | | | | | R99R99.V99V99. | | | | | | | |
| | | | | | | | K99K99. | | | | | | | |
| 125 | 23 | IRAGCLI | TDD | YIYVLTCSRGTVR | I95B00.R99R99. | T99T99.D99D99. | B00 | 21 | 9 | 0 | 30 | Yes | Yes | Yes |
| | | | | | A99A99.G99G99. | D99D99. | | | | | | | | |
| | | | | | C99C99.L99L99. | | | | | | | | | |
| | | | | | I99I99. | | | | | | | | | |
| 144 | 23 | FVGLLLS | LYPYC | STHHMGFST | F95B00.V95B00. | L99L99.Y99Y99. | S99S99.T95B00. | 21 | 15 | 27 | 63 | Yes | Yes | Yes |
| | | | | | G95B00.L95B00. | P99P99.Y99Y99. | H99H99.H99H99. | | | | | | | |
| | | | | | L95B00.L91B00. | C99C99. | M99M99.G95B00. | | | | | | | |
| | | | | | S95B00. | | F99F99.S99S99. | | | | | | | |
| | | | | | | | T99T99. | | | | | | | |
| 182 | 23 | YVVGMIY | RASTS | MRFVGGSVR | Y95B00.V99V99. | R99R99.A99A99. | M99M99.R99R99. | 21 | 15 | 27 | 63 | Yes | Yes | Yes |
| | | | | | V99V99.G99G99. | S99S99.T99T99. | F99F99.V99V99. | | | | | | | |
| | | | | | M99M99.I99I99. | S99S99. | G99G99.G99G99. | | | | | | | |
| | | | | | Y95B00. | | S99S99.V99V99. | | | | | | | |
| | | | | | | | R99R99. | | | | | | | |
| 253 | 23 | WSSQ | YPGYY | LSCTQRCVRW | W99W99.S99S99. | Y99Y99.P99P99. | L99L99.S99S99. | 12 | 15 | 30 | 57 | Yes | Yes | Yes |
| | | | | | S99S99.Q99Q99. | G99G99.Y99Y99. | C99C99.T99T99. | | | | | | | |
| | | | | | | Y99Y99. | Q99Q99.R95B00. | | | | | | | |
| | | | | | | | C99C99.V95B00. | | | | | | | |
| | | | | | | | R99R99.W99W99. | | | | | | | |
| 26 | 23 | CLAGVVF | PVVC | AVLDRVVR | C99C99.L99L99. | P99P99.V99V99. | A99A99.V99V99. | 21 | 12 | 24 | 57 | Yes | Yes | Yes |
| | | | | | A99A99.G99G99. | V99V99.C99C99. | L99L99.D99D99. | | | | | | | |
| | | | | | V99V99.V99V99. | | R99R99.V99V99. | | | | | | | |
| | | | | | F99F99. | | V99V99.R99R99. | | | | | | | |
| 318 | 23 | FGDLIGC | FLLHS | FCSADR | F99F99.G95B00. | F99F99.L99L99. | F99F99.C99C99. | 21 | 15 | 18 | 54 | Yes | Yes | Yes |
| | | | | | D99D99.L99L99. | L99L99.H99H99. | S99S99.A99A99. | | | | | | | |
| | | | | | I99I99.G99G99. | S99S99. | D99D99.R99R99. | | | | | | | |
| | | | | | C99C99. | | | | | | | | | |
| 350 | 23 | ICAGFCR | VGHIR | QHVSYYNCLLSWS | I91B00.C99C99. | V99V99.G99G99. | Q99Q99.H99H99. | 21 | 15 | 39 | 75 | Yes | Yes | Yes |
| | | | | | A99A99.G99G99. | H99H99.I99I99. | V99V99.S99S99. | | | | | | | |
| | | | | | F99F99.C99C99. | R99R99. | Y99Y99.Y99Y99. | | | | | | | |
| | | | | | R99R99. | | N99N99.C99C99. | | | | | | | |
| | | | | | | | L99L99.L99L99. | | | | | | | |
| | | | | | | | S99S99.W95B00. | | | | | | | |
| | | | | | | | S99S99. | | | | | | | |
| 394 | 23 | RTNGMVY | RSYYG | ARVDASGVVS | R99R99.T99T99. | R99R99.S99S99. | A99A99.R95B00. | 21 | 15 | 30 | 66 | Yes | Yes | Yes |
| | | | | | N99N99.G99G99. | Y99Y99.Y99Y99. | V95B00.D95B00. | | | | | | | |
| | | | | | M99M99.V99V99. | G99G99. | A95B00.S95B00. | | | | | | | |
| | | | | | Y99Y99. | | G99G99.V95B00. | | | | | | | |
| | | | | | | | V99V99.S95B00. | | | | | | | |
| 41 | 23 | SHCSFMY | RLLDD | RMLGMAKGSIRWS | S95B00.H95B00. | R99R99.L99L99. | R99R99.M99M99. | 21 | 15 | 39 | 75 | Yes | Yes | Yes |
| | | | | | C95B00.S95B00. | L99L99.D99D99. | L99L99.G99G99. | | | | | | | |
| | | | | | F95B00.M95B00. | D99D99. | M99M99.A99A99. | | | | | | | |
| | | | | | Y95B00. | | K99K99.G99G99. | | | | | | | |
| | | | | | | | S99S99.I99I99. | | | | | | | |
| | | | | | | | R95B00.W99W99. | | | | | | | |
| | | | | | | | S99S99. | | | | | | | |
| 452 | 23 | IDVLLTR | CWVLE | TWNAAHFWDC | I99I99.D99D99. | C99C99.W99W99. | T99T99.W99W99. | 21 | 15 | 30 | 66 | Yes | Yes | Yes |
| | | | | | V99V99.L99L99. | V99V99.L99L99. | N99N99.A99A99. | | | | | | | |
| | | | | | L99L99.T99T99. | E99E99. | A95B00.H99H99. | | | | | | | |
| | | | | | R99R99. | | F99F99.W99W99. | | | | | | | |
| | | | | | | | D99D99.C99C99. | | | | | | | |
| 463 | 23 | VLSLLLA | RHACS | FTRFSI | V99V99.L99L99. | R99R99.H99H99. | F99F99.T99T99. | 21 | 15 | 18 | 54 | Yes | Yes | Yes |
| | | | | | S95B00.L99L99. | A99A99.C99C99. | R99R99.F99F99. | | | | | | | |
| | | | | | L99L99.L99L99. | S99S99. | S99S99.H99H99. | | | | | | | |
| | | | | | A95B00. | | | | | | | | | |
| 480 | 23 | LDS | ASGNA | TVVYLF | L99L99.D99D99. | A99A99.S99S99. | T99T99.V99V99. | 9 | 15 | 18 | 42 | Yes | Yes | Yes |
| | | | | | S95B00. | G99G99.N99N99. | V99V99.Y99Y99. | | | | | | | |
| | | | | | | A99A99. | L99L99.F99F99. | | | | | | | |
| 514 | 23 | SVFQIHW | HICGS | LLQNHGNMVY | S99S99.V99V99. | H99H99.I99I99. | L95B00.L99L99. | 21 | 15 | 30 | 66 | Yes | Yes | Yes |
| | | | | | F99F99.Q99Q99. | C99C99.G99G99. | Q99Q99.N99N99. | | | | | | | |
| | | | | | I99I99.H99H99. | S99S99. | H99H99.G99G99. | | | | | | | |
| | | | | | W99W99. | | N99N99.M99M99. | | | | | | | |
| | | | | | | | V99V99.Y99Y99. | | | | | | | |
| 537 | 23 | LFKNVVF | NNGLP | ALLAPARCVL | L99L99.F99F99. | N99N99.N99N99. | A99A99.L73B00. | 21 | 15 | 22 | 58 | Yes | Yes | Yes |
| | | | | | K99K99.N99N99. | G99G99.L99L99. | L73B00.A73B00. | | | | | | | |
| | | | | | V99V99.V99V99. | P99P99. | P73B00.A73B00. | | | | | | | |
| | | | | | F99F99. | | R73B00.C73B00. | | | | | | | |
| | | | | | | | V99V99.L73B00. | | | | | | | |
| 712 | 23 | LVRGSVF | YCDHD | VHRDHDTSLV | L95B00.V99V99. | Y99Y99.C99C99. | V99V99.H99H99. | 21 | 15 | 30 | 66 | Yes | Yes | Yes |
| | | | | | R99R99.G99G99. | D99D99.H99H99. | R99R99.D99D99. | | | | | | | |
| | | | | | S99S99.V99V99. | D99D99. | H99H99.D95B00. | | | | | | | |
| | | | | | F99F99. | | T99T99.S99S99. | | | | | | | |
| | | | | | | | L99L99.V99V99. | | | | | | | |
| 115 | 22 | LCSRVVI | TSLSG | HRLCDTGSVR | L95B00.C90B00. | T99T99.S99S99. | H99H99.R99R99. | 21 | 15 | 30 | 66 | Yes | Yes | Yes |
| | | | | | S95B00.R95B00. | L99L99.S99S99. | L99L99.C99C99. | | | | | | | |
| | | | | | V95B00.V95B00. | G99G99. | D99D99.T99T99. | | | | | | | |
| | | | | | I95B00. | | G99G99.S99S99. | | | | | | | |
| | | | | | | | V99V99.R95B00. | | | | | | | |
| 115 | 22 | KYIAYTP | LMRGI | AWALLCEASES | K95B00.Y99Y99. | L95B00.M99M99. | A99A99.W99W99. | 21 | 15 | 33 | 69 | Yes | Yes | Yes |
| | | | | | I90B00.A99A99. | R99R99.G99G99. | A99A99.L99L99. | | | | | | | |
| | | | | | Y99Y99.T99T99. | I99I99. | L99L99.C99C99. | | | | | | | |
| | | | | | P99P99. | | E99E99.A99A99. | | | | | | | |
| | | | | | | | S95B00.E99E99. | | | | | | | |
| | | | | | | | S99S99. | | | | | | | |
| 206 | 22 | IVGLLVC | FSPTA | CTRFRA | I99I99.V99V99. | F99F99.S99S99. | C99C99.T99T99. | 21 | 15 | 18 | 54 | Yes | Yes | Yes |
| | | | | | G99G99.L99L99. | P99P99.T99T99. | R99R99.F99F99. | | | | | | | |
| | | | | | L99L99.V99V99. | A99A99. | R99R99.A99A99. | | | | | | | |
| | | | | | C99C99. | | | | | | | | | |
| 249 | 22 | KVSDVYV | SSRHA | QTMSYPGVWLIIQ | K95B00.V99V99. | S99S99.S99S99. | Q99Q99.T99T99. | 21 | 15 | 39 | 75 | Yes | Yes | Yes |
| | | | | | S99S99.D99D99. | R99R99.H99H99. | M99M99.S99S99. | | | | | | | |
| | | | | | V99V99.Y99Y99. | A95B00. | Y99Y99.P99P99. | | | | | | | |
| | | | | | V99V99. | | G99G99.V99V99. | | | | | | | |
| | | | | | | | W99W99.L99L99. | | | | | | | |
| | | | | | | | I99I99.I99I99. | | | | | | | |
| | | | | | | | Q99Q99. | | | | | | | |
| 252 | 22 | HHYHLFA | SSGG | TACATTPGEVDVH | H99H99.H95B00. | S99S99.S99S99. | T95B00.A99A99. | 21 | 12 | 39 | 72 | Yes | Yes | Yes |
| | | | | | Y99Y99.H99H99. | G99G99.G99G99. | C95B00.A95B00. | | | | | | | |
| | | | | | L99L99.F99F99. | | T95B00.T95B00. | | | | | | | |
| | | | | | A99A99. | | P95B00.G95B00. | | | | | | | |
| | | | | | | | E95B00.V95B00. | | | | | | | |
| | | | | | | | D95B00.V95B00. | | | | | | | |
| | | | | | | | H95B00. | | | | | | | |
| 295 | 22 | LGRLVL | EFGGQ | ITISGARSYMSSH | L99L99.G99G99. | E95B00.F99F99. | I99I99.T99T99. | 18 | 15 | 39 | 72 | Yes | Yes | Yes |
| | | | | | R99R99.L99L99. | G99G99.G99G99. | I99I99.S99S99. | | | | | | | |
| | | | | | V99V99.L99L99. | Q99Q99. | G99G99.A99A99. | | | | | | | |
| | | | | | | | R99R99.S99S99. | | | | | | | |
| | | | | | | | Y99Y99.M99M99. | | | | | | | |
| | | | | | | | S99S99.S99S99. | | | | | | | |
| | | | | | | | H95B00. | | | | | | | |
| 332 | 22 | RFSSAVY | RDNKG | MYLKSRSEIG | R95B00.F95B00. | R99R99.D99D99. | M99M99.Y99Y99. | 21 | 15 | 30 | 66 | Yes | Yes | Yes |
| | | | | | S95B00.S95B00. | N99N99.K99K99. | L99L99.K99K99. | | | | | | | |
| | | | | | A95B00.V99V99. | G99G99. | S99S99.R99R99. | | | | | | | |
| | | | | | Y95B00. | | S99S99.E99E99. | | | | | | | |
| | | | | | | | I99I99.G99G99. | | | | | | | |
| 575 | 22 | SARKCVQ | ASGEV | LIANPVVR | S95B00.A95B00. | A99A99.S99S99. | L99L99.I99I99. | 21 | 15 | 24 | 60 | Yes | Yes | Yes |
| | | | | | R95B00.K95B00. | G99G99.E99E99. | A99A99.N99N99. | | | | | | | |
| | | | | | C95B00.V95B00. | V99V99. | P99P99.V99V99. | | | | | | | |
| | | | | | Q95B00. | | V99V99.R95B00. | | | | | | | |
| 58 | 22 | VDIRNMC | GWLCAA | RPTHALVSVY | V99V99.D95B00. | G99G99.W99W99. | R90B00.P95B00. | 21 | 15 | 30 | 66 | Yes | Yes | Yes |
| | | | | | I99I99.R99R99. | L99L99.C99C99. | T95B00.H95B00. | | | | | | | |
| | | | | | N95B00.M99M99. | A99A99. | A95B00.L95B00. | | | | | | | |
| | | | | | C99C99. | | V95B00.S99S99. | | | | | | | |
| | | | | | | | V95B00.Y95B00. | | | | | | | |
| 100 | 21 | IRNQLLF | AGIGA | FYFSTHFNVI | I90B00.R95B00. | A95B00.G95B00. | F99F99.Y99Y99. | 21 | 15 | 30 | 66 | Yes | Yes | Yes |
| | | | | | N90B00.Q95B00. | I95B00.G95B00. | F99F99.S99S99. | | | | | | | |
| | | | | | L95B00.L95B00. | A95B00. | T99T99.H99H99. | | | | | | | |
| | | | | | F95B00. | | F99F99.N99N99. | | | | | | | |
| | | | | | | | V99V99.I99I99. | | | | | | | |
| 162 | 21 | HCDGGFM | QYGYR | DTNHWPNSCS | H99H99.C99C99. | Q99Q99.Y99Y99. | D47L42.T52K47. | 21 | 15 | 13 | 49 | Yes | Yes | Yes |
| | | | | | D99D99.G99G99. | G99G99.Y99Y99. | N47Y42.H52T47. | | | | | | | |
| | | | | | G99G99.F99F99. | R99R99. | W47142.P47L42. | | | | | | | |
| | | | | | M95B00. | | N57P42.S47L42. | | | | | | | |
| | | | | | | | C47Y42.S47W42. | | | | | | | |
| 207 | 21 | NLVRLMG | IYPAA | AILRPAAVCS | N95B00.L99L99. | I99I99.Y99Y99. | A99A99.I99I99. | 21 | 15 | 30 | 66 | Yes | Yes | Yes |
| | | | | | V99V99.R99R99. | P99P99.A99A99. | L99L99.R99R99. | | | | | | | |
| | | | | | L99L99.M99M99. | A99A99. | P99P99.A99A99. | | | | | | | |
| | | | | | G99G99. | | A99A99.V99V99. | | | | | | | |
| | | | | | | | C99C99.S99S99. | | | | | | | |
| 351 | 21 | MCYRCFN | YRWTV | FPSDCMDCGGLVF | M99M99.C99C99. | Y99Y99.R99R99. | F99F99.P99P99. | 21 | 15 | 39 | 75 | Yes | Yes | Yes |
| | | | | | Y99Y99.R99R99. | W99W99.T95B00. | S99S99.D99D99. | | | | | | | |
| | | | | | C99C99.F99F99. | V99V99. | C99C99.M99M99. | | | | | | | |
| | | | | | N99N99. | | D99D99.C99C99. | | | | | | | |
| | | | | | | | G99G99.G99G99. | | | | | | | |
| | | | | | | | L99L99.V99V99. | | | | | | | |
| | | | | | | | F99F99. | | | | | | | |
| 516 | 21 | TRFWSSL | TNGCC | HIITKSKFGTCVT | T90B00.R95B00. | T95B00.N95B00. | H99H99.I99I99. | 21 | 15 | 39 | 75 | Yes | Yes | Yes |
| | | | | | F95B00.W95B00. | G95B00.C95B00. | I99I99.T99T99. | | | | | | | |
| | | | | | S95B00.S95B00. | C95B00. | K99K99.S95B00. | | | | | | | |
| | | | | | L95B00. | | K99K99.F99F99. | | | | | | | |
| | | | | | | | G99G99.T99T99. | | | | | | | |
| | | | | | | | C99C99.V99V99. | | | | | | | |
| | | | | | | | T99T99. | | | | | | | |
| 550 | 21 | ASLPWVL | RSVMS | IYVCTGQVD | A95B00.S95B00. | R99R99.S99S99. | I99I99.Y95B00. | 21 | 15 | 27 | 63 | Yes | Yes | Yes |
| | | | | | L99L99.P95B00. | V99V99.M99M99. | V99V99.C95B00. | | | | | | | |
| | | | | | W95B00.V95B00. | S99S99. | T99T99.G99G99. | | | | | | | |
| | | | | | L95B00. | | Q99Q99.V99V99. | | | | | | | |
| | | | | | | | D99D99. | | | | | | | |
| 686 | 21 | SFVDRIF | PYDAG | FRPDHSGSCV | S95B00.F99F99. | P99P99.Y99Y99. | F99F99.R99R99. | 21 | 15 | 30 | 66 | Yes | Yes | Yes |
| | | | | | V99V99.D99D99. | D99D99.A99A99. | P99P99.D99D99. | | | | | | | |
| | | | | | R99R99.I99I99. | G99G99. | H99H99.S99S99. | | | | | | | |
| | | | | | F99F99. | | G99G99.S99S99. | | | | | | | |
| | | | | | | | C99C99.V99V99. | | | | | | | |
| 220 | 20 | IVILVCQ | FRGVT | NDPSAV | I99I99.V99V99. | F99F99.R99R99. | N99N99.D99D99. | 21 | 15 | 18 | 54 | Yes | Yes | Yes |
| | | | | | I99I99.L99L99. | G99G99.V99V99. | P99P99.S99S99. | | | | | | | |
| | | | | | V99V99.C99C99. | T99T99. | A90B00.V99V99. | | | | | | | |
| | | | | | Q99Q99. | | | | | | | | | |
| 239 | 20 | GVQCPVL | EFGWS | VIINVTDLMGPTI | G99G99.V99V99. | E95B00.F99F99. | B00 | 21 | 15 | 0 | 36 | Yes | Yes | Yes |
| | | | | | Q99Q99.C99C99. | G99G99.W99W99. | | | | | | | | |
| | | | | | P99P99.V99V99. | S99S99. | | | | | | | | |
| | | | | | L99L99. | | | | | | | | | |
| 353 | 20 | YGFHGSV | PLRHV | TITEPF | Y99Y99.G99G99. | P99P99.L99L99. | T99T99.I99I99. | 21 | 15 | 18 | 54 | Yes | Yes | Yes |
| | | | | | F99F99.H99H99. | R99R99.H99H99. | T99T99.E99E99. | | | | | | | |
| | | | | | G99G99.S99S99. | V99V99. | P95B00.F99F99. | | | | | | | |
| | | | | | V99V99. | | | | | | | | | |
| 365 | 20 | GRYVGVV | LRTDR | TCYIDGERNGRWF | G95B00.R95B00. | L99L99.R99R99. | T99T99.C99C99. | 21 | 15 | 39 | 75 | Yes | Yes | Yes |
| | | | | | Y95B00.V95B00. | T99T99.D99D99. | Y99Y99.I99I99. | | | | | | | |
| | | | | | G95B00.V99V99. | R99R99. | D99D99.G99G99. | | | | | | | |
| | | | | | V95B00. | | E99E99.R99R99. | | | | | | | |
| | | | | | | | N99N99.G99G99. | | | | | | | |
| | | | | | | | R99R99.W95B00. | | | | | | | |
| | | | | | | | F99F99. | | | | | | | |
| 510 | 20 | LIVSSGL | CVGLF | FTFCSPTSRI | L99L99.I99I99. | C99C99.V99V99. | F99F99.T99T99. | 21 | 15 | 30 | 66 | Yes | Yes | Yes |
| | | | | | V99V99.S99S99. | G99G99.L99L99. | F99F99.C99C99. | | | | | | | |
| | | | | | S99S99.G99G99. | F99F99. | S99S99.P99P99. | | | | | | | |
| | | | | | L99L99. | | T95B00.S99S99. | | | | | | | |
| | | | | | | | R99R99.I99I99. | | | | | | | |
| 532 | 20 | LLALTVF | NCGSV | ANLRPNDTVY | L95B00.L95B00. | N95B00.C95B00. | A99A99.N99N99. | 21 | 15 | 30 | 66 | Yes | Yes | Yes |
| | | | | | A90B00.L95B00. | G95B00.S95B00. | L99L99.R99R99. | | | | | | | |
| | | | | | T95B00.V99V99. | V95B00. | P99P99.N99N99. | | | | | | | |
| | | | | | F95B00. | | D99D99.T99T99. | | | | | | | |
| | | | | | | | V99V99.Y99Y99. | | | | | | | |
| 535 | 20 | LKRLTI | LVSSS | YAYVSIGVMR | L95B00.K80B00. | L95B00.V95B00. | Y99Y99.A99A99. | 17 | 15 | 30 | 62 | Yes | Yes | Yes |
| | | | | | R99R99.L95B00. | S95B00.S95B00. | Y99Y99.V99V99. | | | | | | | |
| | | | | | T95B00.I95B00. | S95B00. | S99S99.I99I99. | | | | | | | |
| | | | | | | | G99G99.V99V99. | | | | | | | |
| | | | | | | | M99M99.R99R99. | | | | | | | |
| 661 | 20 | MIGVVY | PDSIQ | FTFAPR | M99M99.I99I99. | P99P99.D99D99. | F95B00.T95B00. | 18 | 15 | 18 | 51 | Yes | Yes | Yes |
| | | | | | G99G99.V99V99. | S99S99.I99I99. | F95B00.A95B00. | | | | | | | |
| | | | | | V99V99.Y99Y99. | Q99Q99. | P90B00.R95B00. | | | | | | | |
| 773 | 20 | CYRQRVF | AAWPM | ATFSDTNGVI | C99C99.Y99Y99. | A99A99.A99A99. | A99A99.T99T99. | 21 | 15 | 30 | 66 | Yes | Yes | Yes |
| | | | | | R99R99.Q99Q99. | W99W99.P99P99. | F95B00.S99S99. | | | | | | | |
| | | | | | R99R99.V99V99. | M95B00. | D99D99.T99T99. | | | | | | | |
| | | | | | F99F99. | | N99N99.G99G99. | | | | | | | |
| | | | | | | | V99V99.I99I99. | | | | | | | |
| 11 | 19 | AGDRVLL | TDVPT | LTVRVQYLC | A99A99.G99G99. | T99T99.D99D99. | L99L99.T99T99. | 21 | 15 | 27 | 63 | Yes | Yes | Yes |
| | | | | | D99D99.R99R99. | V99V99.P99P99. | V99V99.R99R99. | | | | | | | |
| | | | | | V99V99.L99L99. | T99T99. | V99V99.Q99Q99. | | | | | | | |
| | | | | | L99L99. | | Y99Y99.L99L99. | | | | | | | |
| | | | | | | | C99C99. | | | | | | | |
| 158 | 19 | DTMDRCF | PFSFR | NDLANDIQFS | D99D99.T99T99. | P99P99.F99F99. | N73B00.D73B00. | 21 | 15 | 22 | 58 | Yes | Yes | Yes |
| | | | | | M99M99.D99D99. | S99S99.F99F99. | L99L99.A73B00. | | | | | | | |
| | | | | | R99R99.C99C99. | R99R99. | N73B00.D84B00. | | | | | | | |
| | | | | | F99F99. | | I73B00.Q73B00. | | | | | | | |
| | | | | | | | F73B00.S73B00. | | | | | | | |
| 102 | 19 | SAGFRVF | ADGER | AFLWLGSVA | S99S99.A99A99. | A99A99.D99D99. | B00 | 21 | 15 | 0 | 36 | Yes | Yes | Yes |
| | | | | | G99G99.F99F99. | G99G99.E99E99. | | | | | | | | |
| | | | | | R99R99.V99V99. | R99R99. | | | | | | | | |
| | | | | | F99F99. | | | | | | | | | |
| 235 | 19 | ALSD | GHSFS | WRVRHADIWF | A99A99.L99L99. | G99G99.H99H99. | W99W99.R99R99. | 12 | 15 | 30 | 57 | Yes | Yes | Yes |
| | | | | | S99S99.D99D99. | S99S99.F99F99. | V99V99.R99R99. | | | | | | | |
| | | | | | | S99S99. | H99H99.A99A99. | | | | | | | |
| | | | | | | | D99D99.I99I99. | | | | | | | |
| | | | | | | | W99W99.F99F99. | | | | | | | |
| 236 | 19 | GFYGLL | TSVAR | YDLLAHGTVR | G99G99.F99F99. | T99T99.S99S99. | Y99Y99.D99D99. | 18 | 15 | 30 | 63 | Yes | Yes | Yes |
| | | | | | Y99Y99.G99G99. | V99V99.A99A99. | L99L99.L99L99. | | | | | | | |
| | | | | | L99L99.L99L99. | R99R99. | A99A99.H99H99. | | | | | | | |
| | | | | | | | G94B00.T99T99. | | | | | | | |
| | | | | | | | V99V99.R99R99. | | | | | | | |
| 264 | 19 | NTWLCFR | HFLNS | HFSTGDNIVL | N99N99.T94B00. | H99H99.F99F99. | H99H99.F99F99. | 21 | 15 | 30 | 66 | Yes | Yes | Yes |
| | | | | | W99W99.L99L99. | L99L99.N99N99. | S99S99.T99T99. | | | | | | | |
| | | | | | C99C99.F99F99. | S99S99. | G99G99.D99D99. | | | | | | | |
| | | | | | R99R99. | | N99N99.I99I99. | | | | | | | |
| | | | | | | | V99V99.L99L99. | | | | | | | |
| 359 | 19 | IVDMEFQ | LSHLR | YHCLGR | I99I99.V99V99. | L99L99.S99S99. | Y99Y99.H99H99. | 21 | 15 | 18 | 54 | Yes | Yes | Yes |
| | | | | | D99D99.M99M99. | H99H99.L99L99. | C99C99.L99L99. | | | | | | | |
| | | | | | E99E99.F99F99. | R99R99. | G99G99.R99R99. | | | | | | | |
| | | | | | Q99Q99. | | | | | | | | | |
| 441 | 19 | FMTHIVY | PGYSL | ICLEERMVCK | F99F99.M99M99. | P99P99.G99G99. | I99I99.C99C99. | 21 | 15 | 30 | 66 | Yes | Yes | Yes |
| | | | | | T99T99.H99H99. | Y99Y99.S99S99. | L99L99.E99E99. | | | | | | | |
| | | | | | I99I99.V99V99. | L99L99. | E99E99.R99R99. | | | | | | | |
| | | | | | Y99Y99. | | M99M99.V99V99. | | | | | | | |
| | | | | | | | C99C99.K99K99. | | | | | | | |
| 494 | 19 | SIQKVVY | TSGCD | ACFIHFRGVF | S99S99.I99I99. | T99T99.S99S99. | A73B00.C73B00. | 21 | 15 | 20 | 56 | Yes | Yes | Yes |
| | | | | | Q99Q99.K99K99. | G99G99.C99C99. | F73B00.I73B00. | | | | | | | |
| | | | | | V99V99.V99V99. | D99D99 | H73B00.F73B00. | | | | | | | |
| | | | | | Y99Y99. | | R73B00.G73B00. | | | | | | | |
| | | | | | | | V73B00.F73B00. | | | | | | | |
| 605 | 19 | CTNIYC | VFRRA | QTECHPLLQ | C99C99.T99T99. | V99V99.F99F99. | Q99Q99.T94B00. | 18 | 15 | 27 | 60 | Yes | Yes | Yes |
| | | | | | N99N99.I99I99. | R99R99.R94B00. | E99E99.C99C99. | | | | | | | |
| | | | | | Y99Y99.C99C99. | A99A99. | H99H99.P99P99. | | | | | | | |
| | | | | | | | L99L99.L99L99. | | | | | | | |
| | | | | | | | Q99Q99. | | | | | | | |
| 104 | 18 | MSVMCMS | GLDRY | DYATLVICGY | M94B00.S99S99. | G94B00.L99L99. | D99D99.Y99Y99. | 21 | 15 | 30 | 66 | Yes | Yes | Yes |
| | | | | | V99V99.M99M99. | D99D99.R99R99. | A99A99.T99T99. | | | | | | | |
| | | | | | C99C99.M94B00. | Y99Y99. | L99L99.V99V99. | | | | | | | |
| | | | | | S99S99. | | I99I99.C99C99. | | | | | | | |
| | | | | | | | G99G99.Y99Y99. | | | | | | | |
| 127 | 18 | QYLAVCW | RAAVT | HVLLSSSESY | Q99Q99.Y99Y99. | R99R99.A99A99. | H94B00.V94B00. | 21 | 15 | 30 | 66 | Yes | Yes | Yes |
| | | | | | L99L99.A99A99. | A99A99.V99V99. | L94B00.L94B00. | | | | | | | |
| | | | | | V99V99.C99C99. | T94B00. | S94B00.S94B00. | | | | | | | |
| | | | | | W99W99. | | S94B00.E94B00. | | | | | | | |
| | | | | | | | S94B00.Y94B00. | | | | | | | |
| 185 | 18 | WFC | NYPEH | HAIDSKGLRT | W99W99.F99F99. | N99N99.Y99Y99. | H99H99.A94B00. | 9 | 15 | 30 | 54 | Yes | Yes | Yes |
| | | | | | C99C99. | P99P99.E99E99. | I99I99.D99D99. | | | | | | | |
| | | | | | | H99H99. | S99S99.K99K99. | | | | | | | |
| | | | | | | | G99G99.L99L99. | | | | | | | |
| | | | | | | | R99R99.T99T99. | | | | | | | |
| 267 | 18 | LIRHFFV | MPGVV | VSWWED | L99L99.I99I99. | M99M99.P99P99. | V99V99.S99S99. | 21 | 15 | 18 | 54 | Yes | Yes | Yes |
| | | | | | R99R99.H99H99. | G99G99.V99V99. | W99W99.W99W99. | | | | | | | |
| | | | | | F99F99.F99F99. | V99V99. | E99E99.D99D99. | | | | | | | |
| | | | | | V99V99. | | | | | | | | | |
| 287 | 18 | CYGVVYS | IGGSR | LCHHDTFVVH | C99C99.Y94B00. | I99I99.G99G99. | L99L99.C94B00. | 21 | 15 | 30 | 66 | Yes | Yes | Yes |
| | | | | | G99G99.V99V99. | G99G99.S99S99. | H99H99.H99H99. | | | | | | | |
| | | | | | V99V99.Y99Y99. | R99R99. | D99D99.T99T99. | | | | | | | |
| | | | | | S99S99. | | F99F99.V99V99. | | | | | | | |
| | | | | | | | V94B00.H99H99. | | | | | | | |
| 316 | 18 | LRNCLW | HAPQD | ASYTLTGVVD | L99L99.R99R99. | H99H99.A99A99. | A99A99.S94B00. | 18 | 15 | 29 | 62 | Yes | Yes | Yes |
| | | | | | N99N99.C99C99. | P99P99.Q99Q99. | Y99Y99.T99T99. | | | | | | | |
| | | | | | L99L99.W99W99. | D99D99. | L99L99.T99T99. | | | | | | | |
| | | | | | | | G99G99.V99V99. | | | | | | | |
| | | | | | | | V99V99.D55N44. | | | | | | | |
| 335 | 18 | GYIRQNW | FYTIS | TWYCDLGFF | G99G99.Y94B00. | F99F99.Y99Y99. | T83B00.W83B00. | 21 | 15 | 27 | 63 | Yes | Yes | Yes |
| | | | | | I88B00.R99R99. | T99T99.I99I99. | Y99Y99.C83B00. | | | | | | | |
| | | | | | Q99Q99.N94B00. | S99S99. | D83B00.L83B00. | | | | | | | |
| | | | | | W99W99. | | G83B00.F83B00. | | | | | | | |
| | | | | | | | F83B00. | | | | | | | |
| 377 | 18 | TIRSCVF | NDVDG | AAFLTTVMGVI | T94B00.I99I99. | N99N99.D99D99. | B00 | 21 | 15 | 0 | 36 | Yes | Yes | Yes |
| | | | | | R99R99.S99S99. | V99V99.D99D99. | | | | | | | | |
| | | | | | C99C99.V99V99. | G99G99. | | | | | | | | |
| | | | | | F99F99. | | | | | | | | | |
| 399 | 18 | LIAPVVY | RAGRC | IAFRTHDCVL | L99L99.I99I99. | R99R99.A99A99. | I99I99.A99A99. | 21 | 15 | 30 | 66 | Yes | Yes | Yes |
| | | | | | A99A99.P99P99. | G99G99.R99R99. | F99F99.R99R99. | | | | | | | |
| | | | | | V99V99.V99V99. | C99C99. | T99T99.H99H99. | | | | | | | |
| | | | | | Y99Y99. | | D99D99.C99C99. | | | | | | | |
| | | | | | | | V99V99.L99L99. | | | | | | | |
| 445 | 18 | IQRRVA | GFTAP | RALAISHAVL | I99I99.Q99Q99. | G99G99.F99F99. | R99R99.A99A99. | 18 | 15 | 30 | 63 | Yes | Yes | Yes |
| | | | | | R99R99.R99R99. | T99T99.A99A99. | L99L99.A99A99. | | | | | | | |
| | | | | | V99V99.A99A99. | P99P99. | I99I99.S99S99. | | | | | | | |
| | | | | | | | H99H99.A99A99. | | | | | | | |
| | | | | | | | V99V99.L99L99. | | | | | | | |
| 50 | 18 | NIRRIVY | CDGTT | SHLTNFLLVH | N94B00.I99I99. | C99C99.D99D99. | S99S99.H99H99. | 21 | 15 | 30 | 66 | Yes | Yes | Yes |
| | | | | | R99R99.R99R99. | G99G99.T99T99. | L99L99.T99T99. | | | | | | | |
| | | | | | I99I99.V99V99. | T99T99. | N99N99.F99F99. | | | | | | | |
| | | | | | Y99Y99. | | L99L99.L99L99. | | | | | | | |
| | | | | | | | V99V99.H99H99. | | | | | | | |
| 533 | 18 | CCHVFG | FGG | HAWDTNVSVT | C99C99.C99C99. | F99F99.G99G99. | H99H99.A99A99. | 18 | 15 | 30 | 63 | Yes | Yes | Yes |
| | | | | | H99H99.V99V99. | D99D99.I99I99. | W99W99.D99D99. | | | | | | | |
| | | | | | F99F99.G99G99. | G99G99. | T94B00.N99N99. | | | | | | | |
| | | | | | | | V99V99.S99S99. | | | | | | | |
| | | | | | | | V99V99.T99T99. | | | | | | | |
| 594 | 18 | IPYAQRS | MLLKS | VDDYC | I99I99.P99P99. | M99M99.L99L99. | V99V99.D99D99. | 21 | 15 | 15 | 51 | Yes | Yes | Yes |
| | | | | | Y99Y99.A99A99. | L99L99.K99K99. | D99D99.Y99Y99. | | | | | | | |
| | | | | | Q99Q99.R99R99. | S99S99. | C99C99. | | | | | | | |
| | | | | | S94B00. | | | | | | | | | |
| 647 | 18 | SFLTVLS | GILCE | TVGSYHLDCLCVC | S99S99.F99F99. | G99G99.I99I99. | T99T99.V99V99. | 21 | 15 | 39 | 75 | Yes | Yes | Yes |
| | | | | | L99L99.T99T99. | L99L99.C99C99. | G99G99.S99S99. | | | | | | | |
| | | | | | V99V99.L99L99. | E99E99. | Y99Y99.H99H99. | | | | | | | |
| | | | | | S99S99. | | L99L99.D99D99. | | | | | | | |
| | | | | | | | C99C99.L99L99. | | | | | | | |
| | | | | | | | C99C99.V99V99. | | | | | | | |
| | | | | | | | C99C99. | | | | | | | |
| 748 | 18 | FACVY | NGGVL | TYLESDHFSR | F99F99.A99A99. | N99N99.G99G99. | T88B00.Y99Y99. | 15 | 15 | 30 | 60 | Yes | Yes | Yes |
| | | | | | C99C99.V99V99. | G99G99.V99V99. | L88B00.E88B00. | | | | | | | |
| | | | | | Y99Y99. | L99L99. | S88B00.D88B00. | | | | | | | |
| | | | | | | | H88B00.F88B00. | | | | | | | |
| | | | | | | | S88B00.R83B00. | | | | | | | |
| 146 | 17 | RLCDWIW | NSGST | LHCSLF | R99R99.L99L99. | N99N99.S99S99. | L99L99.H99H99. | 21 | 15 | 18 | 54 | Yes | Yes | Yes |
| | | | | | C99C99.D99D99. | G99G99.S99S99. | C99C99.S99S99. | | | | | | | |
| | | | | | W99W99.I99I99. | T99T99. | L99L99.F99F99. | | | | | | | |
| | | | | | W99W99. | | | | | | | | | |
| 174 | 17 | FSRRYV | MILGS | STVMYSTSL | F99F99.S99S99. | M94B00.I99I99. | S99S99.T52D47. | 21 | 15 | 20 | 56 | Yes | Yes | Yes |
| | | | | | R99R99.R94B00. | L99L99.G99G99. | V99V99.M52S47. | | | | | | | |
| | | | | | Y99Y99.Y99Y99. | S99S99. | Y52E47.S52H47. | | | | | | | |
| | | | | | V99V99. | | T52M41.S52G47. | | | | | | | |
| | | | | | | | L52R47. | | | | | | | |
| 323 | 17 | LDVVGGC | RG | LNCIDCDFA | L99L99.D94B00. | R99R99.G99G99. | L99L99.N99N99. | 21 | 6 | 27 | 54 | Yes | Yes | Yes |
| | | | | | V99V99.V99V99. | | C99C99.I99I99. | | | | | | | |
| | | | | | G99G99.G99G99. | | D99D99.C99C99. | | | | | | | |
| | | | | | C99C99. | | D99D99.F99F99. | | | | | | | |
| | | | | | | | A99A99. | | | | | | | |
| 325 | 17 | DGGFWVA | RTQRF | TTLCPNGWCF | D99D99.G99G99. | R99R99.T99T99. | T99T99.T94B00. | 21 | 15 | 30 | 66 | Yes | Yes | Yes |
| | | | | | G99G99.F99F99. | Q99Q99.R99R99. | L99L99.C94B00. | | | | | | | |
| | | | | | W99W99.V99V99. | F99F99. | P94B00.N94B00. | | | | | | | |
| | | | | | A99A99. | | G99G99.W94B00. | | | | | | | |
| | | | | | | | C99C99.F94B00. | | | | | | | |
| 333 | 17 | LMVVTSF | NQWPA | IDSFGW | L99L99.M99M99. | N99N99.Q99Q99. | I99I99.D99D99. | 21 | 15 | 18 | 54 | Yes | Yes | Yes |
| | | | | | V99V99.V99V99. | W99W99.P99P99. | S99S99.F99F99. | | | | | | | |
| | | | | | T99T99.S94B00. | A99A99. | G99G99.W99W99. | | | | | | | |
| | | | | | F99F99. | | | | | | | | | |
| 338 | 17 | QASEIWL | SSQTF | RYGLGC | Q99Q99.A99A99. | S99S99.S99S99. | R99R99.Y99Y99. | 21 | 15 | 18 | 54 | Yes | Yes | Yes |
| | | | | | S99S99.E99E99. | Q99Q99.T99T99. | G99G99.L99L99. | | | | | | | |
| | | | | | I99I99.W99W99. | E99E99. | G99G99.C99C99. | | | | | | | |
| | | | | | L99L99. | | | | | | | | | |
| 358 | 17 | WRCIGGR | PVGRF | WHFPDNGLVE | W99W99.R99R99. | P99P99.V99V99. | W99W99.H99H99. | 21 | 15 | 30 | 66 | Yes | Yes | Yes |
| | | | | | C99C99.I99I99. | G99G99.R99R99. | F99F99.P99P99. | | | | | | | |
| | | | | | G99G99.G99G99. | F99F99. | D99D99.N99N99. | | | | | | | |
| | | | | | R99R99. | | G99G99.L99L99. | | | | | | | |
| | | | | | | | V99V99.E99E99. | | | | | | | |
| 367 | 17 | YYMHIEF | | LITHDTGVAF | Y99Y99.Y99Y99. | | L99L99.I99I99. | 21 | 0 | 30 | 51 | Yes | Yes | Yes |
| | | | | | M99M99.H99H99. | | T99T99.H99H99. | | | | | | | |
| | | | | | I99I99.E99E99. | | D99D99.T99T99. | | | | | | | |
| | | | | | F99F99. | | G99G99.V99V99. | | | | | | | |
| | | | | | | | A99A99.F99F99. | | | | | | | |
| 462 | 17 | VFFSVDR | PSSCR | LIAVSEDVLY | V99V99.F99F99. | P99P99.S99S99. | L99L99.I99I99. | 21 | 15 | 30 | 66 | Yes | Yes | Yes |
| | | | | | F99F99.S99S99. | S99S99.C99C99. | A99A99.V99V99. | | | | | | | |
| | | | | | V99V99.D99D99. | R99R99. | S99S99.E99E99. | | | | | | | |
| | | | | | R99R99. | | D99D99.V99V99. | | | | | | | |
| | | | | | | | L99L99.Y99Y99. | | | | | | | |
| 512 | 17 | LLGAPYY | KFYRG | TSLDADGTYF | L94B00.L99L99. | K99K99.F99F99. | T99T99.S99S99. | 21 | 15 | 30 | 66 | Yes | Yes | Yes |
| | | | | | G99G99.A99A99. | Y99Y99.R99R99. | L99L99.D99D99. | | | | | | | |
| | | | | | P99P99.Y99Y99. | G99G99. | A99A99.D99D99. | | | | | | | |
| | | | | | Y99Y99. | | G99G99.T99T99. | | | | | | | |
| | | | | | | | Y99Y99.F99F99. | | | | | | | |
| 609 | 17 | LHSCWIR | RRPVL | LRVITHYGVW | L99L99.H99H99. | R99R99.R99R99. | L94B00.R94B00. | 21 | 15 | 30 | 66 | Yes | Yes | Yes |
| | | | | | S99S99.C99C99. | P99P99.V99V99. | V94B00.I94B00. | | | | | | | |
| | | | | | W99W99.I99I99. | L99L99. | T94B00.H94B00. | | | | | | | |
| | | | | | R99R99. | | Y94B00.G94B00. | | | | | | | |
| | | | | | | | V94B00.W94B00. | | | | | | | |
| 69 | 17 | YKLSYLA | GSMLH | SYAMHQCIEY | Y99Y99.K99K99. | G99G99.S99S99. | S94B00.Y99Y99. | 21 | 15 | 30 | 66 | Yes | Yes | Yes |
| | | | | | L99L99.S99S99. | M99M99.L99L99. | A99A99.M99M99. | | | | | | | |
| | | | | | Y99Y99.L99L99. | H99H99. | H99H99.Q99Q99. | | | | | | | |
| | | | | | A99A99. | | C99C99.I99I99. | | | | | | | |
| | | | | | | | E99E99.Y99Y99. | | | | | | | |
| 704 | 17 | DRRYNVW | ISASI | AYFVNGAVI | D99D99.R94B00. | I99I99.S99S99. | A99A99.Y99Y99. | 21 | 15 | 27 | 63 | Yes | Yes | Yes |
| | | | | | R99R99.Y99Y99. | A99A99.S99S99. | F99F99.V99V99. | | | | | | | |
| | | | | | N99N99.V99V99. | I99I99. | N99N99.G99G99. | | | | | | | |
| | | | | | W99W99. | | A99A99.V99V99. | | | | | | | |
| | | | | | | | I99I99. | | | | | | | |
| 717 | 17 | HSYLPLS | EFGEC | VCYNYNGGDDPCR | H99H99.S99S99. | E99E99.F99F99. | V99V99.C99C99. | 21 | 15 | 39 | 75 | Yes | Yes | Yes |
| | | | | | Y99Y99.L99L99. | G99G99.E99E99. | Y99Y99.N99N99. | | | | | | | |
| | | | | | P99P99.L99L99. | C99C99. | Y99Y99.N99N99. | | | | | | | |
| | | | | | S99S99. | | G99G99.G99G99. | | | | | | | |
| | | | | | | | D99D99.D99D99. | | | | | | | |
| | | | | | | | P99P99.C99C99. | | | | | | | |
| | | | | | | | R99R99. | | | | | | | |
| 787 | 17 | TIYRIIY | YGHGP | VQFLGA | T99T99.I99I99. | Y99Y99.G99G99. | V99V99.Q99Q99. | 21 | 15 | 18 | 54 | Yes | Yes | Yes |
| | | | | | Y99Y99.R99R99. | H99H99.G99G99. | F99F99.L99L99. | | | | | | | |
| | | | | | I99I99.I94B00. | P99P99. | G99G99.A99A99. | | | | | | | |
| | | | | | Y94B00. | | | | | | | | | |
| 796 | 17 | VCCLVTV | SDRGV | TTRFSH | V99V99.C99C99. | S99S99.D99D99. | T99T99.T99T99. | 21 | 15 | 18 | 54 | Yes | Yes | Yes |
| | | | | | C99C99.L99L99. | R99R99.G99G99. | R99R99.F99F99. | | | | | | | |
| | | | | | V99V99.T99T99. | V99V99. | S99S99.H99H99. | | | | | | | |
| | | | | | V99V99. | | | | | | | | | |
| 153 | 16 | SISMR | VLNHH | EQLYFDPWGLNVV | S99S99.I99I99. | V99V99.L99L99. | E99E99.Q99Q99. | 15 | 15 | 39 | 69 | Yes | Yes | Yes |
| | | | | | S99S99.M99M99. | N99N99.H99H99. | L99L99.Y99Y99. | | | | | | | |
| | | | | | R99R99. | H99H99. | F99F99.D99D99. | | | | | | | |
| | | | | | | | P99P99.W99W99. | | | | | | | |
| | | | | | | | G99G99.L99L99. | | | | | | | |
| | | | | | | | N99N99.V99V99. | | | | | | | |
| | | | | | | | V99V99. | | | | | | | |
| 255 | 16 | NI | FWDRV | IRFVSSGFD | N99N99.I99I99. | F99F99.W99W99. | I99I99.R99R99. | 6 | 15 | 27 | 48 | Yes | Yes | Yes |
| | | | | | | D99D99.R99R99. | F99F99.V99V99. | | | | | | | |
| | | | | | | V99V99. | S99S99.S99S99. | | | | | | | |
| | | | | | | | G99G99.F99F99. | | | | | | | |
| | | | | | | | D99D99. | | | | | | | |
| 271 | 16 | YVHFSVL | IRDVC | HISFFNGTIVSSY | Y93B00.V93B00. | I99I99.R99R99. | H99H99.I99I99. | 21 | 15 | 39 | 75 | Yes | Yes | Yes |
| | | | | | H93B00.F93B00. | D99D99.V99V99. | S99S99.F99F99. | | | | | | | |
| | | | | | S93B00.V93B00. | C99C99. | F99F99.N99N99. | | | | | | | |
| | | | | | L93B00. | | G99G99.T99T99. | | | | | | | |
| | | | | | | | I99I99.V99V99. | | | | | | | |
| | | | | | | | S99S99.S99S99. | | | | | | | |
| | | | | | | | Y99Y99. | | | | | | | |
| 308 | 16 | DRIVVLG | WSTCE | HIFDQYEGCS | D99D99.R99R99. | W99W99.S99S99. | H99H99.I99I99. | 21 | 15 | 30 | 66 | Yes | Yes | Yes |
| | | | | | I99I99.V99V99. | T93B00.C99C99. | F99F99.D99D99. | | | | | | | |
| | | | | | V99V99.L99L99. | E99E99. | Q99Q99.Y99Y99. | | | | | | | |
| | | | | | G99G99. | | E99E99.G99G99. | | | | | | | |
| | | | | | | | C99C99.S99S99. | | | | | | | |
| 360 | 16 | PSVSYVA | RSWFV | SYIGLGTVV | P99P99.S99S99. | R99R99.S99S99. | S99S99.Y93B00. | 21 | 15 | 27 | 63 | Yes | Yes | Yes |
| | | | | | V99V99.S99S99. | W99W99.F99F99. | I93B00.G93B00. | | | | | | | |
| | | | | | Y99Y99.V99V99. | V99V99. | L93B00.G93B00. | | | | | | | |
| | | | | | A99A99. | | T93B00.V93B00. | | | | | | | |
| | | | | | | | V93B00. | | | | | | | |
| 468 | 16 | GSDLGCW | WFMGA | HSLSSYSGFVYLC | G99G99.S99S99. | W99W99.F99F99. | H99H99.S99S99. | 21 | 15 | 39 | 75 | Yes | Yes | Yes |
| | | | | | D99D99.L99L99. | M99M99.G99G99. | L99L99.S99S99. | | | | | | | |
| | | | | | G99G99.C99C99. | A99A99. | S99S99.Y99Y99. | | | | | | | |
| | | | | | W99W99. | | S99S99.G99G99. | | | | | | | |
| | | | | | | | F99F99.V99V99. | | | | | | | |
| | | | | | | | Y99Y99.L99L99. | | | | | | | |
| | | | | | | | C99C99. | | | | | | | |
| 55 | 16 | VGFHWFA | NPSYD | YVFCHPCMVA | V99V99.G99G99. | N99N99.P99P99. | Y99Y99.V99V99. | 21 | 15 | 30 | 66 | Yes | Yes | Yes |
| | | | | | F99F99.H99H99. | S99S99.Y99Y99. | F99F99.C99C99. | | | | | | | |
| | | | | | W99W99.F99F99. | D99D99. | H99H99.P99P99. | | | | | | | |
| | | | | | A99A99. | | C99C99.M99M99. | | | | | | | |
| | | | | | | | V99V99.A99A99. | | | | | | | |
| 576 | 16 | SRASDTS | YCGIW | GPYIYYHRV | S68B00.R75B00. | Y75B00.C75B00. | G99G99.P99P99. | 14 | 12 | 24 | 50 | Yes | Yes | Yes |
| | | | | | A75B00.S75B00. | G99G99.I99I99. | Y99Y99.I99I99. | | | | | | | |
| | | | | | D75B00.T75B00. | W75B00. | Y99Y99.Y99Y99. | | | | | | | |
| | | | | | S75B00. | | H75B00.R75B00. | | | | | | | |
| | | | | | | | V75B00. | | | | | | | |
| 586 | 16 | CCRSVVW | CGGFA | ACFTANRGVS | C56S37.C99C99. | C99C99.G99G99. | A99A99.C99C99. | 20 | 15 | 30 | 65 | Yes | Yes | Yes |
| | | | | | R93B00.S99S99. | G99G99.F99F99. | F99F99.T99T99. | | | | | | | |
| | | | | | V99V99.V99V99. | A99A99. | A99A99.N99N99. | | | | | | | |
| | | | | | W99W99. | | R99R99.G99G99. | | | | | | | |
| | | | | | | | V99V99.S99S99. | | | | | | | |
| 588 | 16 | GITNNVT | RSVEW | QTSCET | G99G99.I99I99. | R99R99.S99S99. | Q99Q99.T99T99. | 21 | 15 | 18 | 54 | Yes | Yes | Yes |
| | | | | | T81B00.N99N99. | V99V99.E99E99. | S99S99.C99C99. | | | | | | | |
| | | | | | N99N99.V99V99. | W99W99. | E99E99.T99T99. | | | | | | | |
| | | | | | T99T99. | | | | | | | | | |
| 670 | 16 | SVIYICE | RVGPV | AIKSRYVTVP | S99S99.V99V99. | R99R99.V99V99. | A99A99.I99I99. | 21 | 15 | 30 | 66 | Yes | Yes | Yes |
| | | | | | I93B00.Y99Y99. | G99G99.P99P99. | K99K99.S99S99. | | | | | | | |
| | | | | | I99I99.C99C99. | V99V99. | R99R99.Y99Y99. | | | | | | | |
| | | | | | E99E99. | | V99V99.T99T99. | | | | | | | |
| | | | | | | | V99V99.P99P99. | | | | | | | |
| 700 | 16 | SGARRVF | SGALS | VNLDSDMCCR | S99S99.G99G99. | S99S99.G99G99. | V99V99.N99N99. | 21 | 15 | 30 | 66 | Yes | Yes | Yes |
| | | | | | A99A99.R99R99. | A93B00.L99L99. | L99L99.D99D99. | | | | | | | |
| | | | | | R99R99.V99V99. | S99S99. | S99S99.D99D99. | | | | | | | |
| | | | | | F99F99. | | M99M99.C99C99. | | | | | | | |
| | | | | | | | C99C99.R99R99. | | | | | | | |
| 747 | 16 | LYHGLVF | NGDLC | CLLSGEYVA | L99L99.Y99Y99. | N99N99.G99G99. | C99C99.L99L99. | 21 | 15 | 27 | 63 | Yes | Yes | Yes |
| | | | | | H99H99.G99G99. | D99D99.L99L99. | L99L99.S99S99. | | | | | | | |
| | | | | | L99L99.V99V99. | C99C99. | G99G99.E99E99. | | | | | | | |
| | | | | | F99F99. | | Y99Y99.V99V99. | | | | | | | |
| | | | | | | | A99A99. | | | | | | | |
| 77 | 16 | PRTGGVY | AHESH | AYMFHNCGVK | P99P99.R99R99. | A99A99.H99H99. | A99A99.Y99Y99. | 21 | 15 | 30 | 66 | Yes | Yes | Yes |
| | | | | | T99T99.G99G99. | E99E99.S99S99. | M99M99.F99F99. | | | | | | | |
| | | | | | G99G99.V99V99. | H99H99. | H99H99.N99N99. | | | | | | | |
| | | | | | Y99Y99. | | C99C99.G99G99. | | | | | | | |
| | | | | | | | V99V99.K99K99. | | | | | | | |
| 8 | 16 | FHAIARA | NCSCR | YHVTGNTVLI | F93B00.H93B00. | N93B00.C93B00. | Y99Y99.H99H99. | 21 | 15 | 30 | 66 | Yes | Yes | Yes |
| | | | | | A93B00.I93B00. | S99S99.C93B00. | V99V99.T99T99. | | | | | | | |
| | | | | | A93B00.R93B00. | R93B00. | G99G99.N99N99. | | | | | | | |
| | | | | | A93B00. | | T99T99.V99V99. | | | | | | | |
| | | | | | | | L99L99.I99I99. | | | | | | | |
| 85 | 16 | QQLRCVN | GWNFT | VFVNDCSGCNTVI | Q99Q99.Q99Q99. | G99G99.W99W99. | B00 | 21 | 15 | 0 | 36 | Yes | Yes | Yes |
| | | | | | L99L99.R99R99. | N99N99.F99F99. | | | | | | | | |
| | | | | | C99C99.V99V99. | T99T99. | | | | | | | | |
| | | | | | N99N99. | | | | | | | | | |
| 895 | 16 | VGAIVLC | RSKWV | VVLHANACVL | V99V99.G99G99. | R99R99.S99S99. | V99V99.V99V99. | 21 | 15 | 30 | 66 | Yes | Yes | Yes |
| | | | | | A99A99.I99I99. | K99K99.W99W99. | L99L99.H99H99. | | | | | | | |
| | | | | | V99V99.L99L99. | V99V99. | A99A99.N99N99. | | | | | | | |
| | | | | | C99C99. | | A99A99.C93B00. | | | | | | | |
| | | | | | | | V99V99.L99L99. | | | | | | | |
| 94 | 16 | VSSSFPL | FTGFM | DSGLMPWKHG | V56B00.S56B00. | F56B00.T56B00. | D99D99.S99S99. | 14 | 10 | 30 | 54 | Yes | Yes | Yes |
| | | | | | S56B00.S56B00. | G68B00.F56B00. | G99G99.L99L99. | | | | | | | |
| | | | | | F56B00.P68B00. | M56B00. | M99M99.P99P99. | | | | | | | |
| | | | | | L56B00. | | W99W99.K99K99. | | | | | | | |
| | | | | | | | H99H99.G99G99. | | | | | | | |
| 117 | 15 | TVNALCY | VGGDY | ARFIHPVVV | T99T99.V99V99. | V99V99.G99G99. | A99A99.R99R99. | 21 | 15 | 27 | 63 | Yes | Yes | Yes |
| | | | | | N99N99.A93B00. | G99G99.D93B00. | F99F99.I99I99. | | | | | | | |
| | | | | | L99L99.C99C99. | Y99Y99. | H99H99.P99P99. | | | | | | | |
| | | | | | Y99Y99. | | V99V99.V99V99. | | | | | | | |
| | | | | | | | V99V99. | | | | | | | |
| 164 | 15 | VNCFWHS | FGASR | MMVDQFSVCC | V99V99.N99N99. | F99F99.G99G99. | M73B00.M73B00. | 21 | 15 | 20 | 56 | Yes | Yes | Yes |
| | | | | | C99C99.F99F99. | A99A99.S99S99. | V73B00.D73B00. | | | | | | | |
| | | | | | W99W99.H99H99. | R99R99. | Q73B00.F73B00. | | | | | | | |
| | | | | | S99S99. | | S73B00.V73B00. | | | | | | | |
| | | | | | | | C73B00.C73B00. | | | | | | | |
| 20 | 15 | DKPLRTP | ARGLV | NSITHT | D99D99.K99K99. | A99A99.R99R99. | N60B00.S66B00. | 21 | 15 | 12 | 48 | Yes | Yes | Yes |
| | | | | | P99P99.L99L99. | G99G99.L99L99. | I60B00.T60B00. | | | | | | | |
| | | | | | R99R99.T99T99. | V99V99. | H60B00.T60B00. | | | | | | | |
| | | | | | P99P99. | | | | | | | | | |
| 254 | 15 | FGLIRYP | CGIRH | FICAED | F99F99.G99G99. | C99C99.G99G99. | F99F99.I99I99. | 21 | 15 | 18 | 54 | Yes | Yes | Yes |
| | | | | | L99L99.I99I99. | I99I99.R99R99. | C99C99.A99A99. | | | | | | | |
| | | | | | R99R99.Y99Y99. | H99H99. | E99E99.D99D99. | | | | | | | |
| | | | | | P99P99. | | | | | | | | | |
| 344 | 15 | YISALVF | | VNLVAGDCV | Y99Y99.I99I99. | | V99V99.N99N99. | 21 | 0 | 27 | 48 | Yes | Yes | Yes |
| | | | | | S99S99.A99A99. | | L99L99.V99V99. | | | | | | | |
| | | | | | L99L99.V99V99. | | A99A99.G99G99. | | | | | | | |
| | | | | | F99F99. | | D99D99.C99C99. | | | | | | | |
| | | | | | | | V99V99. | | | | | | | |
| 372 | 15 | VFWGI | DMSTT | LAPMIDYF | V99V99.F99F99. | D99D99.M99M99. | L99L99.A99A99. | 21 | 15 | 24 | 60 | Yes | Yes | Yes |
| | | | | | P99P99.N99N99. | S99S99.T99T99. | P99P99.M99M99. | | | | | | | |
| | | | | | W99W99.G99G99. | T99T99. | I99I99.D99D99. | | | | | | | |
| | | | | | I99I99. | | Y99Y99.F99F99. | | | | | | | |
| 402 | 15 | VWLRSVY | LGVCS | ATLDSLGSVPTVS | V99V99.W99W99. | L99L99.G99G99. | A99A99.T99T99. | 21 | 15 | 39 | 75 | Yes | Yes | Yes |
| | | | | | L99L99.R99R99. | V99V99.C99C99. | L99L99.D99D99. | | | | | | | |
| | | | | | S99S99.V99V99. | S99S99. | S99S99.L99L99. | | | | | | | |
| | | | | | Y99Y99. | | G99G99.S99S99. | | | | | | | |
| | | | | | | | V99V99.P99P99. | | | | | | | |
| | | | | | | | T99T99.V99V99. | | | | | | | |
| | | | | | | | S99S99. | | | | | | | |
| 414 | 15 | TWSFMLV | GYRQH | FCFSTDLGVV | T93B00.W93B00. | G99G99.Y99Y99. | F99F99.C99C99. | 21 | 15 | 30 | 66 | Yes | Yes | Yes |
| | | | | | S93B00.F93B00. | R99R99.Q99Q99. | F99F99.S99S99. | | | | | | | |
| | | | | | M93B00.L93B00. | H99H99. | T99T99.D99D99. | | | | | | | |
| | | | | | V93B00. | | L99L99.G99G99. | | | | | | | |
| | | | | | | | V99V99.V99V99. | | | | | | | |
| 442 | 15 | RFLWCVY | PANGE | VCLAHYECLL | R99R99.F93B00. | P99P99.A99A99. | V99V99.C99C99. | 21 | 15 | 30 | 66 | Yes | Yes | Yes |
| | | | | | L93B00.W93B00. | N99N99.G99G99. | L99L99.A99A99. | | | | | | | |
| | | | | | C93B00.V99V99. | E99E99. | H99H99.Y99Y99. | | | | | | | |
| | | | | | Y93B00. | | E99E99.C99C99. | | | | | | | |
| | | | | | | | L99L99.L99L99. | | | | | | | |
| 444 | 15 | LQDVTWI | ASEVW | HIFTGVKSR | L99L99.Q99Q99. | A99A99.S99S99. | H99H99.I99I99. | 21 | 15 | 27 | 63 | Yes | Yes | Yes |
| | | | | | D99D99.V99V99. | E99E99.V99V99. | F99F99.T99T99. | | | | | | | |
| | | | | | T99T99.W99W99. | W99W99. | G99G99.V99V99. | | | | | | | |
| | | | | | I99I99. | | K99K99.S99S99. | | | | | | | |
| | | | | | | | R99R99. | | | | | | | |
| 461 | 15 | GNRHVYA | DSVFR | TLHTDLWGAQ | G99G99.N93B00. | D99D99.S99S99. | T99T99.L99L99. | 21 | 15 | 30 | 66 | Yes | Yes | Yes |
| | | | | | R99R99.H99H99. | V93B00.F99F99. | H99H99.T99T99. | | | | | | | |
| | | | | | V99V99.Y99Y99. | R99R99. | D99D99.L99L99. | | | | | | | |
| | | | | | A99A99. | | W99W99.G99G99. | | | | | | | |
| | | | | | | | A99A99.Q99Q99. | | | | | | | |
| 464 | 15 | LFNPTIG | IRWTA | LATDPTWGSE | L99L99.F99F99. | I99I99.R99R99. | L99L99.A99A99. | 21 | 15 | 30 | 66 | Yes | Yes | Yes |
| | | | | | N93B00.P99P99. | W99W99.T99T99. | T99T99.D99D99. | | | | | | | |
| | | | | | T99T99.I99I99. | A99A99. | P99P99.T99T99. | | | | | | | |
| | | | | | G99G99. | | W99W99.G99G99. | | | | | | | |
| | | | | | | | S99S99.E99E99. | | | | | | | |
| 476 | 15 | SFRWGEE | HDCLP | H | S99S99.F99F99. | H99H99.D99D99. | H99H99. | 21 | 15 | 3 | 39 | Yes | Yes | Yes |
| | | | | | R99R99.W99W99. | C99C99.L99L99. | | | | | | | | |
| | | | | | G99G99.E99E99. | P99P99. | | | | | | | | |
| | | | | | E99E99. | | | | | | | | | |
| 546 | 15 | RLTFLVW | GDGFG | QCFYLGSVT | R93B00.L99L99. | G99G99.D99D99. | Q99Q99.C99C99. | 21 | 15 | 27 | 63 | Yes | Yes | Yes |
| | | | | | T99T99.F99F99. | G99G99.F99F99. | F99F99.Y99Y99. | | | | | | | |
| | | | | | L99L99.V99V99. | G99G99. | L99L99.G99G99. | | | | | | | |
| | | | | | W99W99. | | S99S99.V99V99. | | | | | | | |
| | | | | | | | T99T99. | | | | | | | |
| 653 | 15 | GIHSPLQ | EISCW | LCWSNSGRR | G99G99.I99I99. | E99E99.I99I99. | L99L99.C99C99. | 21 | 15 | 27 | 63 | Yes | Yes | Yes |
| | | | | | H99H99.S99S99. | S99S99.C99C99. | W99W99.S99S99. | | | | | | | |
| | | | | | P99P99.L99L99. | W99W99. | N99N99.S99S99. | | | | | | | |
| | | | | | Q99Q99. | | G99G99.R99R99. | | | | | | | |
| | | | | | | | R99R99. | | | | | | | |
| 682 | 15 | MNIVWSW | LTSLQ | IDIWGC | M99M99.N99N99. | L99L99.T99T99. | I99I99.D99D99. | 21 | 15 | 18 | 54 | Yes | Yes | Yes |
| | | | | | I99I99.V99V99. | S99S99.L99L99. | I99I99.W99W99. | | | | | | | |
| | | | | | W99W99.S99S99. | Q99Q99. | G99G99.C99C99. | | | | | | | |
| | | | | | W99W99. | | | | | | | | | |
| 699 | 15 | CDDDFRV | YGCPS | VTPHM | C93B00.D99D99. | Y99Y99.G99G99. | V93B00.T93B00. | 21 | 15 | 15 | 51 | Yes | Yes | Yes |
| | | | | | D99D99.D99D99. | C99C99.P99P99. | P93B00.H93B00. | | | | | | | |
| | | | | | F99F99.R99R99. | S99S99. | M93B00. | | | | | | | |
| | | | | | V99V99. | | | | | | | | | |
| 734 | 15 | AWR | LSAIC | YDFLTW | A99A99.W99W99. | L99L99.S99S99. | Y99Y99.D99D99. | 9 | 15 | 18 | 42 | Yes | Yes | Yes |
| | | | | | R99R99. | A99A99.I99I99. | F99F99.L99L99. | | | | | | | |
| | | | | | | C99C99. | T99T99.W99W99. | | | | | | | |
| 746 | 15 | LMGRLIF | TRGME | VVFLNHFSNV | L99L99.M99M99. | T99T99.R99R99. | V93B00.V93B00. | 21 | 15 | 30 | 66 | Yes | Yes | Yes |
| | | | | | G99G99.R99R99. | G99G99.M99M99. | F93B00.L93B00. | | | | | | | |
| | | | | | L99L99.I99I99. | E99E99. | N93B00.H93B00. | | | | | | | |
| | | | | | F99F99. | | F93B00.S99S99. | | | | | | | |
| | | | | | | | N93B00.V93B00. | | | | | | | |
| 798 | 15 | SRIRILA | RNPCC | SILAGSTGA | S99S99.R99R99. | R99R99.N99N99. | S80B00.I99I99. | 21 | 15 | 19 | 55 | Yes | Yes | Yes |
| | | | | | I99I99.R99R99. | P99P99.C99C99. | L80B00.A80B00. | | | | | | | |
| | | | | | I99I99.L99L99. | C99C99. | G80B00.S80B00. | | | | | | | |
| | | | | | A99A99. | | T80B00.G80B00. | | | | | | | |
| | | | | | | | A80B00. | | | | | | | |
| 810 | 15 | DYASLVY | NGSGD | AYVSLGSVY | D93B00.Y99Y99. | N99N99.G99G99. | A99A99.Y99Y99. | 21 | 15 | 27 | 63 | Yes | Yes | Yes |
| | | | | | A99A99.S99S99. | S99S99.G99G99. | V99V99.S99S99. | | | | | | | |
| | | | | | L99L99.V99V99. | D99D99. | L99L99.G99G99. | | | | | | | |
| | | | | | Y99Y99. | | S99S99.V99V99. | | | | | | | |
| | | | | | | | Y99Y99. | | | | | | | |
| 847 | 15 | SMCDPRS | TNTYW | QDHWAD | S99S99.M99M99. | T99T99.N99N99. | Q99Q99.D99D99. | 21 | 15 | 18 | 54 | Yes | Yes | Yes |
| | | | | | C99C99.D99D99. | T99T99.Y99Y99. | H99H99.W99W99. | | | | | | | |
| | | | | | P99P99.R99R99. | W99W99. | A99A99.D99D99. | | | | | | | |
| | | | | | S99S99. | | | | | | | | | |
| 92 | 15 | YIDSHEV | KFSFH | VRL | Y99Y99.I99I99. | K99K99.F99F99. | V99V99.R99R99. | 21 | 15 | 0 | 45 | Yes | Yes | Yes |
| | | | | | D99D99.S99S99. | S99S99.F99F99. | L99L99. | | | | | | | |
| | | | | | H99H99.E99E99. | H99H99. | | | | | | | | |
| | | | | | V99V99. | | | | | | | | | |
| 130 | 14 | RPYRGSV | YGSLD | DKFFRAHVV | R99R99.P99P99. | Y99Y99.G99G99. | D99D99.K99K99. | 21 | 15 | 27 | 63 | Yes | Yes | Yes |
| | | | | | Y99Y99.R99R99. | S99S99.L92B00. | F99F99.F99F99. | | | | | | | |
| | | | | | G99G99.S99S99. | D99D99. | R99R99.A99A99. | | | | | | | |
| | | | | | V99V99. | | H99H99.V99V99. | | | | | | | |
| | | | | | | | V99V99. | | | | | | | |
| 138 | 14 | LMHRVVF | NDSSI | VRYGGH | L99L99.M99M99. | N99N99.D99D99. | V99V99.R99R99. | 21 | 15 | 18 | 54 | Yes | Yes | Yes |
| | | | | | H99H99.R99R99. | S99S99.S99S99. | Y99Y99.G99G99. | | | | | | | |
| | | | | | V99V99.V99V99. | I99I99. | G99G99.H99H99. | | | | | | | |
| | | | | | F99F99. | | | | | | | | | |
| 150 | 14 | VCHVVW | GDANR | VLLINMGRLE | V99V99.C99C99. | G99G99.D99D99. | V99V99.L99L99. | 18 | 15 | 30 | 63 | Yes | Yes | Yes |
| | | | | | H99H99.V99V99. | A99A99.N99N99. | L99L99.I99I99. | | | | | | | |
| | | | | | V99V99.W99W99. | R99R99. | N99N99.M99M99. | | | | | | | |
| | | | | | | | G99G99.R99R99. | | | | | | | |
| | | | | | | | L99L99.E99E99. | | | | | | | |
| 218 | 14 | VDARALS | CLFIR | VHPDTC | V99V99.D99D99. | C99C99.L99L99. | V99V99.H99H99. | 21 | 15 | 18 | 54 | Yes | Yes | Yes |
| | | | | | A99A99.R99R99. | F99F99.I99I99. | P99P99.D99D99. | | | | | | | |
| | | | | | A99A99.L99L99. | R99R99. | T99T99.C99C99. | | | | | | | |
| | | | | | S99S99. | | | | | | | | | |
| 285 | 14 | GHAEMYQ | AVSGN | MNWCWRGRC | G99G99.H99H99. | A99A99.V99V99. | M99M99.N99N99. | 21 | 15 | 27 | 63 | Yes | Yes | Yes |
| | | | | | A99A99.E99E99. | S99S99.G99G99. | W99W99.C99C99. | | | | | | | |
| | | | | | M99M99.Y99Y99. | N99N99. | W99W99.R99R99. | | | | | | | |
| | | | | | Q99Q99. | | G99G99.R99R99. | | | | | | | |
| | | | | | | | C99C99. | | | | | | | |
| 369 | 14 | LDSGVVF | SWGTR | SIFIDHGCVD | L99L99.D99D99. | S99S99.W99W99. | S99S99.I99I99. | 21 | 15 | 30 | 66 | Yes | Yes | Yes |
| | | | | | S99S99.G99G99. | G99G99.T99T99. | F99F99.I99I99. | | | | | | | |
| | | | | | V99V99.V99V99. | R99R99. | D99D99.H99H99. | | | | | | | |
| | | | | | F99F99. | | G99G99.C99C99. | | | | | | | |
| | | | | | | | V99V99.D99D99. | | | | | | | |
| 379 | 14 | IRGFIVC | SCPSG | NIHNAGYTD | I99I99.R99R99. | S99S99.C99C99. | N99N99.I99I99. | 21 | 15 | 27 | 63 | Yes | Yes | Yes |
| | | | | | G99G99.F99F99. | P99P99.S99S99. | H99H99.N99N99. | | | | | | | |
| | | | | | I99I99.V99V99. | G99G99. | A99A99.G99G99. | | | | | | | |
| | | | | | C99C99. | | Y99Y99.T99T99. | | | | | | | |
| | | | | | | | D99D99. | | | | | | | |
| 396 | 14 | YASEIRS | AVRPY | FVSCIF | Y92B00.A92B00. | A99A99.V99V99. | F99F99.V99V99. | 21 | 15 | 18 | 54 | Yes | Yes | Yes |
| | | | | | S85B00.E92B00. | R99R99.P99P99. | S99S99.C99C99. | | | | | | | |
| | | | | | I92B00.R92B00. | Y99Y99. | I99I99.F99F99. | | | | | | | |
| | | | | | S92B00. | | | | | | | | | |
| 423 | 14 | RVVDMLH | GFNSL | PIFNSLGLS | R99R99.V99V99. | G99G99.F99F99. | P99P99.I92B00. | 21 | 15 | 27 | 63 | Yes | Yes | Yes |
| | | | | | V99V99.D99D99. | N99N99.S99S99. | F92B00.N92B00. | | | | | | | |
| | | | | | M99M99.L99L99. | L99L99. | S92B00.L92B00. | | | | | | | |
| | | | | | H92B00. | | G92B00.L92B00. | | | | | | | |
| | | | | | | | S92B00. | | | | | | | |
| 440 | 14 | CLDMCYV | RLLHE | WTSCSR | C99C99.L99L99. | R99R99.L99L99. | W99W99.T99T99. | 21 | 15 | 18 | 54 | Yes | Yes | Yes |
| | | | | | D99D99.M99M99. | L99L99.H99H99. | S99S99.C99C99. | | | | | | | |
| | | | | | C99C99.Y99Y99. | E99E99. | S99S99.R99R99. | | | | | | | |
| | | | | | V99V99. | | | | | | | | | |
| 471 | 14 | ICEPMWA | FGSVR | LDSEW | I92B00.C99C99. | F99F99.G99G99. | L99L99.D99D99. | 21 | 15 | 15 | 51 | Yes | Yes | Yes |
| | | | | | E99E99.P99P99. | S92B00.V99V99. | S99S99.E99E99. | | | | | | | |
| | | | | | M99M99.W99W99. | R99R99. | W99W99. | | | | | | | |
| | | | | | A99A99. | | | | | | | | | |
| 547 | 14 | MYIGDVL | GVSGL | CVFVGTCQRR | M92B00.Y99Y99. | G99G99.V99V99. | C99C99.V99V99. | 21 | 15 | 30 | 66 | Yes | Yes | Yes |
| | | | | | I99I99.G99G99. | S99S99.G99G99. | F99F99.V99V99. | | | | | | | |
| | | | | | D99D99.V99V99. | L99L99. | G99G99.T99T99. | | | | | | | |
| | | | | | L99L99. | | C99C99.Q99Q99. | | | | | | | |
| | | | | | | | R99R99.R99R99. | | | | | | | |
| 549 | 14 | VFWTERW | PCSSR | GHVITSVLIF | V99V99.F99F99. | P99P99.C99C99. | G99G99.H99H99. | 21 | 15 | 30 | 66 | Yes | Yes | Yes |
| | | | | | W99W99.T99T99. | S99S99.S99S99. | V99V99.I99I99. | | | | | | | |
| | | | | | E99E99.R99R99. | R99R99. | T99T99.S99S99. | | | | | | | |
| | | | | | W99W99. | | V99V99.L99L99. | | | | | | | |
| | | | | | | | I99I99.F99F99. | | | | | | | |
| 557 | 14 | FSSPWLC | FGSLR | LLLTNTDFGRAAR | F99F99.S99S99. | F99F99.G99G99. | B00 | 21 | 15 | 0 | 36 | Yes | Yes | Yes |
| | | | | | S99S99.P99P99. | S99S99.L99L99. | | | | | | | | |
| | | | | | W99W99.L99L99. | R99R99. | | | | | | | | |
| | | | | | C99C99. | | | | | | | | | |
| 559 | 14 | VCVHCFA | LGGLN | IAMNTAWDVC | V99V99.C99C99. | L99L99.G99G99. | I99I99.A99A99. | 21 | 15 | 30 | 66 | Yes | Yes | Yes |
| | | | | | V99V99.H99H99. | G99G99.L92B00. | M99M99.N99N99. | | | | | | | |
| | | | | | C99C99.F99F99. | N99N99. | T99T99.A99A99. | | | | | | | |
| | | | | | A99A99. | | W99W99.D99D99. | | | | | | | |
| | | | | | | | V99V99.C99C99. | | | | | | | |
| 563 | 14 | SNVPMNS | CNFFF | DCASFVIVGY | S92B00.N92B00. | C99C99.N99N99. | D99D99.C99C99. | 21 | 15 | 30 | 66 | Yes | Yes | Yes |
| | | | | | V99V99.P92B00. | F99F99.F99F99. | A99A99.S99S99. | | | | | | | |
| | | | | | M99M99.N99N99. | F99F99. | F99F99.V99V99. | | | | | | | |
| | | | | | S99S99. | | I99I99.V99V99. | | | | | | | |
| | | | | | | | G99G99.Y99Y99. | | | | | | | |
| 568 | 14 | KLGHVVF | | VACRLYGHSLNLE | K99K99.L99L99. | | V99V99.A99A99. | 21 | 0 | 39 | 60 | Yes | Yes | Yes |
| | | | | | G99G99.H99H99. | | C99C99.R99R99. | | | | | | | |
| | | | | | V99V99.V99V99. | | L99L99.Y99Y99. | | | | | | | |
| | | | | | F99F99. | | G99G99.H99H99. | | | | | | | |
| | | | | | | | S99S99.L99L99. | | | | | | | |
| | | | | | | | N99N99.L99L99. | | | | | | | |
| | | | | | | | E99E99. | | | | | | | |
| 617 | 14 | AFVGCWT | NYPAI | HIMCCHCMPARCF | A92B00.F99F99. | N99N99.Y99Y99. | H99H99.I99I99. | 21 | 15 | 39 | 75 | Yes | Yes | Yes |
| | | | | | V99V99.G99G99. | P99P99.A92B00. | M99M99.C92B00. | | | | | | | |
| | | | | | C99C99.W99W99. | I99I99. | C99C99.H99H99. | | | | | | | |
| | | | | | T99T99. | | C99C99.M99M99. | | | | | | | |
| | | | | | | | P99P99.A92B00. | | | | | | | |
| | | | | | | | R99R99.C99C99. | | | | | | | |
| | | | | | | | F99F99. | | | | | | | |
| 624 | 14 | FDLSWVQ | ALSAH | ILASGAGVS | F99F99.D99D99. | A99A99.L99L99. | I99I99.L99L99. | 21 | 15 | 27 | 63 | Yes | Yes | Yes |
| | | | | | L99L99.S99S99. | S99S99.A99A99. | A99A99.S99S99. | | | | | | | |
| | | | | | W99W99.V99V99. | H99H99. | G99G99.A99A99. | | | | | | | |
| | | | | | Q99Q99. | | G99G99.V99V99. | | | | | | | |
| | | | | | | | S99S99. | | | | | | | |
| 659 | 14 | CSVLRGT | VCAFWW | QHTCEL | C99C99.S99S99. | V99V99.C99C99. | Q99Q99.H99H99. | 21 | 15 | 18 | 54 | Yes | Yes | Yes |
| | | | | | V99V99.L99L99. | A92B00.F99F99. | T99T99.C99C99. | | | | | | | |
| | | | | | R99R99.G99G99. | W99W99. | E99E99.L99L99. | | | | | | | |
| | | | | | T99T99. | | | | | | | | | |
| 675 | 14 | RGFDWFQ | RPVRV | LSILPTSRVG | R99R99.G99G99. | R99R99.P99P99. | L99L99.S99S99. | 21 | 15 | 30 | 66 | Yes | Yes | Yes |
| | | | | | F99F99.D99D99. | V99V99.R99R99. | I99I99.L99L99. | | | | | | | |
| | | | | | W99W99.F99F99. | V99V99. | P99P99.T99T99. | | | | | | | |
| | | | | | Q99Q99. | | S99S99.R99R99. | | | | | | | |
| | | | | | | | V99V99.G99G99. | | | | | | | |
| 703 | 14 | LSCGIGS | KMFAV | SLCNRLEMYI | L85B00.S92B00. | K99K99.M99M99. | S99S99.L99L99. | 21 | 15 | 30 | 66 | Yes | Yes | Yes |
| | | | | | C99C99.G99G99. | F99F99.A99A99. | C99C99.N99N99. | | | | | | | |
| | | | | | I99I99.G99G99. | V99V99. | R99R99.L99L99. | | | | | | | |
| | | | | | S99S99. | | E99E99.M99M99. | | | | | | | |
| | | | | | | | Y99Y99.I99I99. | | | | | | | |
| 737 | 14 | GLRRMGG | WWDLF | VTWSVLGVL | G99G99.L99L99. | W99W99.W99W99. | V99V99.T99T99. | 21 | 15 | 27 | 63 | Yes | Yes | Yes |
| | | | | | R99R99.R99R99. | D99D99.L99L99. | W99W99.S99S99. | | | | | | | |
| | | | | | M99M99.G99G99. | F99F99. | V99V99.L99L99. | | | | | | | |
| | | | | | G99G99. | | G99G99.V99V99. | | | | | | | |
| | | | | | | | L99L99. | | | | | | | |
| 812 | 14 | NLR | RCMCF | LPLFAD | N99N99.L99L99. | R99R99.C99C99. | L99L99.P92B00. | 9 | 15 | 18 | 42 | Yes | Yes | Yes |
| | | | | | R99R99. | M99M99.C99C99. | L92B00.F92B00. | | | | | | | |
| | | | | | | F99F99. | A92B00.D92B00. | | | | | | | |
| 97 | 14 | KPGPMLY | RDPRG | IYWSSGRVC | K99K99.P99P99. | R99R99.D99D99. | I99I99.Y99Y99. | 21 | 15 | 27 | 63 | Yes | Yes | Yes |
| | | | | | G99G99.P99P99. | P99P99.R99R99. | W99W99.S99S99. | | | | | | | |
| | | | | | M99M99.L99L99. | G99G99. | S99S99.G99G99. | | | | | | | |
| | | | | | Y99Y99. | | R99R99.V99V99. | | | | | | | |
| | | | | | | | C99C99. | | | | | | | |
| 119 | 13 | AFGGVCW | WERGN | LLWLCPGSFGEYF | A99A99.F99F99. | W99W99.E99E99. | L99L99.L99L99. | 21 | 15 | 39 | 75 | Yes | Yes | Yes |
| | | | | | G99G99.G99G99. | R99R99.G99G99. | W99W99.L99L99. | | | | | | | |
| | | | | | V99V99.C99C99. | N99N99. | C99C99.P92B00. | | | | | | | |
| | | | | | W99W99. | | G99G99.S99S99. | | | | | | | |
| | | | | | | | F99F99.G99G99. | | | | | | | |
| | | | | | | | E99E99.Y99Y99. | | | | | | | |
| | | | | | | | F99F99. | | | | | | | |
| 194 | 13 | DCLIGGV | SGNGH | DSYARYIFPF | D99D99.C99C99. | S99S99.G99G99. | D99D99.S99S99. | 21 | 15 | 30 | 66 | Yes | Yes | Yes |
| | | | | | L99L99.I99I99. | N99N99.G99G99. | Y99Y99.A99A99. | | | | | | | |
| | | | | | G99G99.G99G99. | H99H99. | R99R99.Y99Y99. | | | | | | | |
| | | | | | V99V99. | | I99I99.F99F99. | | | | | | | |
| | | | | | | | P99P99.F99F99. | | | | | | | |
| 219 | 13 | VSHYWCR | RAASP | SYITHVDNC | V99V99.S99S99. | R99R99.A99A99. | S99S99.Y99Y99. | 21 | 15 | 30 | 66 | Yes | Yes | Yes |
| | | | | | H99H99.Y99Y99. | A99A99.S99S99. | I99I99.T99T99. | | | | | | | |
| | | | | | W99W99.C99C99. | P99P99. | H99H99.T99T99. | | | | | | | |
| | | | | | R99R99. | | V99V99.D99D99. | | | | | | | |
| | | | | | | | N99N99.C99C99. | | | | | | | |
| 251 | 13 | RLHEIFY | CYCAT | AASHHGLNII | R99R99.L99L99. | C99C99.Y99Y99. | A99A99.A99A99. | 21 | 15 | 30 | 66 | Yes | Yes | Yes |
| | | | | | H99H99.E99E99. | C99C99.A99A99. | S99S99.H99H99. | | | | | | | |
| | | | | | I99I99.F99F99. | T99T99. | H99H99.G99G99. | | | | | | | |
| | | | | | Y99Y99. | | L99L99.N99N99. | | | | | | | |
| | | | | | | | I99I99.I99I99. | | | | | | | |
| 305 | 13 | PMLCGFP | FDGLF | FTISYPGYFR | P99P99.M99M99. | F99F99.D99D99. | F99F99.T99T99. | 21 | 15 | 30 | 66 | Yes | Yes | Yes |
| | | | | | L99L99.C99C99. | G99G99.L99L99. | I99I99.S99S99. | | | | | | | |
| | | | | | G99G99.F99F99. | F99F99. | Y99Y99.P99P99. | | | | | | | |
| | | | | | P99P99. | | G99G99.Y99Y99. | | | | | | | |
| | | | | | | | F99F99.R99R99. | | | | | | | |
| 310 | 13 | FIRNCML | TGNRT | IVFNYNNCVD | F99F99.I99I99. | T99T99.G99G99. | I99I99.V99V99. | 21 | 15 | 30 | 66 | Yes | Yes | Yes |
| | | | | | R99R99.N99N99. | N99N99.R99R99. | F99F99.N99N99. | | | | | | | |
| | | | | | C99C99.M99M99. | T99T99. | Y99Y99.N99N99. | | | | | | | |
| | | | | | L99L99. | | N99N99.C99C99. | | | | | | | |
| | | | | | | | V99V99.D99D99. | | | | | | | |
| 342 | 13 | PVLRVTF | SGEYL | VMLDKQMHTC | P99P99.V99V99. | S99S99.G99G99. | V99V99.M99M99. | 21 | 15 | 30 | 66 | Yes | Yes | Yes |
| | | | | | L99L99.R99R99. | E99E99.Y99Y99. | L99L99.D99D99. | | | | | | | |
| | | | | | V99V99.T99T99. | L99L99. | K99K99.Q99Q99. | | | | | | | |
| | | | | | F99F99. | | M99M99.H99H99. | | | | | | | |
| | | | | | | | T92B00.C99C99. | | | | | | | |
| 346 | 13 | VARFRGT | IISPA | LAYPVESCFD | V99V99.A99A99. | I99I99.I99I99. | L99L99.A99A99. | 21 | 15 | 30 | 66 | Yes | Yes | Yes |
| | | | | | R99R99.F99F99. | S99S99.P99P99. | Y99Y99.P99P99. | | | | | | | |
| | | | | | R99R99.G99G99. | A99A99. | V99V99.E99E99. | | | | | | | |
| | | | | | T92B00. | | S99S99.C99C99. | | | | | | | |
| | | | | | | | F99F99.D99D99. | | | | | | | |
| 361 | 13 | DVDHVFV | SYVER | NIFRDDCNR | D99D99.V99V99. | S99S99.Y99Y99. | N99N99.I99I99. | 21 | 15 | 27 | 63 | Yes | Yes | Yes |
| | | | | | D99D99.H99H99. | V99V99.E99E99. | F99F99.R99R99. | | | | | | | |
| | | | | | V99V99.F99F99. | R99R99. | D99D99.D99D99. | | | | | | | |
| | | | | | V99V99. | | C99C99.N99N99. | | | | | | | |
| | | | | | | | R99R99. | | | | | | | |
| 390 | 13 | ILGILAY | FAPDA | LSRFSH | I99I99.L99L99. | F99F99.A99A99. | L99L99.S99S99. | 21 | 15 | 18 | 54 | Yes | Yes | Yes |
| | | | | | G99G99.I99I99. | P99P99.D99D99. | R99R99.F99F99. | | | | | | | |
| | | | | | L99L99.A99A99. | A99A99. | S99S99.H99H99. | | | | | | | |
| | | | | | Y99Y99. | | | | | | | | | |
| 405 | 13 | PGRRTIS | CLDWC | TTLFTDCRCQ | P99P99.G92B00. | C99C99.L99L99. | T99T99.T99T99. | 21 | 15 | 30 | 66 | Yes | Yes | Yes |
| | | | | | R99R99.R99R99. | D99D99.W99W99. | L99L99.F99F99. | | | | | | | |
| | | | | | T99T99.I99I99. | C99C99. | T99T99.D99D99. | | | | | | | |
| | | | | | S92B00. | | C99C99.R99R99. | | | | | | | |
| | | | | | | | C99C99.Q99Q99. | | | | | | | |
| 430 | 13 | INACYEH | PIPV | YKLKQS | I99I99.N92B00. | P99P99.I99I99. | Y76B00.K53B00. | 21 | 15 | 12 | 48 | Yes | Yes | Yes |
| | | | | | A99A99.C99C99. | A99A99.P99P99. | L76B00.K53B00. | | | | | | | |
| | | | | | Y99Y99.E99E99. | V99V99. | Q53B00.S53B00. | | | | | | | |
| | | | | | H84B00. | | | | | | | | | |
| 482 | 13 | GDSLFGV | KATAR | ASSFEVCMAMGLC | G99G99.D99D99. | K99K99.A99A99. | A99A99.S99S99. | 21 | 15 | 39 | 75 | Yes | Yes | Yes |
| | | | | | S99S99.L99L99. | T99T99.A99A99. | S99S99.F99F99. | | | | | | | |
| | | | | | F99F99.G99G99. | R99R99. | E99E99.V99V99. | | | | | | | |
| | | | | | V99V99. | | C99C99.M99M99. | | | | | | | |
| | | | | | | | A99A99.M99M99. | | | | | | | |
| | | | | | | | G99G99.L99L99. | | | | | | | |
| | | | | | | | C99C99. | | | | | | | |
| 503 | 13 | DEFRRSG | CLMEY | NSGYGY | D99D99.E99E99. | C99C99.L99L99. | N99N99.S99S99. | 21 | 15 | 18 | 54 | Yes | Yes | Yes |
| | | | | | F99F99.R99R99. | M99M99.E99E99. | G99G99.Y99Y99. | | | | | | | |
| | | | | | R99R99.S99S99. | Y99Y99. | G99G99.Y99Y99. | | | | | | | |
| | | | | | G99G99. | | | | | | | | | |
| 504 | 13 | TRDCGAS | PVFAC | YFSLEC | T99T99.R99R99. | P99P99.V99V99. | Y99Y99.F99F99. | 21 | 15 | 18 | 54 | Yes | Yes | Yes |
| | | | | | D99D99.C99C99. | F99F99.A99A99. | S99S99.L99L99. | | | | | | | |
| | | | | | G99G99.A99A99. | C99C99. | E99E99.C99C99. | | | | | | | |
| | | | | | S99S99. | | | | | | | | | |
| 543 | 13 | NLDSIVF | IACGP | MKYHKSGDMV | N99N99.L99L99. | I99I99.A99A99. | M99M99.K99K99. | 21 | 15 | 30 | 66 | Yes | Yes | Yes |
| | | | | | D99D99.S99S99. | C99C99.G99G99. | Y99Y99.H99H99. | | | | | | | |
| | | | | | I99I99.V99V99. | P99P99. | K99K99.S99S99. | | | | | | | |
| | | | | | F99F99. | | G99G99.D99D99. | | | | | | | |
| | | | | | | | M99M99.V99V99. | | | | | | | |
| 554 | 13 | KRRVLVE | SWCGS | FYPIPNLVCA | K99K99.R99R99. | S99S99.W99W99. | F99F99.Y99Y99. | 21 | 15 | 30 | 66 | Yes | Yes | Yes |
| | | | | | R99R99.V92B00. | C99C99.G99G99. | P99P99.I99I99. | | | | | | | |
| | | | | | L99L99.V99V99. | S99S99. | P99P99.N99N99. | | | | | | | |
| | | | | | E99E99. | | L99L99.V99V99. | | | | | | | |
| | | | | | | | C99C99.A99A99. | | | | | | | |
| 57 | 13 | ARRCMLW | PNIDG | VLYVNGLAA | A99A99.R99R99. | P99P99.N99N99. | V99V99.L99L99. | 21 | 15 | 27 | 63 | Yes | Yes | Yes |
| | | | | | R99R99.C99C99. | I99I99.D99D99. | Y99Y99.V99V99. | | | | | | | |
| | | | | | M99M99.L99L99. | G99G99. | N99N99.G92B00. | | | | | | | |
| | | | | | W99W99. | | L99L99.A99A99. | | | | | | | |
| | | | | | | | A99A99. | | | | | | | |
| 636 | 13 | HVARVVF | ACQSL | IANGLTTRML | H99H99.V99V99. | A99A99.C99C99. | I99I99.A99A99. | 21 | 15 | 30 | 66 | Yes | Yes | Yes |
| | | | | | A99A99.R99R99. | Q99Q99.S99S99. | N99N99.G99G99. | | | | | | | |
| | | | | | V99V99.V99V99. | L99L99. | L99L99.T99T99. | | | | | | | |
| | | | | | F99F99. | | T99T99.R99R99. | | | | | | | |
| | | | | | | | M99M99.L99L99. | | | | | | | |
| 73 | 13 | SPFGGQ | SDYHV | LNSTCLGVRW | S99S99.I99I99. | S99S99.D99D99. | L99L99.N99N99. | 21 | 15 | 30 | 66 | Yes | Yes | Yes |
| | | | | | P99P99.F99F99. | Y99Y99.H99H99. | S99S99.T99T99. | | | | | | | |
| | | | | | G99G99.G99G99. | V99V99. | C99C99.L99L99. | | | | | | | |
| | | | | | Q99Q99. | | G99G99.V99V99. | | | | | | | |
| | | | | | | | R99R99.W99W99. | | | | | | | |
| 743 | 13 | CIVGYPC | YYILA | FASQWV | C99C99.I99I99. | Y99Y99.Y99Y99. | F99F99.A99A99. | 21 | 15 | 18 | 54 | Yes | Yes | Yes |
| | | | | | V99V99.G99G99. | I99I99.L99L99. | S99S99.Q99Q99. | | | | | | | |
| | | | | | Y99Y99.P99P99. | A99A99. | W99W99.V99V99. | | | | | | | |
| | | | | | C99C99. | | | | | | | | | |
| 759 | 13 | R | WVNGP | APWRVD | R99R99. | W99W99.V99V99. | A99A99.P99P99. | 3 | 15 | 18 | 36 | Yes | Yes | Yes |
| | | | | | | N99N99.G99G99. | W99W99.R92B00. | | | | | | | |
| | | | | | | P99P99. | V99V99.D99D99. | | | | | | | |
| 766 | 13 | TLTGVVY | VGSVE | ITFCLT | T99T99.L99L99. | V99V99.G99G99. | I99I99.T99T99. | 21 | 15 | 18 | 54 | Yes | Yes | Yes |
| | | | | | T99T99.G99G99. | S99S99.V99V99. | F99F99.C99C99. | | | | | | | |
| | | | | | V99V99.V99V99. | E99E99. | L99L99.T99T99. | | | | | | | |
| | | | | | Y99Y99. | | | | | | | | | |
| 774 | 13 | NRPHVCQ | ALGDF | LTTSPNRVFW | N99N99.R99R99. | A99A99.L99L99. | L99L99.T99T99. | 21 | 15 | 30 | 66 | Yes | Yes | Yes |
| | | | | | P99P99.H99H99. | G99G99.D99D99. | T99T99.S99S99. | | | | | | | |
| | | | | | V99V99.C99C99. | F99F99. | P99P99.N99N99. | | | | | | | |
| | | | | | Q99Q99. | | R99R99.V92B00. | | | | | | | |
| | | | | | | | F99F99.W99W99. | | | | | | | |
| 797 | 13 | VVDLLIS | KDLSA | PTRFGA | V99V99.V99V99. | K99K99.D99D99. | P99P99.T99T99. | 21 | 15 | 18 | 54 | Yes | Yes | Yes |
| | | | | | D99D99.L99L99. | L99L99.S99S99. | R99R99.F99F99. | | | | | | | |
| | | | | | L99L99.I99I99. | A99A99. | G99G99.A99A99. | | | | | | | |
| | | | | | S99S99. | | | | | | | | | |
| 800 | 13 | TQVRPAC | PLRGD | RIYIELMIYWGLV | T99T99.Q92B00. | P99P99.L99L99. | R99R99.I99I99. | 21 | 15 | 39 | 75 | Yes | Yes | Yes |
| | | | | | V99V99.R99R99. | R99R99.G99G99. | Y99Y99.I99I99. | | | | | | | |
| | | | | | P99P99.A99A99. | D99D99. | E99E99.L99L99. | | | | | | | |
| | | | | | C99C99. | | M99M99.I99I99. | | | | | | | |
| | | | | | | | Y99Y99.W99W99. | | | | | | | |
| | | | | | | | G99G99.L99L99. | | | | | | | |
| | | | | | | | V99V99. | | | | | | | |
| 809 | 13 | YHLEMSG | GSFLR | HPEGSW | Y99Y99.H92B00. | G99G99.S99S99. | H99H99.P99P99. | 21 | 15 | 18 | 54 | Yes | Yes | Yes |
| | | | | | L99L99.E99E99. | F99F99.L99L99. | E99E99.G99G99. | | | | | | | |
| | | | | | M99M99.S99S99. | R99R99. | S99S99.W99W99. | | | | | | | |
| | | | | | G99G99. | | | | | | | | | |
| 89 | 13 | FIDFGQS | SEGSR | VAFYSK | F99F99.I99I99. | S99S99.E99E99. | V99V99.A99A99. | 21 | 15 | 18 | 54 | Yes | Yes | Yes |
| | | | | | D99D99.F99F99. | G99G99.S99S99. | F99F99.Y99Y99. | | | | | | | |
| | | | | | G99G99.Q99Q99. | R99R99. | S99S99.K99K99. | | | | | | | |
| | | | | | S92B00. | | | | | | | | | |
| 143 | 12 | SGSVVFA | IRDPE | HVFRPSCYCGYVT | S99S99.G99G99. | I99I99.R99R99. | H91B00.V91B00. | 21 | 15 | 39 | 75 | Yes | Yes | Yes |
| | | | | | S99S99.V99V99. | D99D99.P99P99. | F91B00.R91B00. | | | | | | | |
| | | | | | V99V99.F99F99. | E99E99. | P91B00.S91B00. | | | | | | | |
| | | | | | A99A99. | | C91B00.Y91B00. | | | | | | | |
| | | | | | | | C91B00.G91B00. | | | | | | | |
| | | | | | | | Y91B00.V99V99. | | | | | | | |
| | | | | | | | T91B00. | | | | | | | |
| 193 | 12 | RILKCVF | VGGFY | YRLAEPYEECLME | R99R99.I99I99. | V99V99.G99G99. | B00 | 21 | 15 | 0 | 36 | Yes | Yes | Yes |
| | | | | | L99L99.K91B00. | G99G99.F99F99. | | | | | | | | |
| | | | | | C99C99.V99V99. | Y99Y99. | | | | | | | | |
| | | | | | F99F99. | | | | | | | | | |
| 224 | 12 | HCLEQS | SAQTH | RNWWIE | H99H99.C99C99. | S91B00.A99A99. | R58A41.N58D41. | 18 | 15 | 13 | 46 | Yes | Yes | Yes |
| | | | | | L99L99.E99E99. | Q99Q99.T99T99. | W58S41.W99W99. | | | | | | | |
| | | | | | Q99Q99.S99S99. | H99H99. | I58A41.E58R41. | | | | | | | |
| 238 | 12 | YFSGCVF | FGNNG | AIFKHCSEVS | Y99Y99.F99F99. | F99F99.G99G99. | A99A99.I99I99. | 21 | 15 | 30 | 66 | Yes | Yes | Yes |
| | | | | | S99S99.G99G99. | N99N99.N99N99. | F99F99.K99K99. | | | | | | | |
| | | | | | C99C99.V99V99. | G99G99. | H99H99.C99C99. | | | | | | | |
| | | | | | F99F99. | | S99S99.E99E99. | | | | | | | |
| | | | | | | | V99V99.S99S99. | | | | | | | |
| 268 | 12 | APTGLVY | PMYSL | CLFRNSSVA | A99A99.P99P99. | P99P99.M99M99. | C58A41.L58Y41. | 21 | 15 | 18 | 54 | Yes | Yes | Yes |
| | | | | | T99T99.G99G99. | Y99Y99.S99S99. | F58M41.R58T41. | | | | | | | |
| | | | | | L99L99.V99V99. | L99L99. | N58P41.S58T41. | | | | | | | |
| | | | | | Y99Y99. | | S58G41.V58G41. | | | | | | | |
| | | | | | | | A58V41. | | | | | | | |
| 284 | 12 | VVSLLIW | LSLSR | MTRFGW | V99V99.V99V99. | L99L99.S99S99. | M99M99.T99T99. | 21 | 15 | 18 | 54 | Yes | Yes | Yes |
| | | | | | S99S99.L99L99. | L99L99.S99S99. | R99R99.F99F99. | | | | | | | |
| | | | | | L99L99.I99I99. | R99R99. | G99G99.W99W99. | | | | | | | |
| | | | | | W99W99. | | | | | | | | | |
| 299 | 12 | ALGDRIY | SADSA | AFFNWNDIY | A99A99.L99L99. | S99S99.A99A99. | A99A99.F99F99. | 21 | 15 | 27 | 63 | Yes | Yes | Yes |
| | | | | | D91B00.G99G99. | D99D99.A99A99. | F99F99.N99N99. | | | | | | | |
| | | | | | R99R99.I99I99. | S99S99. | W99W99.N99N99. | | | | | | | |
| | | | | | Y91B00. | | D99D99.I99I99. | | | | | | | |
| | | | | | | | Y99Y99. | | | | | | | |
| 307 | 12 | RVKRLIFLIF | RSGEF | FSLIHHSCCN | R99R99.V99V99. | R99R99.S99S99. | F50I41.S91B00. | 21 | 15 | 15 | 51 | Yes | Yes | Yes |
| | | | | | K99K99.R99R99. | G99G99.E99E99. | L91B00.I50B00. | | | | | | | |
| | | | | | L99L99.I99I99. | F99F99. | H50B00.H58B00. | | | | | | | |
| | | | | | F99F99. | | S50G41.C50B00. | | | | | | | |
| | | | | | | | C50B00.N50B00. | | | | | | | |
| 321 | 12 | ILKCRVF | CHD | AFYHNESQCL | I99I99.L91B00. | C99C99.H99H99. | A99A99.F99F99. | 21 | 9 | 30 | 60 | Yes | Yes | Yes |
| | | | | | K99K99.C99C99. | D99D99. | Y99Y99.H99H99. | | | | | | | |
| | | | | | R99R99.V99V99. | | N99N99.E99E99. | | | | | | | |
| | | | | | F99F99. | | S99S99.Q99Q99. | | | | | | | |
| | | | | | | | C99C99.L99L99. | | | | | | | |
| 326 | 12 | FISSCSS | QAVSV | IRYISCPGGELL | F99F99.I99I99. | Q99Q99.A99A99. | I99I99.R99R99. | 21 | 15 | 39 | 75 | Yes | Yes | Yes |
| | | | | | S99S99.S99S99. | V99V99.S91B00. | Y99Y99.I99I99. | | | | | | | |
| | | | | | C99C99.V99V99. | V99V99. | S99S99.C91B00. | | | | | | | |
| | | | | | F99F99. | | S99S99.P99P99. | | | | | | | |
| | | | | | | | G91B00.G99G99. | | | | | | | |
| | | | | | | | E99E99.L99L99. | | | | | | | |
| | | | | | | | L99L99. | | | | | | | |
| 370 | 12 | GHSGTPS | PSAG | WSTFLG | G99G99.H91B00. | P99P99.S99S99. | W99W99.S99S99. | 21 | 12 | 18 | 51 | Yes | Yes | Yes |
| | | | | | S99S99.G99G99. | A99A99.G99G99. | T99T99.F99F99. | | | | | | | |
| | | | | | T99T99.P99P99. | | L99L99.G99G99. | | | | | | | |
| | | | | | S99S99. | | | | | | | | | |
| 373 | 12 | AVAGHGG | YWSDK | FVSCAD | A99A99.V99V99. | Y99Y99.W99W99. | F99F99.V99V99. | 21 | 15 | 18 | 54 | Yes | Yes | Yes |
| | | | | | A99A99.G99G99. | S99S99.D99D99. | S99S99.C99C99. | | | | | | | |
| | | | | | H99H99.G99G99. | K99K99. | A99A99.D99D99. | | | | | | | |
| | | | | | G99G99. | | | | | | | | | |
| 395 | 12 | FTHEMWR | RSLQF | LYAPH | F99F99.T99T99. | R99R99.S99S99. | L99L99.Y99Y99. | 21 | 15 | 15 | 51 | Yes | Yes | Yes |
| | | | | | H99H99.E99E99. | L99L99.Q99Q99. | A99A99.P99P99. | | | | | | | |
| | | | | | M99M99.W99W99. | F99F99. | H99H99. | | | | | | | |
| | | | | | R99R99. | | | | | | | | | |
| 398 | 12 | LRLRMYG | FHTQA | SVCFSF | L99L99.R99R99. | F99F99.H99H99. | S99S99.V99V99. | 21 | 15 | 18 | 54 | Yes | Yes | Yes |
| | | | | | L99L99.R99R99. | T99T99.Q99Q99. | C99C99.F99F99. | | | | | | | |
| | | | | | M99M99.Y99Y99. | A99A99. | S99S99.F99F99. | | | | | | | |
| | | | | | G99G99. | | | | | | | | | |
| 410 | 12 | RCHGSVQ | DVGAW | LHPIRYYISW | R83B00.C83B00. | D83B00.V99V99. | L99L99.H83B00. | 20 | 15 | 30 | 65 | Yes | Yes | Yes |
| | | | | | H83B00.G83B00. | G99G99.A83B00. | P99P99.I83B00. | | | | | | | |
| | | | | | S83B00.V75B00. | W99W99. | R83B00.Y99Y99. | | | | | | | |
| | | | | | Q83B00. | | Y91B00.I83B00. | | | | | | | |
| | | | | | | | S99S99.W99W99. | | | | | | | |
| 421 | 12 | YLCRCTF | TAASC | AHLNLDSSLL | Y99Y99.L99L99. | T99T99.A99A99. | A99A99.H99H99. | 21 | 15 | 30 | 66 | Yes | Yes | Yes |
| | | | | | C99C99.R99R99. | A99A99.S99S99. | L99L99.N99N99. | | | | | | | |
| | | | | | C99C99.T99T99. | C99C99. | L99L99.D99D99. | | | | | | | |
| | | | | | F99F99. | | S99S99.S99S99. | | | | | | | |
| | | | | | | | L99L99.L99L99. | | | | | | | |
| 437 | 12 | VGHVLSA | FNHAY | TTVAMYCRR | V99V99.G99G99. | F91B00.N99N99. | T99T99.T99T99. | 21 | 15 | 27 | 63 | Yes | Yes | Yes |
| | | | | | H99H99.V99V99. | H99H99.A99A99. | V99V99.A99A99. | | | | | | | |
| | | | | | L99L99.S99S99. | Y99Y99. | M99M99.Y99Y99. | | | | | | | |
| | | | | | A99A99. | | C99C99.R99R99. | | | | | | | |
| | | | | | | | R99R99. | | | | | | | |
| 509 | 12 | VTGSSND | CYGIS | H | V99V99.T99T99. | C99C99.Y99Y99. | H99H99. | 21 | 15 | 3 | 39 | Yes | Yes | Yes |
| | | | | | G99G99.S99S99. | G99G99.I99I99. | | | | | | | | |
| | | | | | S99S99.N99N99. | S99S99. | | | | | | | | |
| | | | | | D99D99. | | | | | | | | | |
| 53 | 12 | PLVCWHD | RVAFE | GHNSALGRS | P99P99.L99L99. | R99R99.V99V99. | G99G99.H99H99. | 21 | 15 | 27 | 63 | Yes | Yes | Yes |
| | | | | | V99V99.C99C99. | A99A99.F99F99. | N99N99.S99S99. | | | | | | | |
| | | | | | W99W99.H99H99. | E99E99. | A99A99.L99L99. | | | | | | | |
| | | | | | D99D99. | | G99G99.R99R99. | | | | | | | |
| | | | | | | | S99S99. | | | | | | | |
| 530 | 12 | YFERIVF | RDWNI | AQFQNNLCLQ | Y99Y99.F99F99. | R66B00.D66B00. | B00B00.B00B00. | 18 | 10 | 15 | 43 | Yes | Yes | Yes |
| | | | | | E66B00.R99R99. | W66B00.N66B00. | L66B00.B00B00. | | | | | | | |
| | | | | | I66B00.V99V99. | I66B00. | H66B00.T66B00. | | | | | | | |
| | | | | | F66B00. | | L66B00.B00B00. | | | | | | | |
| | | | | | | | V66B00.B00B00. | | | | | | | |
| 610 | 12 | CIMSLVW | ESHDC | LISTSSDASY | C99C99.I99I99. | E99E99.S99S99. | L99L99.I91B00. | 21 | 15 | 30 | 66 | Yes | Yes | Yes |
| | | | | | M99M99.S99S99. | H99H99.D99D99. | S99S99.T99T99. | | | | | | | |
| | | | | | L99L99.V99V99. | C99C99. | S99S99.S99S99. | | | | | | | |
| | | | | | W99W99. | | D99D99.A99A99. | | | | | | | |
| | | | | | | | S99S99.Y99Y99. | | | | | | | |
| 626 | 12 | VVALIMS | MLTGH | PTRYMH | V99V99.V99V99. | M99M99.L99L99. | P99P99.T99T99. | 21 | 15 | 18 | 54 | Yes | Yes | Yes |
| | | | | | A99A99.L99L99. | T99T99.G99G99. | R99R99.Y99Y99. | | | | | | | |
| | | | | | I99I99.M99M99. | H99H99. | M99M99.H99H99. | | | | | | | |
| | | | | | S99S99. | | | | | | | | | |
| 632 | 12 | SMKVVLL | PNRGF | ITYYEDLVA | S99S99.M99M99. | P99P99.N99N99. | I99I99.T99T99. | 21 | 15 | 27 | 63 | Yes | Yes | Yes |
| | | | | | K99K99.V99V99. | R99R99.G99G99. | Y99Y99.Y99Y99. | | | | | | | |
| | | | | | V99V99.L99L99. | F99F99. | E99E99.D91B00. | | | | | | | |
| | | | | | L99L99. | | L99L99.V99V99. | | | | | | | |
| | | | | | | | A99A99. | | | | | | | |
| 635 | 12 | GPGYVVW | RAEGV | VIYTGVEVM | G99G99.P99P99. | R99R99.A99A99. | V99V99.I99I99. | 21 | 15 | 27 | 63 | Yes | Yes | Yes |
| | | | | | G99G99.Y99Y99. | E99E99.G99G99. | Y99Y99.T99T99. | | | | | | | |
| | | | | | V99V99.V99V99. | V99V99. | G99G99.V99V99. | | | | | | | |
| | | | | | W99W99. | | E99E99.V99V99. | | | | | | | |
| | | | | | | | M99M99. | | | | | | | |
| 644 | 12 | SCVSVRF | HGQDV | LIYDKSSLGL | S99S99.C99C99. | H99H99.G99G99. | L99L99.I99I99. | 21 | 15 | 30 | 66 | Yes | Yes | Yes |
| | | | | | V99V99.S99S99. | Q99Q99.D99D99. | Y99Y99.D99D99. | | | | | | | |
| | | | | | V99V99.R99R99. | V99V99. | K99K99.S99S99. | | | | | | | |
| | | | | | F99F99. | | S99S99.L99L99. | | | | | | | |
| | | | | | | | G99G99.L99L99. | | | | | | | |
| 656 | 12 | WPCFTRY | AHSMD | PHCTSTNGFVIVS | W99W99.P99P99. | A99A99.H99H99. | P99P99.H99H99. | 21 | 15 | 39 | 75 | Yes | Yes | Yes |
| | | | | | C99C99.F99F99. | S99S99.M99M99. | C99C99.T99T99. | | | | | | | |
| | | | | | T99T99.R99R99. | D99D99. | S99S99.T99T99. | | | | | | | |
| | | | | | Y99Y99. | | N99N99.G99G99. | | | | | | | |
| | | | | | | | F99F99.V99V99. | | | | | | | |
| | | | | | | | I99I99.V99V99. | | | | | | | |
| | | | | | | | S99S99. | | | | | | | |
| 725 | 12 | SLRAKVY | NDFRD | VTFNLN | S99S99.L99L99. | N99N99.D99D99. | B00 | 21 | 15 | 0 | 36 | Yes | Yes | Yes |
| | | | | | R99R99.A99A99. | F99F99.R99R99. | | | | | | | | |
| | | | | | K91B00.V99V99. | D99D99. | | | | | | | | |
| | | | | | Y99Y99. | | | | | | | | | |
| 731 | 12 | CWVGACM | CSGDW | SLINLRLEVV | C99C99.W99W99. | C99C99.S99S99. | S99S99.L99L99. | 21 | 15 | 30 | 66 | Yes | Yes | Yes |
| | | | | | V99V99.G99G99. | G99G99.D99D99. | I99I99.N99N99. | | | | | | | |
| | | | | | A99A99.C99C99. | W99W99. | L99L99.R99R99. | | | | | | | |
| | | | | | M99M99. | | L99L99.E99E99. | | | | | | | |
| | | | | | | | V99V99.V99V99. | | | | | | | |
| 828 | 12 | AARRLVF | MDNVV | VQFNGTAVA | A99A99.A99A99. | M99M99.D99D99. | V99V99.Q99Q99. | 21 | 15 | 27 | 63 | Yes | Yes | Yes |
| | | | | | R99R99.R99R99. | N99N99.V99V99. | F99F99.N99N99. | | | | | | | |
| | | | | | L99L99.V99V99. | V99V99. | G99G99.T99T99. | | | | | | | |
| | | | | | F99F99. | | A99A99.V99V99. | | | | | | | |
| | | | | | | | A99A99. | | | | | | | |
| 879 | 12 | PRDFVRV | VFAGN | YSPCCS | P99P99.R99R99. | V99V99.F99F99. | B00 | 21 | 15 | 0 | 36 | Yes | Yes | Yes |
| | | | | | D99D99.F99F99. | A99A99.G99G99. | | | | | | | | |
| | | | | | V99V99.R99R99. | N99N99. | | | | | | | | |
| | | | | | V99V99. | | | | | | | | | |
| 178 | 11 | SSNCWVL | RVNDV | ISDIGV | S99S99.S99S99. | R99R99.V99V99. | I99I99.S99S99. | 21 | 15 | 18 | 54 | Yes | Yes | Yes |
| | | | | | N99N99.C99C99. | N99N99.D99D99. | D99D99.I99I99. | | | | | | | |
| | | | | | W99W99.V99V99. | V99V99. | G99G99.V99V99. | | | | | | | |
| | | | | | L99L99. | | | | | | | | | |
| 186 | 11 | SVVDPQL | SWPSQ | HCWSGGIRC | S99S99.V99V99. | S99S99.W99W99. | H99H99.C99C99. | 21 | 15 | 27 | 63 | Yes | Yes | Yes |
| | | | | | V99V99.D99D99. | P99P99.S99S99. | W99W99.S99S99. | | | | | | | |
| | | | | | P99P99.Q99Q99. | Q99Q99. | G99G99.G99G99. | | | | | | | |
| | | | | | L99L99. | | I99I99.R99R99. | | | | | | | |
| | | | | | | | C99C99. | | | | | | | |
| 203 | 11 | HSLPGVI | LGGVA | FQCLACEFS | H81B00.S81B00. | L99L99.G99G99. | F90B00.Q99Q99. | 21 | 15 | 27 | 63 | Yes | Yes | Yes |
| | | | | | L81B00.P81B00. | G99G99.V99V99. | C99C99.L99L99. | | | | | | | |
| | | | | | G81B00.V81B00. | A99A99. | A99A99.C99C99. | | | | | | | |
| | | | | | I81B00. | | E99E99.F99F99. | | | | | | | |
| | | | | | | | S99S99. | | | | | | | |
| 208 | 11 | IFNKVVF | PDVSL | AVLNSDALVT | I99I99.F99F99. | P99P99.D99D99. | A99A99.V54Y45. | 21 | 15 | 23 | 59 | Yes | Yes | Yes |
| | | | | | N99N99.K99K99. | V99V99.S99S99. | L54Y45.N54H45. | | | | | | | |
| | | | | | V99V99.V99V99. | L99L99. | S54A45.D54A45. | | | | | | | |
| | | | | | F99F99. | | A54N45.L99L99. | | | | | | | |
| | | | | | | | V90B00.T54L45. | | | | | | | |
| 263 | 11 | PVEFWYW | SMSLA | VSDY | P99P99.V99V99. | S99S99.M99M99. | B00 | 21 | 15 | 0 | 36 | Yes | Yes | Yes |
| | | | | | E99E99.F99F99. | S99S99.L99L99. | | | | | | | | |
| | | | | | W99W99.Y99Y99. | A99A99. | | | | | | | | |
| | | | | | W99W99. | | | | | | | | | |
| 334 | 11 | FEQFDWR | SAYST | GTFLEDYFYR | F99F99.E99E99. | S99S99.A99A99. | G99G99.T99T99. | 21 | 15 | 30 | 66 | Yes | Yes | Yes |
| | | | | | Q99Q99.F99F99. | Y99Y99.S99S99. | F99F99.L99L99. | | | | | | | |
| | | | | | D99D99.W99W99. | T99T99. | E99E99.D99D99. | | | | | | | |
| | | | | | R99R99. | | Y99Y99.F99F99. | | | | | | | |
| | | | | | | | Y99Y99.R99R99. | | | | | | | |
| 386 | 11 | FASLSDLCF | CLGW | YSHDLNSVVR | F99F99.A90B00. | C99C99.L99L99. | Y99Y99.S81B00. | 21 | 12 | 30 | 63 | Yes | Yes | Yes |
| | | | | | S99S99.D99D99. | G99G99.W99W99. | H81B00.D81B00. | | | | | | | |
| | | | | | L99L99.C99C99. | | L81B00.N81B00. | | | | | | | |
| | | | | | F99F99. | | S81B00.V99V99. | | | | | | | |
| | | | | | | | V81B00.R81B00. | | | | | | | |
| 391 | 11 | ALSCGVF | GLGVD | AFFSSTGTVE | A99A99.L99L99. | G99G99.L99L99. | A99A99.F99F99. | 21 | 15 | 30 | 66 | Yes | Yes | Yes |
| | | | | | S99S99.C99C99. | G99G99.V99V99. | F99F99.S90B00. | | | | | | | |
| | | | | | G99G99.V99V99. | D99D99. | S99S99.T90B00. | | | | | | | |
| | | | | | F99F99. | | G90B00.T90B00. | | | | | | | |
| | | | | | | | V90B00.E90B00. | | | | | | | |
| 409 | 11 | DGRRVVY | VDGYC | AAYLAGGVS | D99D99.G99G99. | V99V99.D99D99. | A99A99.A99A99. | 21 | 15 | 27 | 63 | Yes | Yes | Yes |
| | | | | | R99R99.R99R99. | G99G99.Y99Y99. | Y99Y99.L99L99. | | | | | | | |
| | | | | | V99V99.V99V99. | C99C99. | A99A99.G99G99. | | | | | | | |
| | | | | | Y99Y99. | | G99G99.V99V99. | | | | | | | |
| | | | | | | | S99S99. | | | | | | | |
| 426 | 11 | RADIYWM | WRTSD | VYLAGGVGY | R99R99.A99A99. | W99W99.R99R99. | V99V99.Y99Y99. | 21 | 15 | 27 | 63 | Yes | Yes | Yes |
| | | | | | D90B00.I99I99. | T99T99.S99S99. | L99L99.A99A99. | | | | | | | |
| | | | | | Y99Y99.W99W99. | D90B00. | G99G99.G99G99. | | | | | | | |
| | | | | | M99M99. | | V99V99.G99G99. | | | | | | | |
| | | | | | | | Y99Y99. | | | | | | | |
| 428 | 11 | HARCSVI | LAESV | VLPAMRLRY | H99H99.A99A99. | L99L99.A99A99. | V99V99.L99L99. | 21 | 15 | 27 | 63 | Yes | Yes | Yes |
| | | | | | R99R99.C99C99. | E99E99.S99S99. | P99P99.A99A99. | | | | | | | |
| | | | | | S99S99.V99V99. | V99V99. | M99M99.R99R99. | | | | | | | |
| | | | | | I90B00. | | L99L99.R99R99. | | | | | | | |
| | | | | | | | Y99Y99. | | | | | | | |
| 443 | 11 | GLHLALT | QVLKV | QILSHFDIVS | G99G99.L99L99. | Q99Q99.V99V99. | Q99Q99.I99I99. | 21 | 15 | 30 | 66 | Yes | Yes | Yes |
| | | | | | H99H99.L99L99. | L99L99.K99K99. | L99L99.S99S99. | | | | | | | |
| | | | | | A99A99.L90B00. | V99V99. | H99H99.F99F99. | | | | | | | |
| | | | | | T90B00. | | D99D99.I99I99. | | | | | | | |
| | | | | | | | V99V99.S99S99. | | | | | | | |
| 499 | 11 | NDLRCLI | MIGNT | VDGFW | N99N99.D99D99. | M99M99.I99I99. | V99V99.D99D99. | 21 | 15 | 15 | 51 | Yes | Yes | Yes |
| | | | | | L99L99.R99R99. | G99G99.N99N99. | G99G99.F99F99. | | | | | | | |
| | | | | | C99C99.L99L99. | T99T99. | W99W99. | | | | | | | |
| | | | | | I99I99. | | | | | | | | | |
| 523 | 11 | KWLVY | YHHAG | AFWTTGDRVE | K99K99.W99W99. | Y99Y99.H99H99. | A99A99.F99F99. | 15 | 15 | 30 | 60 | Yes | Yes | Yes |
| | | | | | L99L99.V99V99. | H99H99.A99A99. | W99W99.T99T99. | | | | | | | |
| | | | | | Y99Y99. | G99G99. | T99T99.G99G99. | | | | | | | |
| | | | | | | | D99D99.R99R99. | | | | | | | |
| | | | | | | | V99V99.E99E99. | | | | | | | |
| 525 | 11 | GHTCGSR | FRPPH | LVVPYY | G99G99.H90B00. | F99F99.R99R99. | L99L99.V99V99. | 21 | 15 | 18 | 54 | Yes | Yes | Yes |
| | | | | | T99T99.C99C99. | P99P99.P99P99. | V99V99.P99P99. | | | | | | | |
| | | | | | G99G99.S99S99. | H99H99. | Y99Y99.Y99Y99. | | | | | | | |
| | | | | | R99R99. | | | | | | | | | |
| 536 | 11 | DYLYVYA | RMSDS | VINIRC | D99D99.Y99Y99. | R99R99.M99M99. | V99V99.I99I99. | 21 | 15 | 18 | 54 | Yes | Yes | Yes |
| | | | | | L99L99.Y99Y99. | S99S99.D99D99. | N99N99.I99I99. | | | | | | | |
| | | | | | V99V99.Y99Y99. | S99S99. | R99R99.C99C99. | | | | | | | |
| | | | | | A99A99. | | | | | | | | | |
| 539 | 11 | ICCCYET | ATRPE | NIRGFS | I99I99.C99C99. | A99A99.T99T99. | B00 | 21 | 15 | 0 | 36 | Yes | Yes | Yes |
| | | | | | C99C99.C99C99. | R99R99.P99P99. | | | | | | | | |
| | | | | | Y99Y99.E99E99. | E99E99. | | | | | | | | |
| | | | | | T99T99. | | | | | | | | | |
| 593 | 11 | VVGVVLG | LSHES | YSRFLH | V99V99.V99V99. | L99L99.S99S99. | Y99Y99.S99S99. | 21 | 15 | 18 | 54 | Yes | Yes | Yes |
| | | | | | G99G99.V99V99. | H99H99.E99E99. | R99R99.F99F99. | | | | | | | |
| | | | | | V99V99.L99L99. | S99S99. | L99L99.H99H99. | | | | | | | |
| | | | | | G99G99. | | | | | | | | | |
| 598 | 11 | TRTVNVC | GWDEI | HVLPLVGLGVRA | T99T99.R99R99. | G99G99.W99W99. | H99H99.V99V99. | 21 | 15 | 39 | 75 | Yes | Yes | Yes |
| | | | | | T99T99.V99V99. | D99D99.E99E99. | L99L99.I99I99. | | | | | | | |
| | | | | | N99N99.V99V99. | I99I99. | P99P99.L99L99. | | | | | | | |
| | | | | | C99C99. | | V99V99.G99G99. | | | | | | | |
| | | | | | | | L99L99.G99G99. | | | | | | | |
| | | | | | | | V99V99.R99R99. | | | | | | | |
| | | | | | | | A99A99. | | | | | | | |
| 655 | 11 | R | PHNLG | IEPAVEFFKF | B00 | P99P99.H99H99. | I99I99.E99E99. | 0 | 15 | 30 | 45 | Yes | Yes | Yes |
| | | | | | | N99N99.L99L99. | P99P99.A99A99. | | | | | | | |
| | | | | | | G99G99. | V99V99.E99E99. | | | | | | | |
| | | | | | | | F99F99.F99F99. | | | | | | | |
| | | | | | | | K99K99.F99F99. | | | | | | | |
| 690 | 11 | WR | MSCVC | LRIGENCEVH | W99W99.R99R99. | M99M99.S99S99. | L99L99.R99R99. | 6 | 15 | 30 | 51 | Yes | Yes | Yes |
| | | | | | | C99C99.V99V99. | I99I99.G99G99. | | | | | | | |
| | | | | | | C90B00. | E99E99.N99N99. | | | | | | | |
| | | | | | | | C99C99.E99E99. | | | | | | | |
| | | | | | | | V99V99.H99H99. | | | | | | | |
| 695 | 11 | FHVGSNV | GYVGD | LATRPNCPSN | F99F99.H99H99. | G99G99.Y99Y99. | L90B00.A90B00. | 21 | 15 | 30 | 66 | Yes | Yes | Yes |
| | | | | | V99V99.G99G99. | V99V99.G99G99. | T90B00.R90B00. | | | | | | | |
| | | | | | S99S99.N90B00. | D99D99. | P90B00.N90B00. | | | | | | | |
| | | | | | V99V99. | | C90B00.P90B00. | | | | | | | |
| | | | | | | | S90B00.N90B00. | | | | | | | |
| 710 | 11 | STSYYTY | HCFNS | ISGDFGY | S90B00.T99T99. | H99H99.C99C99. | I99I99.S99S99. | 21 | 15 | 21 | 57 | Yes | Yes | Yes |
| | | | | | S99S99.Y99Y99. | F99F99.N99N99. | G99G99.D99D99. | | | | | | | |
| | | | | | Y99Y99.T99T99. | S99S99. | F99F99.G99G99. | | | | | | | |
| | | | | | Y99Y99. | | Y99Y99. | | | | | | | |
| 714 | 11 | RCHRRVY | SPGSG | ATMADDHLVS | R99R99.C99C99. | S99S99.P99P99. | A99A99.T99T99. | 21 | 15 | 30 | 66 | Yes | Yes | Yes |
| | | | | | H99H99.R99R99. | G99G99.S99S99. | M99M99.A99A99. | | | | | | | |
| | | | | | R99R99.V90B00. | G99G99. | D99D99.D99D99. | | | | | | | |
| | | | | | Y99Y99. | | H99H99.L99L99. | | | | | | | |
| | | | | | | | V99V99.S99S99. | | | | | | | |
| 727 | 11 | GQIPALV | RNFLF | ICEHY | G99G99.Q99Q99. | R99R99.N99N99. | I99I99.C99C99. | 21 | 15 | 15 | 51 | Yes | Yes | Yes |
| | | | | | I99I99.P99P99. | F99F99.L99L99. | E99E99.H99H99. | | | | | | | |
| | | | | | A99A99.L99L99. | F99F99. | Y99Y99. | | | | | | | |
| | | | | | V99V99. | | | | | | | | | |
| 735 | 11 | GFCYADR | SSG | QYYLGPNYFF | G99G99.F99F99. | S99S99.S99S99. | Q99Q99.Y99Y99. | 21 | 15 | 30 | 66 | Yes | Yes | Yes |
| | | | | | C99C99.Y99Y99. | G99G99.L99L99. | Y99Y99.L99L99. | | | | | | | |
| | | | | | A99A99.D99D99. | C99C99. | G99G99.P99P99. | | | | | | | |
| | | | | | R99R99. | | N99N99.Y99Y99. | | | | | | | |
| | | | | | | | F99F99.F99F99. | | | | | | | |
| 739 | 11 | PAYYFSR | YFSTL | LSITPDTCYW | P99P99.A99A99. | Y99Y99.F99F99. | L99L99.S99S99. | 21 | 15 | 30 | 66 | Yes | Yes | Yes |
| | | | | | Y99Y99.Y99Y99. | S99S99.T99T99. | I99I99.T99T99. | | | | | | | |
| | | | | | F99F99.S99S99. | L99L99. | P99P99.D99D99. | | | | | | | |
| | | | | | R99R99. | | T99T99.C99C99. | | | | | | | |
| | | | | | | | Y99Y99.W99W99. | | | | | | | |
| 740 | 11 | HQVVH | RDDTA | HYLHRSQCVM | H99H99.Q99Q99. | R99R99.D99D99. | H99H99.Y99Y99. | 21 | 15 | 30 | 66 | Yes | Yes | Yes |
| | | | | | D99D99.C99C99. | D99D99.T99T99. | L99L99.H99H99. | | | | | | | |
| | | | | | V99V99.V99V99. | A99A99. | R99R99.S99S99. | | | | | | | |
| | | | | | H99H99. | | Q99Q99.C99C99. | | | | | | | |
| | | | | | | | V99V99.M99M99. | | | | | | | |
| 760 | 11 | LTLLPFC | LTREA | FCRRVVDGLWLRY | L99L99.T99T99. | L99L99.T99T99. | F99F99.C99C99. | 21 | 15 | 39 | 75 | Yes | Yes | Yes |
| | | | | | L99L99.L99L99. | R99R99.E99E99. | R99R99.R99R99. | | | | | | | |
| | | | | | P99P99.F99F99. | A99A99. | V99V99.V99V99. | | | | | | | |
| | | | | | C99C99. | | D99D99.G99G99. | | | | | | | |
| | | | | | | | L99L99.W99W99. | | | | | | | |
| | | | | | | | L99L99.R99R99. | | | | | | | |
| | | | | | | | Y99Y99. | | | | | | | |
| 762 | 11 | KIFESFR | SKAGI | LTIELDNSLI | K99K99.I99I99. | S99S99.K99K99. | L99L99.T99T99. | 21 | 15 | 30 | 66 | Yes | Yes | Yes |
| | | | | | F99F99.E99E99. | A99A99.G99G99. | I99I99.E99E99. | | | | | | | |
| | | | | | S99S99.F99F99. | I99I99. | L99L99.D99D99. | | | | | | | |
| | | | | | R99R99. | | N99N99.S99S99. | | | | | | | |
| | | | | | | | L99L99.I99I99. | | | | | | | |
| 775 | 11 | ATCRVIR | TSCEA | LALFRGPCML | A99A99.T90B00. | T99T99.S99S99. | L99L99.A99A99. | 21 | 15 | 30 | 66 | Yes | Yes | Yes |
| | | | | | C99C99.R99R99. | C90B00.E99E99. | L99L99.F99F99. | | | | | | | |
| | | | | | V99V99.I99I99. | A99A99. | R99R99.G99G99. | | | | | | | |
| | | | | | R99R99. | | P99P99.C99C99. | | | | | | | |
| | | | | | | | M99M99.L99L99. | | | | | | | |
| 788 | 11 | IRRSYST | DRGYR | ALIDSEGYLA | I90B00.R90B00. | D99D99.R99R99. | A99A99.L99L99. | 21 | 15 | 30 | 66 | Yes | Yes | Yes |
| | | | | | R99R99.S99S99. | G99G99.Y99Y99. | I99I99.D99D99. | | | | | | | |
| | | | | | Y99Y99.S99S99. | R99R99. | S99S99.E99E99. | | | | | | | |
| | | | | | T99T99. | | G99G99.Y99Y99. | | | | | | | |
| | | | | | | | L99L99.A99A99. | | | | | | | |
| 795 | 11 | KNVIINV | ADGWF | IYYSVSKSNNS | K99K99.N90B00. | A99A99.D99D99. | I99I99.Y99Y99. | 21 | 15 | 33 | 69 | Yes | Yes | Yes |
| | | | | | V99V99.I99I99. | G99G99.W99W99. | Y99Y99.S99S99. | | | | | | | |
| | | | | | I99I99.N90B00. | F99F99. | V99V99.S99S99. | | | | | | | |
| | | | | | V99V99. | | K99K99.S99S99. | | | | | | | |
| | | | | | | | N99N99.N99N99. | | | | | | | |
| | | | | | | | S99S99. | | | | | | | |
| 821 | 11 | SARWVVY | TGYPG | VCFSQILMHTATV | S99S99.A99A99. | T99T99.G99G99. | V99V99.C99C99. | 21 | 15 | 39 | 75 | Yes | Yes | Yes |
| | | | | | R99R99.W99W99. | Y99Y99.P99P99. | F99F99.S99S99. | | | | | | | |
| | | | | | V99V99.V99V99. | G99G99. | Q99Q99.I99I99. | | | | | | | |
| | | | | | Y90B00. | | L99L99.M99M99. | | | | | | | |
| | | | | | | | H99H99.T99T99. | | | | | | | |
| | | | | | | | A99A99.T99T99. | | | | | | | |
| | | | | | | | V99V99. | | | | | | | |
| 837 | 11 | GSVRIVY | GSCLT | SACCDY | G99G99.S99S99. | G99G99.S99S99. | S99S99.A99A99. | 21 | 15 | 18 | 54 | Yes | Yes | Yes |
| | | | | | V99V99.R99R99. | C99C99.L99L99. | C99C99.C99C99. | | | | | | | |
| | | | | | I99I99.V99V99. | T99T99. | D99D99.Y99Y99. | | | | | | | |
| | | | | | Y99Y99. | | | | | | | | | |
| 864 | 11 | TVVKVHW | YSTLL | LIEGSHSGFQSTY | T90B00.V99V99. | Y99Y99.S99S99. | L99L99.I99I99. | 21 | 15 | 39 | 75 | Yes | Yes | Yes |
| | | | | | V99V99.K99K99. | T99T99.L99L99. | E99E99.G99G99. | | | | | | | |
| | | | | | V99V99.H99H99. | L99L99. | S99S99.H99H99. | | | | | | | |
| | | | | | W99W99. | | S99S99.G99G99. | | | | | | | |
| | | | | | | | F99F99.Q99Q99. | | | | | | | |
| | | | | | | | S99S99.T99T99. | | | | | | | |
| | | | | | | | Y99Y99. | | | | | | | |
| 867 | 11 | MSSWCTW | PIGTK | IDDWGC | M99M99.S99S99. | P99P99.I99I99. | I99I99.D99D99. | 21 | 15 | 18 | 54 | Yes | Yes | Yes |
| | | | | | S99S99.W99W99. | G99G99.T99T99. | D99D99.W99W99. | | | | | | | |
| | | | | | C99C99.T99T99. | K99K99. | G99G99.C99C99. | | | | | | | |
| | | | | | W99W99. | | | | | | | | | |
| 907 | 11 | KFVYCLA | WHHAA | HYSLDTDEFMEVA | B00 | W90B00.H90B00. | H90B00.Y90B00. | 0 | 15 | 39 | 54 | Yes | Yes | Yes |
| | | | | | | H90B00.A99A99. | S90B00.L90B00. | | | | | | | |
| | | | | | | A90B00. | D90B00.T90B00. | | | | | | | |
| | | | | | | | D90B00.E90B00. | | | | | | | |
| | | | | | | | F90B00.M90B00. | | | | | | | |
| | | | | | | | E90B00.V90B00. | | | | | | | |
| | | | | | | | A90B00. | | | | | | | |
| 99 | 11 | VIERLVY | RDGHS | ITVDHLISVL | V99V99.I99I99. | R99R99.D99D99. | I90B00.T90B00. | 21 | 15 | 30 | 66 | Yes | Yes | Yes |
| | | | | | E99E99.R99R99. | G99G99.H99H99. | V90B00.D90B00. | | | | | | | |
| | | | | | L99L99.V99V99. | S99S99. | H90B00.L90B00. | | | | | | | |
| | | | | | Y99Y99. | | I90B00.S90B00. | | | | | | | |
| | | | | | | | V90B00.L90B00. | | | | | | | |
| 110 | 10 | FDFAGDVA | SWWCV | YITPVS | F99F99.D80B00. | S99S99.W99W99. | Y90B00.I90B00. | 23 | 15 | 18 | 56 | Yes | Yes | Yes |
| | | | | | F99F99.A99A99. | W99W99.C99C99. | T90B00.P99P99. | | | | | | | |
| | | | | | G99G99.D99D99. | V99V99. | V90B00.S90B00. | | | | | | | |
| | | | | | V99V99.A99A99. | | | | | | | | | |
| 151 | 10 | DTLCNSI | TSPSC | FFFYHRCHRC | D99D99.T99T99. | T99T99.S99S99. | F99F99.F99F99. | 21 | 15 | 30 | 66 | Yes | Yes | Yes |
| | | | | | L99L99.C99C99. | P99P99.S99S99. | F99F99.Y99Y99. | | | | | | | |
| | | | | | N99N99.S99S99. | C99C99. | H99H99.R99R99. | | | | | | | |
| | | | | | I99I99. | | C99C99.H99H99. | | | | | | | |
| | | | | | | | R99R99.C99C99. | | | | | | | |
| 205 | 10 | SDVPGPY | PG | IDDYGW | S90B00.D99D99. | P99P99.G99G99. | I99I99.D90B00. | 21 | 6 | 18 | 45 | Yes | Yes | Yes |
| | | | | | V99V99.P99P99. | | D99D99.Y99Y99. | | | | | | | |
| | | | | | G99G99.P99P99. | | G99G99.W99W99. | | | | | | | |
| | | | | | Y99Y99. | | | | | | | | | |
| 230 | 10 | SCSKRVF | YSW | WLYFAPGLLM | S90B00.C90B00. | Y90B00.S90B00. | W99W99.L99L99. | 21 | 9 | 30 | 60 | Yes | Yes | Yes |
| | | | | | S90B00.K90B00. | W90B00. | Y99Y99.F99F99. | | | | | | | |
| | | | | | R90B00.V99V99. | | A99A99.P99P99. | | | | | | | |
| | | | | | F99F99. | | G99G99.L99L99. | | | | | | | |
| | | | | | | | L99L99.M99M99. | | | | | | | |
| 260 | 10 | NSLHVFA | HGSFM | SCFHWGMVR | N99N99.S99S99. | H99H99.G99G99. | S99S99.C99C99. | 21 | 15 | 27 | 63 | Yes | Yes | Yes |
| | | | | | L99L99.H99H99. | S99S99.F99F99. | F99F99.H99H99. | | | | | | | |
| | | | | | V99V99.F99F99. | M99M99. | W99W99.G99G99. | | | | | | | |
| | | | | | A99A99. | | M90B00.V99V99. | | | | | | | |
| | | | | | | | R99R99. | | | | | | | |
| 261 | 10 | YLPRVDD | NSLIC | H | Y99Y99.L99L99. | N99N99.S99S99. | H99H99. | 21 | 15 | 3 | 39 | Yes | Yes | Yes |
| | | | | | P99P99.R99R99. | L99L99.I99I99. | | | | | | | | |
| | | | | | V99V99.D99D99. | C99C99. | | | | | | | | |
| | | | | | D99D99. | | | | | | | | | |
| 280 | 10 | SFAFSLC | RWGA | TLLLSNSRSD | S99S99.F99F99. | R99R99.W99W99. | T99T99.L99L99. | 21 | 12 | 30 | 63 | Yes | Yes | Yes |
| | | | | | A99A99.F99F99. | G99G99.A99A99. | L99L99.L99L99. | | | | | | | |
| | | | | | S99S99.L99L99. | | S99S99.N99N99. | | | | | | | |
| | | | | | C99C99. | | S99S99.R99R99. | | | | | | | |
| | | | | | | | S99S99.D99D99. | | | | | | | |
| 330 | 10 | CFPYDFW | IETGD | PICLG | C99C99.F99F99. | I99I99.E99E99. | P99P99.I99I99. | 21 | 15 | 15 | 51 | Yes | Yes | Yes |
| | | | | | P99P99.Y99Y99. | T99T99.G99G99. | C99C99.L99L99. | | | | | | | |
| | | | | | D99D99.F99F99. | D99D99. | G99G99. | | | | | | | |
| | | | | | W99W99. | | | | | | | | | |
| 374 | 10 | FACHWCA | VESGG | FVPSKVCCGK | F99F99.A99A99. | V99V99.E99E99. | F90B00.V90B00. | 21 | 15 | 30 | 66 | Yes | Yes | Yes |
| | | | | | C99C99.H99H99. | S99S99.G99G99. | P90B00.S90B00. | | | | | | | |
| | | | | | W99W99.C99C99. | G99G99. | K90B00.V90B00. | | | | | | | |
| | | | | | A99A99. | | C90B00.C99C99. | | | | | | | |
| | | | | | | | G90B00.K90B00. | | | | | | | |
| 381 | 10 | RTSRIVG | NFSQC | HCIMSGFGMPWVV | R99R99.T99T99. | N99N99.F99F99. | H99H99.C99C99. | 21 | 15 | 39 | 75 | Yes | Yes | Yes |
| | | | | | S99S99.R99R99. | S99S99.Q99Q99. | I99I99.M99M99. | | | | | | | |
| | | | | | I99I99.V99V99. | C99C99. | S99S99.G99G99. | | | | | | | |
| | | | | | G99G99. | | F99F99.G99G99. | | | | | | | |
| | | | | | | | M99M99.P99P99. | | | | | | | |
| | | | | | | | W99W99.V99V99. | | | | | | | |
| | | | | | | | V99V99. | | | | | | | |
| 418 | 10 | VASADVL | SVSWF | MIRRLG | V99V99.A99A99. | S99S99.V99V99. | B00 | 21 | 15 | 0 | 36 | Yes | Yes | Yes |
| | | | | | S99S99.A99A99. | S99S99.W99W99. | | | | | | | | |
| | | | | | D99D99.V99V99. | F99F99. | | | | | | | | |
| | | | | | L99L99. | | | | | | | | | |
| 427 | 10 | YYHNIVY | GAAEV | ASFSSHCLVA | Y99Y99.Y99Y99. | G99G99.A99A99. | A99A99.S99S99. | 21 | 15 | 30 | 66 | Yes | Yes | Yes |
| | | | | | H99H99.N99N99. | A99A99.E99E99. | F99F99.S99S99. | | | | | | | |
| | | | | | I99I99.V99V99. | V99V99. | S99S99.H99H99. | | | | | | | |
| | | | | | Y99Y99. | | C99C99.L99L99. | | | | | | | |
| | | | | | | | V99V99.A99A99. | | | | | | | |
| 439 | 10 | SVSAVFQ | CLNYV | LASHLKNEVH | S99S99.V99V99. | C99C99.L99L99. | L99L99.A99A99. | 21 | 15 | 30 | 66 | Yes | Yes | Yes |
| | | | | | S99S99.A99A99. | N99N99.Y99Y99. | S99S99.H99H99. | | | | | | | |
| | | | | | V99V99.F99F99. | V99V99. | L99L99.K99K99. | | | | | | | |
| | | | | | Q99Q99. | | N99N99.E99E99. | | | | | | | |
| | | | | | | | V99V99.H99H99. | | | | | | | |
| 475 | 10 | CSLRVVY | CDGTR | ASVTQNLTVL | C99C99.S99S99. | C99C99.D99D99. | A99A99.S99S99. | 21 | 15 | 30 | 66 | Yes | Yes | Yes |
| | | | | | L99L99.R99R99. | G99G99.T99T99. | V99V99.T99T99. | | | | | | | |
| | | | | | V99V99.V99V99. | R99R99. | Q99Q99.N99N99. | | | | | | | |
| | | | | | Y99Y99. | | L99L99.T99T99. | | | | | | | |
| | | | | | | | V99V99.L99L99. | | | | | | | |
| 490 | 10 | VVGILAS | SSGG | NSRWIH | V99V99.V99V99. | S99S99.S99S99. | N99N99.S99S99. | 21 | 12 | 18 | 51 | Yes | Yes | Yes |
| | | | | | G99G99.I99I99. | G99G99.G99G99. | R99R99.W99W99. | | | | | | | |
| | | | | | L99L99.A99A99. | | I99I99.H99H99. | | | | | | | |
| | | | | | S99S99. | | | | | | | | | |
| 491 | 10 | GSYLVYR | CGVLS | FILQTDGMFF | G99G99.S99S99. | C99C99.G99G99. | F99F99.I99I99. | 21 | 15 | 30 | 66 | Yes | Yes | Yes |
| | | | | | Y99Y99.L99L99. | V99V99.L99L99. | L99L99.Q99Q99. | | | | | | | |
| | | | | | V99V99.Y99Y99. | S99S99. | T99T99.D99D99. | | | | | | | |
| | | | | | R99R99. | | G99G99.M99M99. | | | | | | | |
| | | | | | | | F99F99.F99F99. | | | | | | | |
| 519 | 10 | SHVTNEF | LSALC | IDDFGH | S99S99.H99H99. | L99L99.S99S99. | I99I99.D99D99. | 21 | 15 | 18 | 54 | Yes | Yes | Yes |
| | | | | | V99V99.T90B00. | A99A99.L99L99. | D99D99.F99F99. | | | | | | | |
| | | | | | N99N99.E99E99. | C99C99. | G99G99.H99H99. | | | | | | | |
| | | | | | F99F99. | | | | | | | | | |
| 616 | 10 | QAAVCFA | VQYGT | NADPTLLGI | Q99Q99.A99A99. | V99V99.Q99Q99. | N99N99.A99A99. | 21 | 15 | 27 | 63 | Yes | Yes | Yes |
| | | | | | A99A99.V99V99. | Y99Y99.G99G99. | D99D99.P99P99. | | | | | | | |
| | | | | | C99C99.F99F99. | T90B00. | T99T99.L99L99. | | | | | | | |
| | | | | | A99A99. | | L99L99.G99G99. | | | | | | | |
| | | | | | | | I99I99. | | | | | | | |
| 627 | 10 | VNTEFVC | LSVML | ETAYAVNGP | V99V99.N99N99. | L99L99.S99S99. | E99E99.T99T99. | 21 | 15 | 27 | 63 | Yes | Yes | Yes |
| | | | | | T99T99.E99E99. | V99V99.M99M99. | A99A99.Y99Y99. | | | | | | | |
| | | | | | F99F99.V99V99. | L99L99. | A99A99.V90B00. | | | | | | | |
| | | | | | C99C99. | | N99N99.G99G99. | | | | | | | |
| | | | | | | | P99P99. | | | | | | | |
| 631 | 10 | FHRVTG | RHNVD | HVFDSL | F99F99.H99H99. | R99R99.H99H99. | H99H99.V99V99. | 18 | 15 | 18 | 51 | Yes | Yes | Yes |
| | | | | | R99R99.V99V99. | N99N99.V99V99. | F99F99.D90B00. | | | | | | | |
| | | | | | T99T99.G99G99. | D99D99. | S99S99.L99L99. | | | | | | | |
| 671 | 10 | GLRAIMC | SYESR | LVLARDCRLV | G99G99.L99L99. | S99S99.Y99Y99. | L99L99.V99V99. | 21 | 15 | 30 | 66 | Yes | Yes | Yes |
| | | | | | R99R99.A99A99. | E99E99.S99S99. | L99L99.A99A99. | | | | | | | |
| | | | | | I99I99.M90B00. | R99R99. | R99R99.D99D99. | | | | | | | |
| | | | | | C99C99. | | C99C99.R99R99. | | | | | | | |
| | | | | | | | L99L99.V99V99. | | | | | | | |
| 677 | 10 | CRMCAFT | HCALR | FPAATESQFY | C99C99.R90B00. | H90B00.C99C99. | F99F99.P99P99. | 21 | 15 | 30 | 66 | Yes | Yes | Yes |
| | | | | | M99M99.C99C99. | A99A99.L99L99. | A99A99.A99A99. | | | | | | | |
| | | | | | A99A99.F90B00. | R99R99. | T99T99.E99E99. | | | | | | | |
| | | | | | T99T99. | | S99S99.Q99Q99. | | | | | | | |
| | | | | | | | F99F99.Y99Y99. | | | | | | | |
| 697 | 10 | VPIDYVM | TIANV | HNPGVLGHWW | V99V99.P90B00. | T99T99.I99I99. | H99H99.N99N99. | 21 | 15 | 30 | 66 | Yes | Yes | Yes |
| | | | | | I99I99.D99D99. | A99A99.N99N99. | P99P99.G99G99. | | | | | | | |
| | | | | | Y99Y99.V99V99. | V99V99. | V99V99.L99L99. | | | | | | | |
| | | | | | M99M99. | | G99G99.H99H99. | | | | | | | |
| | | | | | | | W99W99.W99W99. | | | | | | | |
| 719 | 10 | VSHHVFG | LGCSL | HYYCDMDVS | V99V99.S99S99. | L99L99.G99G99. | H99H99.Y99Y99. | 21 | 15 | 27 | 63 | Yes | Yes | Yes |
| | | | | | H99H99.H99H99. | C99C99.S99S99. | Y99Y99.C99C99. | | | | | | | |
| | | | | | V99V99.F99F99. | L99L99. | D99D99.M99M99. | | | | | | | |
| | | | | | G99G99. | | D99D99.V99V99. | | | | | | | |
| | | | | | | | S99S99. | | | | | | | |
| 750 | 10 | TIVKSIA | FSDKF | CILAALSFET | T99T99.I99I99. | F99F99.S99S99. | C99C99.I99I99. | 21 | 15 | 30 | 66 | Yes | Yes | Yes |
| | | | | | V99V99.K99K99. | D99D99.K99K99. | L99L99.A99A99. | | | | | | | |
| | | | | | S99S99.I99I99. | F99F99. | A99A99.L99L99. | | | | | | | |
| | | | | | A99A99. | | S99S99.F99F99. | | | | | | | |
| | | | | | | | E99E99.T99T99. | | | | | | | |
| 751 | 10 | DAFIVSH | RCCQ | YNLVL | D99D99.A99A99. | R99R99.C99C99. | Y99Y99.N99N99. | 21 | 12 | 15 | 48 | Yes | Yes | Yes |
| | | | | | F99F99.I99I99. | C99C99.Q99Q99. | L99L99.V99V99. | | | | | | | |
| | | | | | V99V99.S99S99. | | L90B00. | | | | | | | |
| | | | | | H99H99. | | | | | | | | | |
| 777 | 10 | CLVSYEC | ALRNT | LRSFLTVSVSSLV | C99C99.L99L99. | A99A99.L99L99. | B00 | 21 | 15 | 0 | 36 | Yes | Yes | Yes |
| | | | | | V99V99.S99S99. | R99R99.N99N99. | | | | | | | | |
| | | | | | Y90B00.E90B00. | T99T99. | | | | | | | | |
| | | | | | C90B00. | | | | | | | | | |
| 789 | 10 | YFVSIVW | DRGDT | VTWKYSHCVA | Y99Y99.F99F99. | D99D99.R99R99. | V99V99.T90B00. | 21 | 15 | 30 | 66 | Yes | Yes | Yes |
| | | | | | V99V99.S99S99. | G99G99.D99D99. | W99W99.K90B00. | | | | | | | |
| | | | | | I99I99.V99V99. | T99T99. | Y90B00.S90B00. | | | | | | | |
| | | | | | W99W99. | | H90B00.C90B00. | | | | | | | |
| | | | | | | | V90B00.A90B00. | | | | | | | |
| 814 | 10 | VVGYPIA | GRWGG | WCLSDIDTCL | V99V99.V99V99. | G99G99.R99R99. | W99W99.C99C99. | 21 | 15 | 30 | 66 | Yes | Yes | Yes |
| | | | | | G99G99.Y99Y99. | W99W99.G99G99. | L99L99.S99S99. | | | | | | | |
| | | | | | P99P99.I99I99. | G99G99. | D99D99.I99I99. | | | | | | | |
| | | | | | A99A99. | | D99D99.T99T99. | | | | | | | |
| | | | | | | | C99C99.L99L99. | | | | | | | |
| 838 | 10 | IIGCSVY | PDSIT | HLLSRTLNVS | I99I99.I99I99. | P99P99.D99D99. | H99H99.L99L99. | 21 | 15 | 30 | 66 | Yes | Yes | Yes |
| | | | | | G99G99.C99C99. | S99S99.I99I99. | L99L99.S99S99. | | | | | | | |
| | | | | | S99S99.V99V99. | T99T99. | R99R99.T99T99. | | | | | | | |
| | | | | | Y99Y99. | | L99L99.N99N99. | | | | | | | |
| | | | | | | | V99V99.S99S99. | | | | | | | |
| 849 | 10 | ISKRAWS | MGFCH | VALLGNCIC | I99I99.S99S99. | M99M99.G99G99. | V90B00.A90B00. | 21 | 15 | 27 | 63 | Yes | Yes | Yes |
| | | | | | K99K99.R99R99. | F99F99.C99C99. | L90B00.L90B00. | | | | | | | |
| | | | | | A99A99.W99W99. | H99H99. | G90B00.N90B00. | | | | | | | |
| | | | | | S99S99. | | C90B00.I90B00. | | | | | | | |
| | | | | | | | C90B00. | | | | | | | |
| 15 | 9 | ATMSSEW | HAGYR | GQVDFTVCW | A99A99.T99T99. | H99H99.A99A99. | G99G99.Q99Q99. | 21 | 15 | 27 | 63 | Yes | Yes | Yes |
| | | | | | M99M99.S99S99. | G99G99.Y99Y99. | V99V99.D99D99. | | | | | | | |
| | | | | | S99S99.E99E99. | R99R99. | F99F99.T99T99. | | | | | | | |
| | | | | | W99W99. | | V99V99.C99C99. | | | | | | | |
| | | | | | | | W99W99. | | | | | | | |
| 172 | 9 | TIVQYYP | SAASN | SNGGYH | T99T99.I99I99. | S99S99.A99A99. | S99S99.N99N99. | 21 | 15 | 18 | 54 | Yes | Yes | Yes |
| | | | | | V99V99.Q99Q99. | A99A99.S99S99. | G99G99.G99G99. | | | | | | | |
| | | | | | Y99Y99.Y99Y99. | N99N99. | Y99Y99.H99H99. | | | | | | | |
| | | | | | P99P99. | | | | | | | | | |
| 176 | 9 | GLVAWAF | RMSIG | ITCNTISSGLWTF | G99G99.L99L99. | R99R99.M99M99. | I99I99.T99T99. | 21 | 15 | 39 | 75 | Yes | Yes | Yes |
| | | | | | V99V99.A99A99. | S99S99.I99I99. | C99C99.N99N99. | | | | | | | |
| | | | | | W99W99.A99A99. | G99G99. | T99T99.I99I99. | | | | | | | |
| | | | | | F99F99. | | S99S99.S99S99. | | | | | | | |
| | | | | | | | G99G99.L99L99. | | | | | | | |
| | | | | | | | W99W99.T99T99. | | | | | | | |
| | | | | | | | F99F99. | | | | | | | |
| 2 | 9 | PLLRVVY | VGSFV | SQFHHGRCSL | P99P99.L99L99. | V99V99.G99G99. | S99S99.Q99Q99. | 21 | 15 | 30 | 66 | Yes | Yes | Yes |
| | | | | | L99L99.R99R99. | S99S99.F99F99. | F99F99.H99H99. | | | | | | | |
| | | | | | V99V99.V99V99. | V99V99. | H99H99.G99G99. | | | | | | | |
| | | | | | Y99Y99. | | R99R99.C99C99. | | | | | | | |
| | | | | | | | S99S99.L99L99. | | | | | | | |
| 223 | 9 | AKNGMIG | LFRTV | LSWPDTSPLI | A99A99.K88B00. | L99L99.F99F99. | L99L99.S99S99. | 21 | 15 | 30 | 66 | Yes | Yes | Yes |
| | | | | | N99N99.G99G99. | R99R99.T99T99. | W99W99.P99P99. | | | | | | | |
| | | | | | M99M99.I99I99. | V99V99. | D99D99.T99T99. | | | | | | | |
| | | | | | G99G99. | | S99S99.P99P99. | | | | | | | |
| | | | | | | | L99L99.I99I99. | | | | | | | |
| 226 | 9 | CTFNVIW | LHNG | LIFDHNSGML | C99C99.T99T99. | L99L99.H99H99. | L99L99.I99I99. | 21 | 15 | 30 | 66 | Yes | Yes | Yes |
| | | | | | F99F99.N99N99. | N99N99.G99G99. | F99F99.D99D99. | | | | | | | |
| | | | | | V99V99.I99I99. | I99I99. | H99H99.N99N99. | | | | | | | |
| | | | | | W99W99. | | S99S99.G99G99. | | | | | | | |
| | | | | | | | M99M99.L99L99. | | | | | | | |
| 234 | 9 | FRS | MSDLQ | CIFIFHSLR | F99F99.R99R99. | M99M99.S99S99. | C99C99.I99I99. | 9 | 15 | 27 | 51 | Yes | Yes | Yes |
| | | | | | S99S99. | D99D99.L99L99. | F99F99.I99I99. | | | | | | | |
| | | | | | | Q99Q99. | F99F99.H99H99. | | | | | | | |
| | | | | | | | S99S99.L99L99. | | | | | | | |
| | | | | | | | R88B00. | | | | | | | |
| 241 | 9 | TFLPFIQ | GFTET | LFPQLSPRPA | T99T99.F99F99. | G99G99.F99F99. | L99L99.F99F99. | 21 | 15 | 30 | 66 | Yes | Yes | Yes |
| | | | | | L99L99.P99P99. | T99T99.E99E99. | P99P99.Q99Q99. | | | | | | | |
| | | | | | F99F99.I99I99. | T99T99. | L99L99.S99S99. | | | | | | | |
| | | | | | Q99Q99. | | P99P99.R88B00. | | | | | | | |
| | | | | | | | P99P99.A99A99. | | | | | | | |
| 243 | 9 | IMGLIRL | SNWLF | TTRFTH | I88B00.M99M99. | S99S99.N99N99. | T99T99.T99T99. | 21 | 15 | 18 | 54 | Yes | Yes | Yes |
| | | | | | G99G99.L99L99. | W99W99.L99L99. | R99R99.F99F99. | | | | | | | |
| | | | | | I99I99.R99R99. | F99F99. | T99T99.H99H99. | | | | | | | |
| | | | | | L99L99. | | | | | | | | | |
| 244 | 9 | VLGIVES | ARLEN | ITRFSG | V99V99.L99L99. | A99A99.R99R99. | I99I99.T99T99. | 21 | 15 | 18 | 54 | Yes | Yes | Yes |
| | | | | | G88B00.I88B00. | L99L99.E99E99. | R99R99.F99F99. | | | | | | | |
| | | | | | V88B00.E88B00. | N99N99. | S99S99.G99G99. | | | | | | | |
| | | | | | S88B00. | | | | | | | | | |
| 247 | 9 | SRTHPLR | TWGHV | SLPGTNGWAD | S99S99.R99R99. | T99T99.W99W99. | S99S99.L99L99. | 21 | 15 | 30 | 66 | Yes | Yes | Yes |
| | | | | | T88B00.H99H99. | G99G99.H99H99. | P99P99.G99G99. | | | | | | | |
| | | | | | P99P99.L99L99. | V99V99. | T99T99.N99N99. | | | | | | | |
| | | | | | R99R99. | | G99G99.W99W99. | | | | | | | |
| | | | | | | | A99A99.D99D99. | | | | | | | |
| 303 | 9 | DTNACVY | CHGVT | AFLMGARTI | D99D99.T99T99. | C99C99.H99H99. | A99A99.F99F99. | 21 | 15 | 27 | 63 | Yes | Yes | Yes |
| | | | | | N99N99.A99A99. | G99G99.V99V99. | L99L99.M99M99. | | | | | | | |
| | | | | | C99C99.V99V99. | T99T99. | G99G99.A99A99. | | | | | | | |
| | | | | | Y99Y99. | | R99R99.T99T99. | | | | | | | |
| | | | | | | | I99I99. | | | | | | | |
| 33 | 9 | ASRTVY | VSGLA | VIMQNIYVLK | A99A99.S99S99. | V99V99.S99S99. | V99V99.I99I99. | 18 | 15 | 30 | 63 | Yes | Yes | Yes |
| | | | | | R99R99.T99T99. | G99G99.L99L99. | M99M99.Q99Q99. | | | | | | | |
| | | | | | V99V99.Y99Y99. | A99A99. | N99N99.I99I99. | | | | | | | |
| | | | | | | | Y99Y99.V99V99. | | | | | | | |
| | | | | | | | L99L99.K99K99. | | | | | | | |
| 337 | 9 | LAGGVVY | AFGNG | AILSGRF | L99L99.A99A99. | A99A99.F99F99. | A99A99.I88B00. | 21 | 15 | 27 | 63 | Yes | Yes | Yes |
| | | | | | G99G99.G99G99. | G99G99.N99N99. | L99L99.S99S99. | | | | | | | |
| | | | | | V99V99.V99V99. | G99G99. | G88B00.R99R99. | | | | | | | |
| | | | | | Y99Y99. | | F99F99.V99V99. | | | | | | | |
| | | | | | | | C99C99. | | | | | | | |
| 34 | 9 | RLSGLVW | CDASL | KCYYSDAIV | R99R99.L99L99. | C99C99.D99D99. | B00 | 21 | 15 | 0 | 36 | Yes | Yes | Yes |
| | | | | | S99S99.G99G99. | A99A99.S99S99. | | | | | | | | |
| | | | | | L99L99.V99V99. | L99L99. | | | | | | | | |
| | | | | | W99W99. | | | | | | | | | |
| 347 | 9 | PLVRACY | LSESY | AIFDPTQEGGGAV | P99P99.L99L99. | L99L99.S99S99. | A99A99.I99I99. | 21 | 15 | 39 | 75 | Yes | Yes | Yes |
| | | | | | V99V99.R99R99. | E99E99.S99S99. | F99F99.D99D99. | | | | | | | |
| | | | | | A99A99.C99C99. | Y99Y99. | P99P99.T88B00. | | | | | | | |
| | | | | | Y88B00. | | Q99Q99.E99E99. | | | | | | | |
| | | | | | | | G99G99.G99G99. | | | | | | | |
| | | | | | | | G99G99.A99A99. | | | | | | | |
| | | | | | | | V99V99. | | | | | | | |
| 349 | 9 | SVTARVD | HVPFA | FSANCRDISR | S99S99.V99V99. | H99H99.V99V99. | F99F99.S99S99. | 21 | 15 | 30 | 66 | Yes | Yes | Yes |
| | | | | | T99T99.A99A99. | P99P99.F99F99. | A99A99.N99N99. | | | | | | | |
| | | | | | R99R99.V99V99. | A99A99. | C99C99.R99R99. | | | | | | | |
| | | | | | D88B00. | | D99D99.I99I99. | | | | | | | |
| | | | | | | | S99S99.R99R99. | | | | | | | |
| 385 | 9 | CVLYVF | ANNAE | ALYSLFSTR | C99C99.V99V99. | A99A99.N99N99. | A99A99.L99L99. | 18 | 15 | 27 | 60 | Yes | Yes | Yes |
| | | | | | L99L99.Y99Y99. | N99N99.A99A99. | Y99Y99.S99S99. | | | | | | | |
| | | | | | V99V99.F99F99. | E99E99. | L99L99.F99F99. | | | | | | | |
| | | | | | | | S99S99.T99T99. | | | | | | | |
| | | | | | | | R99R99. | | | | | | | |
| 392 | 9 | ISVSFWF | PCLNN | WTPTRLVVV | I88B00.S99S99. | P99P99.C99C99. | W99W99.T99T99. | 21 | 15 | 27 | 63 | Yes | Yes | Yes |
| | | | | | V99V99.S99S99. | L99L99.N99N99. | P99P99.T99T99. | | | | | | | |
| | | | | | F99F99.W88B00. | N99N99. | R99R99.L99L99. | | | | | | | |
| | | | | | F99F99. | | V99V99.V99V99. | | | | | | | |
| | | | | | | | V99V99. | | | | | | | |
| 432 | 9 | RGVGTVY | PCDDG | GIYYDCHCIT | R99R99.G99G99. | P99P99.C99C99. | G99G99.I99I99. | 21 | 15 | 30 | 66 | Yes | Yes | Yes |
| | | | | | V99V99.G99G99. | D99D99.D99D99. | Y99Y99.Y99Y99. | | | | | | | |
| | | | | | T99T99.V99V99. | G99G99. | D99D99.C99C99. | | | | | | | |
| | | | | | Y99Y99. | | H99H99.C99C99. | | | | | | | |
| | | | | | | | I99I99.T99T99. | | | | | | | |
| 433 | 9 | CLICYST | DVHAL | TTGYDTGALP | C99C99.L99L99. | D99D99.V99V99. | T99T99.T88B00. | 21 | 15 | 30 | 66 | Yes | Yes | Yes |
| | | | | | I99I99.C99C99. | H99H99.A99A99. | G99G99.Y99Y99. | | | | | | | |
| | | | | | Y99Y99.S99S99. | L99L99. | D99D99.T99T99. | | | | | | | |
| | | | | | T99T99. | | G88B00.A99A99. | | | | | | | |
| | | | | | | | L99L99.P99P99. | | | | | | | |
| 448 | 9 | TMLHIFS | SLYPH | TVMCYVMGFSGTD | T99T99.M99M99. | S99S99.L99L99. | T99T99.V99V99. | 21 | 15 | 39 | 75 | Yes | Yes | Yes |
| | | | | | L99L99.H99H99. | Y99Y99.P99P99. | M99M99.C99C99. | | | | | | | |
| | | | | | I99I99.F99F99. | H99H99. | Y99Y99.V99V99. | | | | | | | |
| | | | | | S99S99. | | M99M99.G99G99. | | | | | | | |
| | | | | | | | F99F99.S99S99. | | | | | | | |
| | | | | | | | G99G99.T99T99. | | | | | | | |
| | | | | | | | D99D99. | | | | | | | |
| 466 | 9 | CVLMATS | GIDMT | HDFHPHYRGG | C99C99.V99V99. | G99G99.I99I99. | H77B00.D66B00. | 21 | 15 | 20 | 56 | Yes | Yes | Yes |
| | | | | | L99L99.M99M99. | D99D99.M99M99. | F77B00.H77B00. | | | | | | | |
| | | | | | A99A99.T99T99. | T99T99. | P77B00.H77B00. | | | | | | | |
| | | | | | S88B00. | | Y77B00.R77B00. | | | | | | | |
| | | | | | | | G77B00.G77B00. | | | | | | | |
| 472 | 9 | QALSCFN | SSSTS | FPTPNSAGVF | Q99Q99.A99A99. | S99S99.S99S99. | F99F99.P99P99. | 21 | 15 | 30 | 66 | Yes | Yes | Yes |
| | | | | | L99L99.S99S99. | S99S99.T99T99. | T99T99.P99P99. | | | | | | | |
| | | | | | C99C99.F99F99. | S99S99. | N99N99.S99S99. | | | | | | | |
| | | | | | N99N99. | | A99A99.G99G99. | | | | | | | |
| | | | | | | | V99V99.F99F99. | | | | | | | |
| 483 | 9 | AHARTVW | RSGGG | MCLLCNGVI | A99A99.H99H99. | R99R99.S99S99. | M99M99.C99C99. | 21 | 15 | 27 | 63 | Yes | Yes | Yes |
| | | | | | A99A99.R99R99. | G99G99.G99G99. | L99L99.L99L99. | | | | | | | |
| | | | | | T99T99.V99V99. | G99G99. | C99C99.N99N99. | | | | | | | |
| | | | | | W99W99. | | G99G99.V99V99. | | | | | | | |
| | | | | | | | I99I99. | | | | | | | |
| 49 | 9 | CLSNYLN | MSFSL | VYCIDHSVSTDVL | C99C99.L99L99. | M99M99.S99S99. | B00 | 21 | 15 | 0 | 36 | Yes | Yes | Yes |
| | | | | | S99S99.N99N99. | F99F99.S99S99. | | | | | | | | |
| | | | | | Y99Y99.L99L99. | L99L99. | | | | | | | | |
| | | | | | N99N99. | | | | | | | | | |
| 496 | 9 | AGSRCVY | PRVET | YLLVDGIVV | A99A99.G99G99. | P99P99.R99R99. | Y99Y99.L99L99. | 21 | 15 | 27 | 63 | Yes | Yes | Yes |
| | | | | | S99S99.R99R99. | V99V99.E99E99. | L99L99.V99V99. | | | | | | | |
| | | | | | C99C99.V99V99. | T88B00. | D99D99.G99G99. | | | | | | | |
| | | | | | Y99Y99. | | I99I99.V99V99. | | | | | | | |
| | | | | | | | V88B00. | | | | | | | |
| 498 | 9 | DVVNYYT | AHVGF | HIGTVS | D99D99.V99V99. | A99A99.H99H99. | H99H99.I99I99. | 21 | 15 | 18 | 54 | Yes | Yes | Yes |
| | | | | | V99V99.N99N99. | V99V99.G99G99. | G99G99.T99T99. | | | | | | | |
| | | | | | Y99Y99.Y88B00. | F99F99. | V99V99.S99S99. | | | | | | | |
| | | | | | T99T99. | | | | | | | | | |
| 508 | 9 | ICTLTCW | LVQVM | RHLIRDLNGVLVR | I99I99.C99C99. | L99L99.V99V99. | R99R99.H99H99. | 20 | 15 | 39 | 74 | Yes | Yes | Yes |
| | | | | | T77B00.L99L99. | Q99Q99.V99V99. | L99L99.I99I99. | | | | | | | |
| | | | | | T99T99.C99C99. | M99M99. | R99R99.D99D99. | | | | | | | |
| | | | | | W99W99. | | L99L99.N99N99. | | | | | | | |
| | | | | | | | G99G99.V99V99. | | | | | | | |
| | | | | | | | L99L99.V99V99. | | | | | | | |
| | | | | | | | R99R99. | | | | | | | |
| 51 | 9 | YSGRMVW | MATDN | CSEWW | Y99Y99.S99S99. | M99M99.A99A99. | C99C99.S99S99. | 21 | 15 | 15 | 51 | Yes | Yes | Yes |
| | | | | | G99G99.R99R99. | T99T99.D99D99. | E99E99.W99W99. | | | | | | | |
| | | | | | M99M99.V99V99. | N99N99. | W99W99. | | | | | | | |
| | | | | | W99W99. | | | | | | | | | |
| 53 | 9 | TYLTMLG | HQSCY | SVFLINLSVV | T99T99.Y99Y99. | H99H99.Q99Q99. | S99S99.V99V99. | 21 | 15 | 30 | 66 | Yes | Yes | Yes |
| | | | | | L99L99.T99T99. | S99S99.C99C99. | F99F99.L99L99. | | | | | | | |
| | | | | | M99M99.L99L99. | Y99Y99. | I99I99.N99N99. | | | | | | | |
| | | | | | G99G99. | | L99L99.S99S99. | | | | | | | |
| | | | | | | | V99V99.V99V99. | | | | | | | |
| 522 | 9 | VLYGEVY | QGCYD | AVFHPDLGVH | V99V99.L99L99. | Q99Q99.G99G99. | A99A99.V99V99. | 21 | 15 | 30 | 66 | Yes | Yes | Yes |
| | | | | | Y99Y99.G99G99. | C99C99.Y99Y99. | F99F99.H99H99. | | | | | | | |
| | | | | | E99E99.V99V99. | D99D99. | P99P99.D99D99. | | | | | | | |
| | | | | | Y99Y99. | | L99L99.G99G99. | | | | | | | |
| | | | | | | | V99V99.H99H99. | | | | | | | |
| 55 | 9 | SGLRVMG | IGLAL | CILSYRRAEEAE | S88B00.G99G99. | I99I99.G99G99. | C99C99.I99I99. | 21 | 15 | 36 | 72 | Yes | Yes | Yes |
| | | | | | L99L99.R99R99. | L99L99.A99A99. | L99L99.S99S99. | | | | | | | |
| | | | | | V99V99.M99M99. | L99L99. | Y99Y99.R99R99. | | | | | | | |
| | | | | | G99G99. | | R99R99.A99A99. | | | | | | | |
| | | | | | | | E99E99.E99E99. | | | | | | | |
| | | | | | | | A99A99.E99E99. | | | | | | | |
| 564 | 9 | HARGGAC | VWADQ | FHSSQS | H99H99.A99A99. | V99V99.W99W99. | F99F99.H99H99. | 21 | 15 | 18 | 54 | Yes | Yes | Yes |
| | | | | | R99R99.G99G99. | A99A99.D99D99. | S99S99.S99S99. | | | | | | | |
| | | | | | G99G99.A99A99. | Q99Q99. | Q99Q99.S99S99. | | | | | | | |
| | | | | | C99C99. | | | | | | | | | |
| 569 | 9 | IQSMFHY | PRYS | DNTPIMIG | I99I99.Q99Q99. | P99P99.R99R99. | B00 | 21 | 12 | 0 | 33 | Yes | Yes | Yes |
| | | | | | S99S99.M99M99. | Y99Y99.S99S99. | | | | | | | | |
| | | | | | F99F99.H99H99. | | | | | | | | | |
| | | | | | Y99Y99. | | | | | | | | | |
| 597 | 9 | SGYRVVY | TDAKA | VLFPSC | S99S99.G99G99. | T99T99.D99D99. | B00 | 21 | 15 | 0 | 36 | Yes | Yes | Yes |
| | | | | | Y99Y99.R99R99. | A99A99.K99K99. | | | | | | | | |
| | | | | | V99V99.V99V99. | A99A99. | | | | | | | | |
| | | | | | Y99Y99. | | | | | | | | | |
| 601 | 9 | LSGGVAI | VQEYC | TNFLSRNAS | L99L99.S99S99. | V99V99.Q99Q99. | T99T99.N99N99. | 21 | 15 | 27 | 63 | Yes | Yes | Yes |
| | | | | | G99G99.G99G99. | E99E99.Y99Y99. | F99F99.L99L99. | | | | | | | |
| | | | | | V99V99.A99A99. | C99C99. | S99S99.R99R99. | | | | | | | |
| | | | | | I88B00. | | N99N99.A99A99. | | | | | | | |
| | | | | | | | S99S99. | | | | | | | |
| 648 | 9 | VTFSLFR | VSNCA | TGSPIPFIYFAHG | V99V99.T99T99. | V99V99.S99S99. | T99T99.G99G99. | 21 | 15 | 39 | 75 | Yes | Yes | Yes |
| | | | | | F99F99.S99S99. | N99N99.C99C99. | S99S99.P99P99. | | | | | | | |
| | | | | | L99L99.F99F99. | A88B00. | I99I99.P99P99. | | | | | | | |
| | | | | | R99R99. | | F99F99.I99I99. | | | | | | | |
| | | | | | | | Y99Y99.F99F99. | | | | | | | |
| | | | | | | | A99A99.H99H99. | | | | | | | |
| | | | | | | | G99G99. | | | | | | | |
| 672 | 9 | AYTNLCC | FYLGV | ERYPYS | A99A99.Y99Y99. | F99F99.Y99Y99. | E99E99.R99R99. | 21 | 15 | 18 | 54 | Yes | Yes | Yes |
| | | | | | T99T99.N99N99. | L99L99.G99G99. | Y99Y99.P99P99. | | | | | | | |
| | | | | | L99L99.C99C99. | V99V99. | Y99Y99.S99S99. | | | | | | | |
| | | | | | C99C99. | | | | | | | | | |
| 676 | 9 | ILVCYTV | GNVRC | MHIYGE | I99I99.L99L99. | G99G99.N99N99. | B00 | 21 | 15 | 0 | 36 | Yes | Yes | Yes |
| | | | | | V99V99.C99C99. | V99V99.R99R99. | | | | | | | | |
| | | | | | Y99Y99.T99T99. | C99C99. | | | | | | | | |
| | | | | | V99V99. | | | | | | | | | |
| 679 | 9 | FASNRRF | GVHRI | RGDPLHPVWY | F99F99.A99A99. | G99G99.V99V99. | R99R99.G99G99. | 21 | 15 | 30 | 66 | Yes | Yes | Yes |
| | | | | | S99S99.N99N99. | H99H99.R99R99. | D99D99.P99P99. | | | | | | | |
| | | | | | R99R99.R99R99. | I99I99. | L99L99.H99H99. | | | | | | | |
| | | | | | F99F99. | | P99P99.V99V99. | | | | | | | |
| | | | | | | | W99W99.Y99Y99. | | | | | | | |
| 681 | 9 | PVRCFVW | CVSAF | LHHTNDDNYR | P99P99.V99V99. | C99C99.V99V99. | L99L99.H99H99. | 21 | 15 | 30 | 66 | Yes | Yes | Yes |
| | | | | | R99R99.C99C99. | S99S99.A99A99. | H99H99.T99T99. | | | | | | | |
| | | | | | F99F99.V99V99. | F99F99. | N99N99.D99D99. | | | | | | | |
| | | | | | W99W99. | | D99D99.N99N99. | | | | | | | |
| | | | | | | | Y99Y99.R99R99. | | | | | | | |
| 706 | 9 | MVKRWVY | RSVAS | GLLDDHACFGHGR | M99M99.V99V99. | R99R99.S99S99. | G99G99.L99L99. | 21 | 15 | 39 | 75 | Yes | Yes | Yes |
| | | | | | K99K99.R99R99. | V99V99.A99A99. | L99L99.D99D99. | | | | | | | |
| | | | | | W99W99.V99V99. | S99S99. | D99D99.H99H99. | | | | | | | |
| | | | | | Y99Y99. | | A99A99.C99C99. | | | | | | | |
| | | | | | | | F99F99.G99G99. | | | | | | | |
| | | | | | | | H99H99.G99G99. | | | | | | | |
| | | | | | | | R99R99. | | | | | | | |
| 70 | 9 | GVSSIVV | RHAQH | QALTANFFVS | G99G99.V99V99. | R99R99.H99H99. | Q99Q99.A99A99. | 21 | 15 | 30 | 66 | Yes | Yes | Yes |
| | | | | | S99S99.S99S99. | A99A99.Q99Q99. | L99L99.T99T99. | | | | | | | |
| | | | | | I99I99.V99V99. | H99H99. | A99A99.N99N99. | | | | | | | |
| | | | | | V99V99. | | F99F99.F99F99. | | | | | | | |
| | | | | | | | V99V99.S99S99. | | | | | | | |
| 715 | 9 | YSFAADQ | VHCDA | LAPRFGFVAW | Y99Y99.S99S99. | V99V99.H99H99. | L99L99.A88B00. | 21 | 15 | 30 | 66 | Yes | Yes | Yes |
| | | | | | F99F99.A99A99. | C99C99.D99D99. | P88B00.R88B00. | | | | | | | |
| | | | | | A99A99.D99D99. | A99A99. | F88B00.G88B00. | | | | | | | |
| | | | | | Q99Q99. | | F88B00.V88B00. | | | | | | | |
| | | | | | | | A88B00.W88B00. | | | | | | | |
| 718 | 9 | GSGYVGY | VDGVP | VLIHRINGSFAML | G99G99.S99S99. | V99V99.D99D99. | V99V99.L88B00. | 21 | 15 | 39 | 75 | Yes | Yes | Yes |
| | | | | | G99G99.Y99Y99. | G99G99.V99V99. | I99I99.H99H99. | | | | | | | |
| | | | | | V99V99.G99G99. | P99P99. | R99R99.I99I99. | | | | | | | |
| | | | | | Y99Y99. | | N99N99.G99G99. | | | | | | | |
| | | | | | | | S99S99.F99F99. | | | | | | | |
| | | | | | | | A99A99.M99M99. | | | | | | | |
| | | | | | | | L99L99. | | | | | | | |
| 722 | 9 | NIWYHGQ | LTHMG | MRFFEN | N99N99.I99I99. | L99L99.T99T99. | M99M99.R99R99. | 21 | 15 | 18 | 54 | Yes | Yes | Yes |
| | | | | | W99W99.Y99Y99. | H99H99.M99M99. | F99F99.F99F99. | | | | | | | |
| | | | | | H99H99.G99G99. | G99G99. | E99E99.N99N99. | | | | | | | |
| | | | | | Q99Q99. | | | | | | | | | |
| 726 | 9 | CVRSSVY | VGMRC | AYYRSSIMVE | C99C99.V99V99. | V99V99.G99G99. | A99A99.Y99Y99. | 21 | 15 | 30 | 66 | Yes | Yes | Yes |
| | | | | | R99R99.S99S99. | M99M99.R99R99. | Y99Y99.R99R99. | | | | | | | |
| | | | | | S99S99.V99V99. | C99C99. | S99S99.S99S99. | | | | | | | |
| | | | | | Y99Y99. | | I99I99.M99M99. | | | | | | | |
| | | | | | | | V99V99.E99E99. | | | | | | | |
| 728 | 9 | GRVIA | CHPSQ | HYIVSNYLMVYVC | G99G99.R99R99. | C99C99.H99H99. | H99H99.Y99Y99. | 15 | 15 | 39 | 69 | Yes | Yes | Yes |
| | | | | | V99V99.I99I99. | P99P99.S99S99. | I99I99.V99V99. | | | | | | | |
| | | | | | A99A99. | Q99Q99. | S99S99.N99N99. | | | | | | | |
| | | | | | | | Y99Y99.L99L99. | | | | | | | |
| | | | | | | | M99M99.V99V99. | | | | | | | |
| | | | | | | | Y99Y99.V99V99. | | | | | | | |
| | | | | | | | C99C99. | | | | | | | |
| 733 | 9 | SLRGLLV | SSGVT | YMFTPRSDVS | S99S99.L99L99. | S99S99.S99S99. | Y99Y99.M99M99. | 21 | 15 | 30 | 66 | Yes | Yes | Yes |
| | | | | | R99R99.G99G99. | G99G99.V99V99. | F99F99.T99T99. | | | | | | | |
| | | | | | L99L99.L99L99. | T99T99. | P99P99.R99R99. | | | | | | | |
| | | | | | V99V99. | | S99S99.D99D99. | | | | | | | |
| | | | | | | | V99V99.S99S99. | | | | | | | |
| 738 | 9 | TSSWEW | NRGFR | LASGTNGVFF | T99T99.S99S99. | N99N99.R99R99. | L99L99.A99A99. | 18 | 15 | 30 | 63 | Yes | Yes | Yes |
| | | | | | S99S99.W99W99. | G99G99.F99F99. | S99S99.G99G99. | | | | | | | |
| | | | | | E99E99.W99W99. | R99R99. | T99T99.N99N99. | | | | | | | |
| | | | | | | | G99G99.V99V99. | | | | | | | |
| | | | | | | | F99F99.F99F99. | | | | | | | |
| 749 | 9 | AFVWSAV | SQLTL | FELPDHFSFS | A99A99.F99F99. | S99S99.Q99Q99. | F99F99.E99E99. | 21 | 15 | 30 | 66 | Yes | Yes | Yes |
| | | | | | V99V99.W99W99. | L99L99.T99T99. | L99L99.P99P99. | | | | | | | |
| | | | | | S99S99.A99A99. | L99L99. | D99D99.H99H99. | | | | | | | |
| | | | | | V99V99. | | F99F99.S99S99. | | | | | | | |
| | | | | | | | F99F99.S99S99. | | | | | | | |
| 804 | 9 | LQRVVH | VCAAM | VKHVSHLQTV | L99L99.Q99Q99. | V99V99.C99C99. | V88B00.K88B00. | 18 | 15 | 29 | 62 | Yes | Yes | Yes |
| | | | | | R99R99.V99V99. | A99A99.A99A99. | H88B00.V88B00. | | | | | | | |
| | | | | | V99V99.H99H99. | M99M99. | S77B00.H88B00. | | | | | | | |
| | | | | | | | L88B00.Q88B00. | | | | | | | |
| | | | | | | | T88B00.V88B00. | | | | | | | |
| 805 | 9 | CHLVY | KGDGM | AYMTLVDVT | C99C99.H99H99. | K99K99.G99G99. | A99A99.Y99Y99. | 15 | 15 | 27 | 57 | Yes | Yes | Yes |
| | | | | | L99L99.V99V99. | D99D99.G99G99. | M99M99.T99T99. | | | | | | | |
| | | | | | Y99Y99. | M99M99. | L99L99.V99V99. | | | | | | | |
| | | | | | | | D99D99.V99V99. | | | | | | | |
| | | | | | | | T99T99. | | | | | | | |
| 818 | 9 | SWHIVGA | CYTSS | AINPICIAYMALL | S88B00.W99W99. | C99C99.Y99Y99. | A99A99.I99I99. | 21 | 15 | 39 | 75 | Yes | Yes | Yes |
| | | | | | H99H99.I99I99. | T99T99.S99S99. | N99N99.P99P99. | | | | | | | |
| | | | | | V99V99.G99G99. | S99S99. | I99I99.C99C99. | | | | | | | |
| | | | | | A99A99. | | I99I99.A99A99. | | | | | | | |
| | | | | | | | Y99Y99.M99M99. | | | | | | | |
| | | | | | | | A99A99.L99L99. | | | | | | | |
| | | | | | | | L99L99. | | | | | | | |
| 830 | 9 | VTINSN | RHVDV | FSIPTFGYVAPVR | V99V99.T99T99. | R99R99.H99H99. | F99F99.S99S99. | 18 | 15 | 39 | 72 | Yes | Yes | Yes |
| | | | | | I99I99.N99N99. | V99V99.D99D99. | I99I99.P99P99. | | | | | | | |
| | | | | | S88B00.N99N99. | V99V99. | T99T99.F99F99. | | | | | | | |
| | | | | | | | G99G99.Y99Y99. | | | | | | | |
| | | | | | | | V99V99.A99A99. | | | | | | | |
| | | | | | | | P99P99.V99V99. | | | | | | | |
| | | | | | | | R99R99. | | | | | | | |
| 87 | 9 | HDGLVT | DYYER | FISVCI | H99H99.D99D99. | D99D99.Y99Y99. | F99F99.I99I99. | 21 | 15 | 18 | 54 | Yes | Yes | Yes |
| | | | | | G99G99.L99L99. | Y99Y99.E99E99. | S99S99.V99V99. | | | | | | | |
| | | | | | R99R99.V99V99. | R99R99. | C99C99.I99I99. | | | | | | | |
| | | | | | T99T99. | | | | | | | | | |
| 88 | 9 | VFAKVKG | AF | DTNWDYVYPS | V99V99.F99F99. | A99A99.F99F99. | D88B00.T99T99. | 21 | 6 | 30 | 57 | Yes | Yes | Yes |
| | | | | | A99A99.K99K99. | | N99N99.W99W99. | | | | | | | |
| | | | | | V99V99.K99K99. | | D99D99.Y99Y99. | | | | | | | |
| | | | | | G99G99. | | V99V99.Y99Y99. | | | | | | | |
| | | | | | | | P99P99.S99S99. | | | | | | | |
| 882 | 9 | TTCQCCF | VCEFL | AYVRGASVT | T99T99.T99T99. | V99V99.C99C99. | A99A99.Y99Y99. | 21 | 15 | 27 | 63 | Yes | Yes | Yes |
| | | | | | C99C99.Q99Q99. | E99E99.F99F99. | V99V99.R99R99. | | | | | | | |
| | | | | | C99C99.C99C99. | L99L99. | G99G99.A99A99. | | | | | | | |
| | | | | | F99F99. | | S99S99.V99V99. | | | | | | | |
| | | | | | | | T99T99. | | | | | | | |
| 154 | 8 | VRCLDAF | IQLGD | QAFGCWGHV | V99V99.R99R99. | I99I99.Q99Q99. | Q99Q99.A99A99. | 21 | 15 | 27 | 63 | Yes | Yes | Yes |
| | | | | | C99C99.L99L99. | L99L99.G99G99. | F99F99.G99G99. | | | | | | | |
| | | | | | D99D99.A99A99. | D99D99. | C99C99.W99W99. | | | | | | | |
| | | | | | F99F99. | | G99G99.H99H99. | | | | | | | |
| | | | | | | | V99V99. | | | | | | | |
| 159 | 8 | NLCSF | QFSSD | ANTSSMVKPV | N99N99.L99L99. | Q99Q99.F99F99. | A99A99.N99N99. | 15 | 15 | 30 | 60 | Yes | Yes | Yes |
| | | | | | C99C99.S99S99. | S99S99.S99S99. | T99T99.S99S99. | | | | | | | |
| | | | | | F99F99. | D99D99. | S99S99.M99M99. | | | | | | | |
| | | | | | | | V99V99.K99K99. | | | | | | | |
| | | | | | | | P99P99.V99V99. | | | | | | | |
| 225 | 8 | FLNSLVF | TDSYV | AVYLRRGSVA | F99F99.L99L99. | T99T99.D99D99. | A87B00.V99V99. | 21 | 15 | 30 | 66 | Yes | Yes | Yes |
| | | | | | N99N99.S99S99. | S99S99.Y99Y99. | Y99Y99.L99L99. | | | | | | | |
| | | | | | L87B00.V99V99. | V99V99. | R99R99.R99R99. | | | | | | | |
| | | | | | F99F99. | | G99G99.S99S99. | | | | | | | |
| | | | | | | | V99V99.A99A99. | | | | | | | |
| 306 | 8 | SFGLVRF | EAAAG | IYSLDDVGCM | S99S99.F99F99. | E99E99.A99A99. | I99I99.Y99Y99. | 21 | 15 | 30 | 66 | Yes | Yes | Yes |
| | | | | | G99G99.L99L99. | A99A99.A99A99. | S99S99.L99L99. | | | | | | | |
| | | | | | V99V99.R99R99. | G99G99. | D99D99.D99D99. | | | | | | | |
| | | | | | F99F99. | | V99V99.G99G99. | | | | | | | |
| | | | | | | | C99C99.M99M99. | | | | | | | |
| 311 | 8 | GRCYMSS | MAHSL | VDSYY | G99G99.R99R99. | M99M99.A99A99. | V99V99.D99D99. | 21 | 15 | 15 | 51 | Yes | Yes | Yes |
| | | | | | C99C99.Y99Y99. | H99H99.S99S99. | S99S99.Y99Y99. | | | | | | | |
| | | | | | M87B00.S99S99. | L99L99. | Y99Y99. | | | | | | | |
| | | | | | S99S99. | | | | | | | | | |
| 312 | 8 | SVAALRF | YATSR | PLHFHY | S99S99.V99V99. | Y99Y99.A99A99. | P99P99.L99L99. | 21 | 15 | 18 | 54 | Yes | Yes | Yes |
| | | | | | A99A99.A99A99. | T99T99.S99S99. | H99H99.F99F99. | | | | | | | |
| | | | | | L99L99.R99R99. | R99R99. | H99H99.Y99Y99. | | | | | | | |
| | | | | | F99F99. | | | | | | | | | |
| 324 | 8 | GSTGQVY | RDGFI | YHFVAGNVN | G87B00.S87B00. | R99R99.D99D99. | Y99Y99.H99H99. | 20 | 15 | 27 | 62 | Yes | Yes | Yes |
| | | | | | T75B00.G87B00. | G99G99.F99F99. | F99F99.V99V99. | | | | | | | |
| | | | | | Q87B00.V87B00. | I99I99. | A99A99.G99G99. | | | | | | | |
| | | | | | Y87B00. | | N99N99.V99V99. | | | | | | | |
| | | | | | | | N99N99. | | | | | | | |
| 328 | 8 | TSCPFQC | ITWCV | EDMEGY | T99T99.S99S99. | I99I99.T99T99. | E87B00.D87B00. | 21 | 15 | 18 | 54 | Yes | Yes | Yes |
| | | | | | C99C99.P99P99. | W99W99.C99C99. | M99M99.E87B00. | | | | | | | |
| | | | | | F99F99.Q99Q99. | V99V99. | G87B00.Y87B00. | | | | | | | |
| | | | | | C99C99. | | | | | | | | | |
| 339 | 8 | MNRKAR | TDGSL | LVEFL | M99M99.N99N99. | T99T99.D99D99. | L75B00.V75B00. | 18 | 15 | 10 | 43 | Yes | Yes | Yes |
| | | | | | R99R99.K99K99. | G99G99.S99S99. | E75B00.F75B00. | | | | | | | |
| | | | | | A99A99.R99R99. | L99L99. | L75B00. | | | | | | | |
| 341 | 8 | LVCCT | HWFKS | FTSCIT | L99L99.V99V99. | H99H99.W99W99. | F99F99.T99T99. | 21 | 15 | 18 | 54 | Yes | Yes | Yes |
| | | | | | C99C99.C99C99. | F99F99.K99K99. | S99S99.C99C99. | | | | | | | |
| | | | | | S99S99.C99C99. | S99S99. | I99I99.T99T99. | | | | | | | |
| | | | | | T99T99. | | | | | | | | | |
| 348 | 8 | EFVRVFA | LGSHD | TIMQSPSLVH | E99E99.F99F99. | L99L99.G99G99. | T99T99.I99I99. | 21 | 15 | 30 | 66 | Yes | Yes | Yes |
| | | | | | V99V99.R99R99. | S99S99.H99H99. | M99M99.Q99Q99. | | | | | | | |
| | | | | | V99V99.F99F99. | D99D99. | S99S99.P99P99. | | | | | | | |
| | | | | | A99A99. | | S99S99.L99L99. | | | | | | | |
| | | | | | | | V99V99.H99H99. | | | | | | | |
| 403 | 8 | CAYNWFC | VTTSH | VDDFG | C99C99.A99A99. | V99V99.T99T99. | V99V99.D99D99. | 21 | 15 | 18 | 54 | Yes | Yes | Yes |
| | | | | | Y99Y99.N99N99. | T99T99.S99S99. | D99D99.F99F99. | | | | | | | |
| | | | | | W99W99.F99F99. | H99H99. | G99G99.I99I99. | | | | | | | |
| | | | | | C99C99. | | | | | | | | | |
| 438 | 8 | ATCDAFR | TTIDS | SHFNDTTRM | A99A99.T99T99. | T99T99.T99T99. | B00 | 21 | 15 | 0 | 36 | Yes | Yes | Yes |
| | | | | | C99C99.D99D99. | I99I99.D99D99. | | | | | | | | |
| | | | | | A99A99.F99F99. | S99S99. | | | | | | | | |
| | | | | | R99R99. | | | | | | | | | |
| 486 | 8 | TFARCLV | LHFLN | TYTHDGYYLS | T99T99.F99F99. | L99L99.H99H99. | B00 | 21 | 15 | 0 | 36 | Yes | Yes | Yes |
| | | | | | A99A99.R99R99. | F99F99.L99L99. | | | | | | | | |
| | | | | | C99C99.L99L99. | N99N99. | | | | | | | | |
| | | | | | V99V99. | | | | | | | | | |
| 545 | 8 | NILYVFG | GSHKV | NAILSTNTHD | N87B00.I99I99. | G99G99.S99S99. | N99N99.A99A99. | 21 | 15 | 30 | 66 | Yes | Yes | Yes |
| | | | | | L99L99.Y99Y99. | H99H99.K99K99. | I99I99.L99L99. | | | | | | | |
| | | | | | V99V99.F99F99. | V99V99. | S99S99.T99T99. | | | | | | | |
| | | | | | G99G99. | | N99N99.T99T99. | | | | | | | |
| | | | | | | | H99H99.D99D99. | | | | | | | |
| 551 | 8 | HCGCVF | PARCH | SIYLNENVIL | H87B00.I87B00. | P99P99.A99A99. | S99S99.I99I99. | 21 | 15 | 30 | 66 | Yes | Yes | Yes |
| | | | | | C87B00.G87B00. | R99R99.C99C99. | Y99Y99.L99L99. | | | | | | | |
| | | | | | C87B00.V87B00. | H99H99. | N99N99.E99E99. | | | | | | | |
| | | | | | F87B00. | | N99N99.V99V99. | | | | | | | |
| | | | | | | | I87B00.L99L99. | | | | | | | |
| 560 | 8 | KSMIW | VTGGR | VTFHNECIVR | K99K99.S99S99. | V99V99.T99T99. | V99V99.T99T99. | 15 | 15 | 30 | 60 | Yes | Yes | Yes |
| | | | | | M99M99.I99I99. | G99G99.G99G99. | F99F99.H99H99. | | | | | | | |
| | | | | | W99W99. | R99R99. | N99N99.E99E99. | | | | | | | |
| | | | | | | | C99C99.I99I99. | | | | | | | |
| | | | | | | | V99V99.R99R99. | | | | | | | |
| 581 | 8 | GTPGR | SCVAS | RDTAFSLCQNGWT | G99G99.T99T99. | S99S99.C99C99. | R99R99.D99D99. | 15 | 15 | 39 | 69 | Yes | Yes | Yes |
| | | | | | P99P99.G99G99. | V99V99.A99A99. | T99T99.A99A99. | | | | | | | |
| | | | | | R99R99. | S99S99. | F99F99.S99S99. | | | | | | | |
| | | | | | | | L99L99.C99C99. | | | | | | | |
| | | | | | | | Q99Q99.N99N99. | | | | | | | |
| | | | | | | | G99G99.W99W99. | | | | | | | |
| | | | | | | | T99T99. | | | | | | | |
| 583 | 8 | AHGGLVY | RGGVL | AYYELG | A99A99.H99H99. | R99R99.G99G99. | A99A99.Y99Y99. | 21 | 15 | 18 | 54 | Yes | Yes | Yes |
| | | | | | G99G99.G99G99. | G99G99.V99V99. | Y99Y99.E99E99. | | | | | | | |
| | | | | | L99L99.V99V99. | L99L99. | L99L99.G99G99. | | | | | | | |
| | | | | | Y99Y99. | | | | | | | | | |
| 585 | 8 | GTRGCIC | HSCTD | LFLDSSGLVF | G99G99.T99T99. | H99H99.S99S99. | L87B00.F99F99. | 21 | 15 | 30 | 66 | Yes | Yes | Yes |
| | | | | | R99R99.G99G99. | C99C99.T99T99. | L99L99.D87B00. | | | | | | | |
| | | | | | C99C99.I99I99. | D99D99. | S99S99.S87B00. | | | | | | | |
| | | | | | C99C99. | | G99G99.L99L99. | | | | | | | |
| | | | | | | | V99V99.F99F99. | | | | | | | |
| 587 | 8 | GSWQWM | SVSCF | VVGRCTNMHW | G99G99.S99S99. | S99S99.V99V99. | V99V99.V99V99. | 21 | 15 | 30 | 66 | Yes | Yes | Yes |
| | | | | | L99L99.W99W99. | S99S99.C99C99. | G99G99.R99R99. | | | | | | | |
| | | | | | Q99Q99.W99W99. | F99F99. | C99C99.T99T99. | | | | | | | |
| | | | | | M99M99. | | N99N99.M99M99. | | | | | | | |
| | | | | | | | H99H99.W99W99. | | | | | | | |
| 590 | 8 | GQGDAFC | HAVSR | HYLNVSCSL | G99G99.Q99Q99. | H99H99.A87B00. | H99H99.Y99Y99. | 21 | 15 | 27 | 63 | Yes | Yes | Yes |
| | | | | | G99G99.D99D99. | V99V99.S99S99. | L99L99.N99N99. | | | | | | | |
| | | | | | A99A99.F99F99. | R99R99. | V99V99.S99S99. | | | | | | | |
| | | | | | C99C99. | | C99C99.S99S99. | | | | | | | |
| | | | | | | | L99L99. | | | | | | | |
| 599 | 8 | SLVNVVW | NVPDL | ATFTTFVVT | S99S99.L99L99. | N99N99.V99V99. | A99A99.T99T99. | 21 | 15 | 27 | 63 | Yes | Yes | Yes |
| | | | | | V99V99.N99N99. | P99P99.D99D99. | F99F99.T99T99. | | | | | | | |
| | | | | | V99V99.V99V99. | L99L99. | T99T99.F99F99. | | | | | | | |
| | | | | | W99W99. | | V99V99.V99V99. | | | | | | | |
| | | | | | | | T99T99. | | | | | | | |
| 646 | 8 | SVTVRA | LYSRG | HYSIPTEHCL | S87B00.V99V99. | L99L99.Y99Y99. | H99H99.Y99Y99. | 18 | 15 | 30 | 63 | Yes | Yes | Yes |
| | | | | | T99T99.V99V99. | S99S99.R99R99. | S99S99.I99I99. | | | | | | | |
| | | | | | R99R99.A99A99. | G99G99. | P99P99.T99T99. | | | | | | | |
| | | | | | | | E99E99.H99H99. | | | | | | | |
| | | | | | | | C99C99.L99L99. | | | | | | | |
| 649 | 8 | PYLGRLA | GYACA | IALSLSGFIL | P99P99.Y99Y99. | G99G99.Y99Y99. | I99I99.A99A99. | 21 | 15 | 30 | 66 | Yes | Yes | Yes |
| | | | | | L99L99.G99G99. | A99A99.C99C99. | L99L99.S99S99. | | | | | | | |
| | | | | | R87B00.L99L99. | A99A99. | L99L99.S99S99. | | | | | | | |
| | | | | | A99A99. | | G99G99.F99F99. | | | | | | | |
| | | | | | | | I99I99.L99L99. | | | | | | | |
| 652 | 8 | GRGCCVY | YDNVQ | ARYTAVAVV | G99G99.R99R99. | Y99Y99.D99D99. | A99A99.R99R99. | 21 | 15 | 27 | 63 | Yes | Yes | Yes |
| | | | | | G99G99.C99C99. | N99N99.V99V99. | Y99Y99.T99T99. | | | | | | | |
| | | | | | C99C99.V99V99. | Q99Q99. | A99A99.V99V99. | | | | | | | |
| | | | | | Y99Y99. | | A99A99.V99V99. | | | | | | | |
| | | | | | | | V99V99. | | | | | | | |
| 662 | 8 | PRCYCVW | PGGGE | PCWSHRLGVF | P99P99.R99R99. | P99P99.G99G99. | P99P99.C99C99. | 21 | 15 | 30 | 66 | Yes | Yes | Yes |
| | | | | | C99C99.Y99Y99. | G99G99.G99G99. | W99W99.S99S99. | | | | | | | |
| | | | | | C99C99.V99V99. | E99E99. | H99H99.R99R99. | | | | | | | |
| | | | | | W99W99. | | L99L99.G99G99. | | | | | | | |
| | | | | | | | V99V99.F99F99. | | | | | | | |
| 668 | 8 | IS | AHSSC | VHVSVHSGLVCIC | B00 | A99A99.H99H99. | V99V99.H99H99. | 0 | 15 | 39 | 54 | Yes | Yes | Yes |
| | | | | | | S99S99.S99S99. | V99V99.S99S99. | | | | | | | |
| | | | | | | C99C99. | V99V99.H99H99. | | | | | | | |
| | | | | | | | S99S99.G99G99. | | | | | | | |
| | | | | | | | L99L99.V99V99. | | | | | | | |
| | | | | | | | C99C99.I99I99. | | | | | | | |
| | | | | | | | C99C99. | | | | | | | |
| 669 | 8 | LSAVCF | HDYTA | IVFNPIGGVL | L99L99.S99S99. | H99H99.D99D99. | I99I99.V99V99. | 18 | 15 | 30 | 63 | Yes | Yes | Yes |
| | | | | | A99A99.V99V99. | Y99Y99.T99T99. | F99F99.N99N99. | | | | | | | |
| | | | | | C99C99.F99F99. | A99A99. | P99P99.I99I99. | | | | | | | |
| | | | | | | | G99G99.G99G99. | | | | | | | |
| | | | | | | | V99V99.L99L99. | | | | | | | |
| 674 | 8 | FSVVRCS | LHAFG | RIVFDEYHIA | F99F99.S99S99. | L99L99.H99H99. | R99R99.I99I99. | 21 | 15 | 30 | 66 | Yes | Yes | Yes |
| | | | | | V99V99.V99V99. | A99A99.F99F99. | V99V99.F99F99. | | | | | | | |
| | | | | | R99R99.C99C99. | G99G99. | D99D99.E99E99. | | | | | | | |
| | | | | | S99S99. | | Y99Y99.H99H99. | | | | | | | |
| | | | | | | | I99I99.A99A99. | | | | | | | |
| 680 | 8 | LSVLTQR | SHLGP | ATVLVPSYHCAGC | L99L99.S99S99. | S99S99.H99H99. | A99A99.T99T99. | 21 | 15 | 39 | 75 | Yes | Yes | Yes |
| | | | | | V99V99.L99L99. | L99L99.G99G99. | V99V99.L99L99. | | | | | | | |
| | | | | | T99T99.Q87B00. | P99P99. | V99V99.P99P99. | | | | | | | |
| | | | | | R99R99. | | S99S99.Y99Y99. | | | | | | | |
| | | | | | | | H99H99.C99C99. | | | | | | | |
| | | | | | | | A99A99.G99G99. | | | | | | | |
| | | | | | | | C99C99. | | | | | | | |
| 683 | 8 | ARSITL | PGDRF | FSWFHIDALL | A99A99.R99R99. | P99P99.G99G99. | F99F99.S99S99. | 18 | 15 | 30 | 63 | Yes | Yes | Yes |
| | | | | | S99S99.I99I99. | D99D99.R99R99. | W99W99.F99F99. | | | | | | | |
| | | | | | T99T99.L99L99. | F99F99. | H99H99.I99I99. | | | | | | | |
| | | | | | | | D99D99.A99A99. | | | | | | | |
| | | | | | | | L99L99.L99L99. | | | | | | | |
| 711 | 8 | FGVYYLG | RMC | HCFSFTRNNLPVE | F99F99.G99G99. | R99R99.M99M99. | H99H99.C99C99. | 21 | 9 | 39 | 69 | Yes | Yes | Yes |
| | | | | | V99V99.Y99Y99. | C99C99. | F99F99.S99S99. | | | | | | | |
| | | | | | Y99Y99.L99L99. | | F87B00.T99T99. | | | | | | | |
| | | | | | G99G99. | | R99R99.N99N99. | | | | | | | |
| | | | | | | | N99N99.L99L99. | | | | | | | |
| | | | | | | | P99P99.V99V99. | | | | | | | |
| | | | | | | | E99E99. | | | | | | | |
| 732 | 8 | TGVGSVF | RGGPG | AYMDIHTCVN | T87B00.G99G99. | R99R99.G99G99. | A99A99.Y99Y99. | 21 | 15 | 30 | 66 | Yes | Yes | Yes |
| | | | | | V99V99.G99G99. | G99G99.P99P99. | M99M99.D99D99. | | | | | | | |
| | | | | | S99S99.V99V99. | G99G99. | I99I99.H99H99. | | | | | | | |
| | | | | | F99F99. | | T99T99.C99C99. | | | | | | | |
| | | | | | | | V99V99.N99N99. | | | | | | | |
| 741 | 8 | RLTRTIG | SCLAD | TDLPAEFLCA | R99R99.L99L99. | S99S99.C99C99. | T99T99.D99D99. | 21 | 15 | 30 | 66 | Yes | Yes | Yes |
| | | | | | T87B00.R99R99. | L99L99.A99A99. | L99L99.P99P99. | | | | | | | |
| | | | | | T99T99.I99I99. | D99D99. | A99A99.E99E99. | | | | | | | |
| | | | | | G99G99. | | F99F99.L99L99. | | | | | | | |
| | | | | | | | C99C99.A99A99. | | | | | | | |
| 752 | 8 | SADVAPT | GFCWG | CFDGRF | S87B00.A99A99. | G99G99.F99F99. | C99C99.F99F99. | 21 | 15 | 18 | 54 | Yes | Yes | Yes |
| | | | | | D99D99.V99V99. | C99C99.W99W99. | D99D99.G99G99. | | | | | | | |
| | | | | | A99A99.P99P99. | G99G99. | R99R99.F99F99. | | | | | | | |
| | | | | | T99T99. | | | | | | | | | |
| 755 | 8 | MCDRFIW | FDNNF | VTPIW | M87B00.C99C99. | F99F99.D99D99. | V99V99.T99T99. | 21 | 15 | 15 | 51 | Yes | Yes | Yes |
| | | | | | D99D99.R99R99. | N99N99.N99N99. | P99P99.I99I99. | | | | | | | |
| | | | | | F99F99.I99I99. | F99F99. | W99W99. | | | | | | | |
| | | | | | W99W99. | | | | | | | | | |
| 768 | 8 | AGFLLIA | RAATP | TCLSDCHLCC | A99A99.G99G99. | R99R99.A87B00. | T99T99.C99C99. | 21 | 15 | 30 | 66 | Yes | Yes | Yes |
| | | | | | F99F99.L99L99. | A99A99.T99T99. | L99L99.S99S99. | | | | | | | |
| | | | | | L99L99.I99I99. | P99P99. | D99D99.C99C99. | | | | | | | |
| | | | | | A99A99. | | H99H99.L99L99. | | | | | | | |
| | | | | | | | C99C99.C99C99. | | | | | | | |
| 784 | 8 | IEMVPLG | GTTGW | MLWDMDACH | I99I99.E99E99. | G99G99.T99T99. | M75B00.L75B00. | 21 | 15 | 19 | 55 | Yes | Yes | Yes |
| | | | | | M99M99.V99V99. | T99T99.G99G99. | W75B00.D75B00. | | | | | | | |
| | | | | | P99P99.L99L99. | W99W99. | M75B00.D75B00. | | | | | | | |
| | | | | | G99G99. | | A75B00.C75B00. | | | | | | | |
| | | | | | | | H99H99. | | | | | | | |
| 785 | 8 | NGRVNVS | FGGLR | AFVLPHRENTDVL | N99N99.G99G99. | F99F99.G99G99. | A99A99.F99F99. | 21 | 15 | 39 | 75 | Yes | Yes | Yes |
| | | | | | R99R99.V99V99. | G99G99.L99L99. | V99V99.L99L99. | | | | | | | |
| | | | | | N99N99.V99V99. | R99R99. | P99P99.H99H99. | | | | | | | |
| | | | | | S99S99. | | R99R99.E99E99. | | | | | | | |
| | | | | | | | N99N99.T99T99. | | | | | | | |
| | | | | | | | D99D99.V99V99. | | | | | | | |
| | | | | | | | L99L99. | | | | | | | |
| 791 | 8 | VTSLIQH | LALLD | VTRFAY | V99V99.T99T99. | L99L99.A99A99. | V99V99.T99T99. | 21 | 15 | 18 | 54 | Yes | Yes | Yes |
| | | | | | S99S99.L99L99. | L99L99.L99L99. | R99R99.F99F99. | | | | | | | |
| | | | | | I99I99.Q99Q99. | D99D99. | A99A99.Y99Y99. | | | | | | | |
| | | | | | H99H99. | | | | | | | | | |
| 802 | 8 | SVASWCM | RSLLS | VIVVHSGSTSEAC | S99S99.V99V99. | R99R99.S99S99. | V99V99.I99I99. | 21 | 15 | 39 | 75 | Yes | Yes | Yes |
| | | | | | A99A99.S99S99. | L99L99.L99L99. | V99V99.V87B00. | | | | | | | |
| | | | | | W99W99.C99C99. | S99S99. | H99H99.S99S99. | | | | | | | |
| | | | | | M99M99. | | G99G99.S99S99. | | | | | | | |
| | | | | | | | T99T99.S99S99. | | | | | | | |
| | | | | | | | E99E99.A99A99. | | | | | | | |
| | | | | | | | C99C99. | | | | | | | |
| 806 | 8 | VVSHCVF | CARAG | AYLSIDDIIY | V99V99.V99V99. | C99C99.A99A99. | A99A99.Y99Y99. | 21 | 15 | 30 | 66 | Yes | Yes | Yes |
| | | | | | S99S99.H99H99. | R99R99.A99A99. | L99L99.S99S99. | | | | | | | |
| | | | | | C99C99.V99V99. | G99G99. | I99I99.D99D99. | | | | | | | |
| | | | | | F99F99. | | D99D99.I99I99. | | | | | | | |
| | | | | | | | I99I99.Y99Y99. | | | | | | | |
| 827 | 8 | CASNLLG | CLPCQ | FTWSSLGRR | C99C99.A99A99. | C99C99.L99L99. | F99F99.T99T99. | 21 | 15 | 27 | 63 | Yes | Yes | Yes |
| | | | | | S99S99.N99N99. | P99P99.C99C99. | W99W99.S99S99. | | | | | | | |
| | | | | | L99L99.L99L99. | Q99Q99. | S99S99.L99L99. | | | | | | | |
| | | | | | G99G99. | | G99G99.R99R99. | | | | | | | |
| | | | | | | | R99R99. | | | | | | | |
| 829 | 8 | VHHGMVF | LAGIE | GYLCGRDVS | V99V99.H99H99. | L99L99.A99A99. | G99G99.Y99Y99. | 21 | 15 | 27 | 63 | Yes | Yes | Yes |
| | | | | | H99H99.G99G99. | G99G99.I99I99. | L99L99.C99C99. | | | | | | | |
| | | | | | M99M99.V99V99. | E99E99. | G99G99.R99R99. | | | | | | | |
| | | | | | F99F99. | | D99D99.V99V99. | | | | | | | |
| | | | | | | | S99S99. | | | | | | | |
| 83 | 8 | SKGVMA | NMGIT | LILSNSILM | S87B00.K99K99. | N99N99.M99M99. | L99L99.I99I99. | 21 | 15 | 27 | 63 | Yes | Yes | Yes |
| | | | | | G99G99.V99V99. | G99G99.I99I99. | L99L99.S99S99. | | | | | | | |
| | | | | | S99S99.M99M99. | T99T99. | N99N99.S99S99. | | | | | | | |
| | | | | | A99A99. | | I99I99.L99L99. | | | | | | | |
| | | | | | | | M99M99. | | | | | | | |
| 839 | 8 | FGLGPGW | LPIGH | VSQVGG | F99F99.G99G99. | L99L99.P99P99. | V99V99.S99S99. | 21 | 15 | 18 | 54 | Yes | Yes | Yes |
| | | | | | L99L99.G99G99. | I99I99.G99G99. | Q99Q99.V99V99. | | | | | | | |
| | | | | | P99P99.G99G99. | H99H99. | G99G99.G99G99. | | | | | | | |
| | | | | | W99W99. | | | | | | | | | |
| 842 | 8 | RADSYIW | SCGRD | LYSWSDSCLF | R99R99.A99A99. | S99S99.C99C99. | L99L99.Y99Y99. | 21 | 15 | 30 | 66 | Yes | Yes | Yes |
| | | | | | D99D99.S99S99. | G99G99.R99R99. | S99S99.W99W99. | | | | | | | |
| | | | | | Y99Y99.I99I99. | D99D99. | S99S99.D99D99. | | | | | | | |
| | | | | | W99W99. | | S99S99.C99C99. | | | | | | | |
| | | | | | | | L99L99.F99F99. | | | | | | | |
| 844 | 8 | LLRYNTY | PVFGS | SMLGCS | L99L99.L99L99. | P99P99.V99V99. | S99S99.M99M99. | 21 | 15 | 18 | 54 | Yes | Yes | Yes |
| | | | | | R99R99.Y99Y99. | F99F99.G99G99. | L99L99.G99G99. | | | | | | | |
| | | | | | N99N99.T99T99. | S99S99. | C99C99.S99S99. | | | | | | | |
| | | | | | Y99Y99. | | | | | | | | | |
| 86 | 8 | RFVFSLY | AFDVD | VPPHYHELVK | R99R99.F99F99. | A99A99.F99F99. | V99V99.P99P99. | 21 | 15 | 30 | 66 | Yes | Yes | Yes |
| | | | | | V99V99.F99F99. | D99D99.V99V99. | P99P99.H99H99. | | | | | | | |
| | | | | | S99S99.L99L99. | D99D99. | Y99Y99.H99H99. | | | | | | | |
| | | | | | Y99Y99. | | E99E99.L99L99. | | | | | | | |
| | | | | | | | V99V99.K99K99. | | | | | | | |
| 863 | 8 | WIKWLHV | SMCGH | CPCCFS | W99W99.I87B00. | S99S99.M99M99. | B00 | 21 | 15 | 0 | 36 | Yes | Yes | Yes |
| | | | | | K99K99.W99W99. | C99C99.G99G99. | | | | | | | | |
| | | | | | L99L99.H99H99. | H99H99. | | | | | | | | |
| | | | | | V99V99. | | | | | | | | | |
| 874 | 8 | FLMERHT | VILAS | FPAIYPDWR | F99F99.L99L99. | V99V99.I99I99. | F99F99.P99P99. | 21 | 15 | 27 | 63 | Yes | Yes | Yes |
| | | | | | M99M99.E99E99. | L99L99.A99A99. | A99A99.I99I99. | | | | | | | |
| | | | | | R99R99.H99H99. | S99S99. | Y99Y99.P99P99. | | | | | | | |
| | | | | | T99T99. | | D99D99.W99W99. | | | | | | | |
| | | | | | | | R99R99. | | | | | | | |
| 880 | 8 | GSMIVTL | HGSST | AVLSLTNMTLLVQ | G99G99.S99S99. | H99H99.G99G99. | A99A99.V99V99. | 21 | 15 | 39 | 75 | Yes | Yes | Yes |
| | | | | | M99M99.I99I99. | S99S99.S99S99. | L99L99.S99S99. | | | | | | | |
| | | | | | V99V99.T99T99. | T99T99. | L99L99.T99T99. | | | | | | | |
| | | | | | L99L99. | | N99N99.M99M99. | | | | | | | |
| | | | | | | | T99T99.L99L99. | | | | | | | |
| | | | | | | | L99L99.V99V99. | | | | | | | |
| | | | | | | | Q99Q99. | | | | | | | |
| 883 | 8 | VFGAYNV | LLGTN | LGPMHHDGGL | V99V99.F99F99. | L99L99.L99L99. | L99L99.G99G99. | 21 | 15 | 30 | 66 | Yes | Yes | Yes |
| | | | | | G99G99.A99A99. | G99G99.T99T99. | P99P99.M99M99. | | | | | | | |
| | | | | | Y99Y99.N99N99. | N99N99. | H99H99.H99H99. | | | | | | | |
| | | | | | V99V99. | | D99D99.G99G99. | | | | | | | |
| | | | | | | | G99G99.L99L99. | | | | | | | |
| 890 | 8 | FIRRRVY | SASFS | YALADYGLVF | F99F99.I99I99. | S99S99.A99A99. | Y99Y99.A99A99. | 21 | 15 | 30 | 66 | Yes | Yes | Yes |
| | | | | | R99R99.R99R99. | S99S99.F99F99. | L99L99.A99A99. | | | | | | | |
| | | | | | R99R99.V99V99. | S99S99. | D99D99.Y99Y99. | | | | | | | |
| | | | | | Y99Y99. | | G99G99.L99L99. | | | | | | | |
| | | | | | | | V99V99.F99F99. | | | | | | | |
| 897 | 8 | LIRSVVW | RCGAV | YLYSHFSAVV | L99L99.I99I99. | R99R99.C99C99. | Y99Y99.L99L99. | 21 | 15 | 30 | 66 | Yes | Yes | Yes |
| | | | | | R99R99.S99S99. | G99G99.A99A99. | Y99Y99.S99S99. | | | | | | | |
| | | | | | V99V99.V99V99. | V99V99. | H99H99.F99F99. | | | | | | | |
| | | | | | W99W99. | | S99S99.A99A99. | | | | | | | |
| | | | | | | | V99V99.V99V99. | | | | | | | |
| 98 | 8 | ALCVFGG | LCGCC | AYYSKAALVGRVL | A99A99.L99L99. | L99L99.C99C99. | A99A99.Y99Y99. | 21 | 15 | 39 | 75 | Yes | Yes | Yes |
| | | | | | C99C99.V99V99. | G99G99.C99C99. | Y99Y99.S99S99. | | | | | | | |
| | | | | | F99F99.G99G99. | C99C99. | K99K99.A99A99. | | | | | | | |
| | | | | | G99G99. | | A99A99.L99L99. | | | | | | | |
| | | | | | | | V99V99.G99G99. | | | | | | | |
| | | | | | | | R99R99.V99V99. | | | | | | | |
| | | | | | | | L99L99. | | | | | | | |
| 128 | 7 | FVLCTRS | TGFIC | FHARSTMAGQDIY | F99F99.V99V99. | T99T99.G99G99. | F99F99.H99H99. | 21 | 15 | 39 | 75 | Yes | Yes | Yes |
| | | | | | L99L99.C99C99. | F99F99.I99I99. | A99A99.R99R99. | | | | | | | |
| | | | | | T99T99.R99R99. | C99C99. | S99S99.T99T99. | | | | | | | |
| | | | | | S99S99. | | M99M99.A99A99. | | | | | | | |
| | | | | | | | G99G99.Q99Q99. | | | | | | | |
| | | | | | | | D99D99.I99I99. | | | | | | | |
| | | | | | | | Y99Y99. | | | | | | | |
| 156 | 7 | HYLKVFG | MQLHG | AAYVSRSVD | H99H99.Y85B00. | M99M99.Q99Q99. | A99A99.A99A99. | 21 | 15 | 27 | 63 | Yes | Yes | Yes |
| | | | | | L99L99.K99K99. | L99L99.H99H99. | Y99Y99.V99V99. | | | | | | | |
| | | | | | V99V99.F99F99. | G99G99. | S99S99.R99R99. | | | | | | | |
| | | | | | G99G99. | | S99S99.V99V99. | | | | | | | |
| | | | | | | | D99D99. | | | | | | | |
| 166 | 7 | VVLTFTD | GPQFC | WPWTI | V99V99.V99V99. | G99G99.P99P99. | W99W99.P99P99. | 21 | 15 | 15 | 51 | Yes | Yes | Yes |
| | | | | | L99L99.T99T99. | Q99Q99.F99F99. | W99W99.T99T99. | | | | | | | |
| | | | | | F99F99.T99T99. | C99C99. | I99I99. | | | | | | | |
| | | | | | D99D99. | | | | | | | | | |
| 188 | 7 | LYSYLAI | SRVQY | SCSSDI | L99L99.Y99Y99. | S99S99.R99R99. | S99S99.C99C99. | 21 | 15 | 18 | 54 | Yes | Yes | Yes |
| | | | | | S99S99.Y99Y99. | V99V99.Q99Q99. | S99S99.S99S99. | | | | | | | |
| | | | | | L99L99.A99A99. | Y99Y99. | D99D99.I99I99. | | | | | | | |
| | | | | | I99I99. | | | | | | | | | |
| 250 | 7 | LVH | SYGGY | SNLEGT | L99L99.V99V99. | S99S99.Y99Y99. | S99S99.N99N99. | 9 | 15 | 18 | 42 | Yes | Yes | Yes |
| | | | | | H99H99. | G99G99.G99G99. | L99L99.E99E99. | | | | | | | |
| | | | | | | Y99Y99. | G99G99.T99T99. | | | | | | | |
| 265 | 7 | MVMRCVF | QSGVG | VHLASSLEFL | M99M99.V99V99. | Q99Q99.S99S99. | V99V99.H99H99. | 21 | 15 | 30 | 66 | Yes | Yes | Yes |
| | | | | | M99M99.R99R99. | G99G99.V99V99. | L99L99.A99A99. | | | | | | | |
| | | | | | C99C99.V99V99. | G99G99. | S99S99.S99S99. | | | | | | | |
| | | | | | F99F99. | | L99L99.E99E99. | | | | | | | |
| | | | | | | | F99F99.L99L99. | | | | | | | |
| 289 | 7 | MDI | RHTFV | LDSIY | M99M99.D99D99. | R99R99.H99H99. | L99L99.D99D99. | 9 | 15 | 15 | 39 | Yes | Yes | Yes |
| | | | | | I99I99. | T99T99.F99F99. | S99S99.I99I99. | | | | | | | |
| | | | | | | V99V99. | Y99Y99. | | | | | | | |
| 297 | 7 | GRAYYVC | RRDDD | YVYEESFRHPVVR | G99G99.R99R99. | R99R99.R99R99. | B00 | 21 | 15 | 0 | 36 | Yes | Yes | Yes |
| | | | | | A99A99.Y99Y99. | D99D99.D99D99. | | | | | | | | |
| | | | | | Y99Y99.V99V99. | D99D99. | | | | | | | | |
| | | | | | C99C99. | | | | | | | | | |
| 304 | 7 | DMSGVFI | AVSCC | ARFLSISARV | D99D99.M71B00. | A99A99.V99V99. | A99A99.R99R99. | 20 | 15 | 30 | 65 | Yes | Yes | Yes |
| | | | | | S85B00.G85B00. | S99S99.C99C99. | F99F99.L99L99. | | | | | | | |
| | | | | | V85B00.F85B00. | C99C99. | S99S99.I99I99. | | | | | | | |
| | | | | | I85B00. | | S99S99.A99A99. | | | | | | | |
| | | | | | | | R99R99.V99V99. | | | | | | | |
| 322 | 7 | YFKCLVY | NLDDY | VCLLRTVSPIHAV | Y99Y99.F99F99. | N99N99.L99L99. | V99V99.C99C99. | 21 | 15 | 39 | 75 | Yes | Yes | Yes |
| | | | | | K85B00.C99C99. | D99D99.D99D99. | L99L99.L99L99. | | | | | | | |
| | | | | | L99L99.V99V99. | Y99Y99. | R99R99.T99T99. | | | | | | | |
| | | | | | Y99Y99. | | V99V99.S99S99. | | | | | | | |
| | | | | | | | P99P99.I99I99. | | | | | | | |
| | | | | | | | H99H99.A99A99. | | | | | | | |
| | | | | | | | V99V99. | | | | | | | |
| 345 | 7 | LILRWSV | LRSCC | QYFIRDYPL | L99L99.I99I99. | L99L99.R99R99. | Q99Q99.Y99Y99. | 21 | 15 | 27 | 63 | Yes | Yes | Yes |
| | | | | | L99L99.R99R99. | S99S99.C99C99. | F99F99.I99I99. | | | | | | | |
| | | | | | W99W99.S99S99. | C99C99. | R99R99.D99D99. | | | | | | | |
| | | | | | V99V99. | | Y99Y99.P99P99. | | | | | | | |
| | | | | | | | L99L99. | | | | | | | |
| 354 | 7 | STHTLLA | CYQGA | HDIYSNDGLVVIG | S99S99.T99T99. | C99C99.Y99Y99. | H99H99.D99D99. | 21 | 15 | 39 | 75 | Yes | Yes | Yes |
| | | | | | H99H99.T99T99. | Q99Q99.G99G99. | I99I99.Y99Y99. | | | | | | | |
| | | | | | L99L99.L99L99. | A99A99. | S99S99.N99N99. | | | | | | | |
| | | | | | A99A99. | | D99D99.G99G99. | | | | | | | |
| | | | | | | | L99L99.V99V99. | | | | | | | |
| | | | | | | | V99V99.I99I99. | | | | | | | |
| | | | | | | | G99G99. | | | | | | | |
| 366 | 7 | HSIAQYY | TVQSR | FPAVNSESCF | H99H99.S99S99. | T99T99.V99V99. | F99F99.P99P99. | 21 | 15 | 30 | 66 | Yes | Yes | Yes |
| | | | | | I99I99.A99A99. | Q99Q99.S99S99. | A99A99.V99V99. | | | | | | | |
| | | | | | Q99Q99.Y99Y99. | R99R99. | N99N99.S99S99. | | | | | | | |
| | | | | | Y99Y99. | | E99E99.S99S99. | | | | | | | |
| | | | | | | | C99C99.F99F99. | | | | | | | |
| 376 | 7 | RLPCLVY | VDCTT | YTFVSVGCE | R99R99.L99L99. | V99V99.D99D99. | Y57I2.T71B00. | 21 | 15 | 17 | 53 | Yes | Yes | Yes |
| | | | | | P99P99.C99C99. | C99C99.T99T99. | F42B00.V57B00. | | | | | | | |
| | | | | | L99L99.V99V99. | T99T99. | S57B00.V57B00. | | | | | | | |
| | | | | | Y99Y99. | | G57B00.C57B00. | | | | | | | |
| | | | | | | | E57B00. | | | | | | | |
| 419 | 7 | VMGIVSG | LDAYR | ITRWSM | V99V99.M99M99. | L99L99.D99D99. | I99I99.T99T99. | 21 | 15 | 18 | 54 | Yes | Yes | Yes |
| | | | | | G99G99.I99I99. | A99A99.Y99Y99. | R99R99.W99W99. | | | | | | | |
| | | | | | V99V99.S99S99. | R99R99. | S99S99.M99M99. | | | | | | | |
| | | | | | G99G99. | | | | | | | | | |
| 43 | 7 | WPRRPLG | MWSGS | HCPDPNFSPVLIV | W99W99.P99P99. | M99M99.W99W99. | H99H99.C99C99. | 21 | 15 | 39 | 75 | Yes | Yes | Yes |
| | | | | | R99R99.R99R99. | S99S99.G99G99. | P99P99.D99D99. | | | | | | | |
| | | | | | P99P99.L99L99. | S99S99. | P99P99.N99N99. | | | | | | | |
| | | | | | G99G99. | | F99F99.S99S99. | | | | | | | |
| | | | | | | | P99P99.V99V99. | | | | | | | |
| | | | | | | | L99L99.I99I99. | | | | | | | |
| | | | | | | | V99V99. | | | | | | | |
| 431 | 7 | PSRPVVY | HDGLI | VFFVNGSGTL | P99P99.S99S99. | H99H99.D99D99. | V99V99.F99F99. | 21 | 15 | 30 | 66 | Yes | Yes | Yes |
| | | | | | R99R99.P99P99. | G99G99.L99L99. | F99F99.V99V99. | | | | | | | |
| | | | | | V99V99.V99V99. | I99I99. | N99N99.G99G99. | | | | | | | |
| | | | | | Y99Y99. | | S99S99.G99G99. | | | | | | | |
| | | | | | | | T99T99.L99L99. | | | | | | | |
| 454 | 7 | WGSSPVS | QYAGG | WYSCLQ | W99W99.G99G99. | Q99Q99.Y99Y99. | W99W99.Y99Y99. | 21 | 15 | 18 | 54 | Yes | Yes | Yes |
| | | | | | S85B00.S99S99. | A99A99.G99G99. | S99S99.C99C99. | | | | | | | |
| | | | | | P99P99.V99V99. | G99G99. | L99L99.Q99Q99. | | | | | | | |
| | | | | | S99S99. | | | | | | | | | |
| 455 | 7 | CWRHMFV | CDSGN | GILCYDGFV | C99C99.W99W99. | C99C99.D99D99. | G99G99.I99I99. | 21 | 15 | 27 | 63 | Yes | Yes | Yes |
| | | | | | R99R99.H99H99. | S99S99.G99G99. | L99L99.C99C99. | | | | | | | |
| | | | | | M99M99.F99F99. | N99N99. | Y99Y99.D99D99. | | | | | | | |
| | | | | | V99V99. | | G99G99.F85B00. | | | | | | | |
| | | | | | | | V85B00. | | | | | | | |
| 469 | 7 | YVGSNVY | TGHPN | AFFFVYDVS | Y99Y99.V99V99. | T99T99.G99G99. | A99A99.F99F99. | 21 | 15 | 27 | 63 | Yes | Yes | Yes |
| | | | | | G99G99.S99S99. | H99H99.P99P99. | F99F99.F99F99. | | | | | | | |
| | | | | | N99N99.V99V99. | N99N99. | V99V99.Y99Y99. | | | | | | | |
| | | | | | Y99Y99. | | D99D99.V99V99. | | | | | | | |
| | | | | | | | S99S99. | | | | | | | |
| 481 | 7 | GFNVVLW | GSRLI | VLAFKCHGGFECC | G99G99.F99F99. | G99G99.S99S99. | V99V99.L99L99. | 21 | 15 | 39 | 75 | Yes | Yes | Yes |
| | | | | | N99N99.V99V99. | R99R99.L99L99. | A99A99.F99F99. | | | | | | | |
| | | | | | V99V99.L99L99. | I99I99. | K99K99.C99C99. | | | | | | | |
| | | | | | W99W99. | | H99H99.G99G99. | | | | | | | |
| | | | | | | | G99G99.F99F99. | | | | | | | |
| | | | | | | | E99E99.C99C99. | | | | | | | |
| | | | | | | | C99C99. | | | | | | | |
| 497 | 7 | EYMRIMI | TWHMH | QLLQPTFHVT | E99E99.Y99Y99. | T99T99.W99W99. | Q99Q99.L99L99. | 21 | 15 | 30 | 66 | Yes | Yes | Yes |
| | | | | | M99M99.R99R99. | H99H99.M99M99. | L99L99.Q99Q99. | | | | | | | |
| | | | | | I99I99.M99M99. | H99H99. | P99P99.T99T99. | | | | | | | |
| | | | | | I99I99. | | F99F99.H99H99. | | | | | | | |
| | | | | | | | V99V99.T99T99. | | | | | | | |
| 500 | 7 | YFERIYC | IVACS | ATGSTA | Y99Y99.F99F99. | I99I99.V99V99. | A99A99.T99T99. | 21 | 15 | 18 | 54 | Yes | Yes | Yes |
| | | | | | E99E99.R99R99. | A99A99.C99C99. | G99G99.S99S99. | | | | | | | |
| | | | | | I99I99.Y99Y99. | S99S99. | T99T99.A99A99. | | | | | | | |
| | | | | | C99C99. | | | | | | | | | |
| 527 | 7 | LRSSWWGR | GGPFT | SGPDTTLFRL | L99L99.R99R99. | G99G99.G99G99. | S99S99.G99G99. | 21 | 15 | 30 | 66 | Yes | Yes | Yes |
| | | | | | S99S99.S99S99. | P99P99.F99F99. | P99P99.D99D99. | | | | | | | |
| | | | | | W99W99.G99G99. | T99T99. | T99T99.T99T99. | | | | | | | |
| | | | | | R99R99. | | L99L99.F99F99. | | | | | | | |
| | | | | | | | R99R99.L99L99. | | | | | | | |
| 528 | 7 | PDTRVVY | TWPHD | TFLCSCLGSL | P99P99.D99D99. | T99T99.W99W99. | T99T99.F99F99. | 21 | 15 | 30 | 66 | Yes | Yes | Yes |
| | | | | | T99T99.R99R99. | P99P99.H99H99. | L99L99.C99C99. | | | | | | | |
| | | | | | V99V99.V99V99. | D99D99. | S99S99.C99C99. | | | | | | | |
| | | | | | Y99Y99. | | L99L99.G99G99. | | | | | | | |
| | | | | | | | S99S99.L99L99. | | | | | | | |
| 538 | 7 | VCIVCGN | NYTYS | RSFNEDADFY | V99V99.C99C99. | N99N99.Y99Y99. | R99R99.S99S99. | 21 | 15 | 30 | 66 | Yes | Yes | Yes |
| | | | | | I99I99.V99V99. | T99T99.Y99Y99. | F99F99.N99N99. | | | | | | | |
| | | | | | C99C99.G99G99. | S99S99. | E99E99.D99D99. | | | | | | | |
| | | | | | N99N99. | | A99A99.D99D99. | | | | | | | |
| | | | | | | | F99F99.Y99Y99. | | | | | | | |
| 541 | 7 | ASRTCGF | EFSFH | LRFEPVAVW | A99A99.S99S99. | E99E99.F99F99. | L99L99.R99R99. | 21 | 15 | 27 | 63 | Yes | Yes | Yes |
| | | | | | R99R99.T99T99. | S99S99.F99F99. | F99F99.E99E99. | | | | | | | |
| | | | | | C99C99.G99G99. | H99H99. | P99P99.V99V99. | | | | | | | |
| | | | | | F99F99. | | A99A99.V99V99. | | | | | | | |
| | | | | | | | W99W99. | | | | | | | |
| 556 | 7 | KGCFWHA | VHKEL | DLLTHAVGLCRHE | K99K99.G99G99. | V99V99.H99H99. | D99D99.L99L99. | 21 | 15 | 39 | 75 | Yes | Yes | Yes |
| | | | | | C99C99.F99F99. | K99K99.E99E99. | L99L99.T99T99. | | | | | | | |
| | | | | | W99W99.H85B00. | L99L99. | H99H99.A99A99. | | | | | | | |
| | | | | | A99A99. | | V99V99.G99G99. | | | | | | | |
| | | | | | | | L99L99.C99C99. | | | | | | | |
| | | | | | | | R99R99.H99H99. | | | | | | | |
| | | | | | | | E99E99. | | | | | | | |
| 561 | 7 | YTNNYVF | AVGQI | ARFGDHHMVH | Y99Y99.T99T99. | A99A99.V99V99. | A99A99.R99R99. | 21 | 15 | 30 | 66 | Yes | Yes | Yes |
| | | | | | N99N99.N99N99. | G99G99.Q99Q99. | F99F99.G99G99. | | | | | | | |
| | | | | | Y99Y99.V99V99. | I99I99. | D99D99.H99H99. | | | | | | | |
| | | | | | F85B00. | | H99H99.M99M99. | | | | | | | |
| | | | | | | | V99V99.H99H99. | | | | | | | |
| 562 | 7 | IGGLTLV | WVHCV | SSYKDGGIV | I99I99.G99G99. | W99W99.V99V99. | S99S99.S99S99. | 21 | 15 | 27 | 63 | Yes | Yes | Yes |
| | | | | | G99G99.L99L99. | H99H99.C99C99. | Y99Y99.K99K99. | | | | | | | |
| | | | | | T99T99.L99L99. | V99V99. | D99D99.G99G99. | | | | | | | |
| | | | | | V99V99. | | G99G99.I99I99. | | | | | | | |
| | | | | | | | V99V99. | | | | | | | |
| 565 | 7 | GRNPIVW | RDRVD | VHLKHVGLLQ | G99G99.R99R99. | R99R99.D99D99. | V99V99.H99H99. | 21 | 15 | 30 | 66 | Yes | Yes | Yes |
| | | | | | N99N99.P99P99. | R99R99.V99V99. | L99L99.K99K99. | | | | | | | |
| | | | | | I99I99.V99V99. | D99D99. | H99H99.V99V99. | | | | | | | |
| | | | | | W99W99. | | G99G99.L99L99. | | | | | | | |
| | | | | | | | L99L99.Q99Q99. | | | | | | | |
| 566 | 7 | FMRGSLY | CAGRP | VTFSSDGPV | F99F99.M99M99. | C99C99.A99A99. | V99V99.T99T99. | 21 | 15 | 27 | 63 | Yes | Yes | Yes |
| | | | | | R99R99.G99G99. | G99G99.R99R99. | F99F99.S99S99. | | | | | | | |
| | | | | | S99S99.L99L99. | P99P99. | S99S99.D99D99. | | | | | | | |
| | | | | | Y99Y99. | | G99G99.P99P99. | | | | | | | |
| | | | | | | | V99V99. | | | | | | | |
| 573 | 7 | NYGGVYT | RAPDL | NWWLDEWKSNDVS | N99N99.Y99Y99. | R99R99.A99A99. | N99N99.W99W99. | 21 | 15 | 39 | 75 | Yes | Yes | Yes |
| | | | | | G99G99.G99G99. | P99P99.D99D99. | W99W99.L99L99. | | | | | | | |
| | | | | | V99V99.Y99Y99. | L99L99. | D99D99.E99E99. | | | | | | | |
| | | | | | T99T99. | | W99W99.K99K99. | | | | | | | |
| | | | | | | | S99S99.N99N99. | | | | | | | |
| | | | | | | | D99D99.V99V99. | | | | | | | |
| | | | | | | | S99S99. | | | | | | | |
| 596 | 7 | VSGIIRI | KRSYT | RSLFDH | V85B00.S99S99. | K99K99.R99R99. | R99R99.S99S99. | 21 | 15 | 18 | 54 | Yes | Yes | Yes |
| | | | | | G85B00.I85B00. | S99S99.Y99Y99. | L99L99.F99F99. | | | | | | | |
| | | | | | I85B00.R85B00. | T99T99. | D85B00.H99H99. | | | | | | | |
| | | | | | I85B00. | | | | | | | | | |
| 603 | 7 | VSFCERF | VHSFR | FDLTTPWLPA | V99V99.S99S99. | V99V99.H99H99. | B00 | 21 | 15 | 0 | 36 | Yes | Yes | Yes |
| | | | | | F99F99.C99C99. | S99S99.F99F99. | | | | | | | | |
| | | | | | E99E99.R99R99. | R99R99. | | | | | | | | |
| | | | | | F99F99. | | | | | | | | | |
| 615 | 7 | TTYNRVH | GAYNG | HHYFHGTVF | T99T99.T99T99. | G99G99.A99A99. | H99H99.H99H99. | 21 | 15 | 27 | 63 | Yes | Yes | Yes |
| | | | | | Y99Y99.N99N99. | Y99Y99.N99N99. | Y99Y99.F99F99. | | | | | | | |
| | | | | | R99R99.V99V99. | G99G99. | H99H99.G99G99. | | | | | | | |
| | | | | | H99H99. | | T99T99.V99V99. | | | | | | | |
| | | | | | | | F99F99. | | | | | | | |
| 623 | 7 | FYCGYVS | YSHAC | AYSHCGPSEG | F99F99.Y99Y99. | Y99Y99.S99S99. | B00 | 21 | 15 | 0 | 36 | Yes | Yes | Yes |
| | | | | | C99C99.G85B00. | H99H99.A99A99. | | | | | | | | |
| | | | | | Y99Y99.V99V99. | C99C99. | | | | | | | | |
| | | | | | S99S99. | | | | | | | | | |
| 633 | 7 | EYMGLLG | GFFKL | HMYNGFDSII | E99E99.Y99Y99. | G99G99.F99F99. | H99H99.M99M99. | 21 | 15 | 30 | 66 | Yes | Yes | Yes |
| | | | | | M99M99.G99G99. | F99F99.K99K99. | Y99Y99.N99N99. | | | | | | | |
| | | | | | L99L99.L99L99. | L99L99. | G99G99.F99F99. | | | | | | | |
| | | | | | G99G99. | | D99D99.S99S99. | | | | | | | |
| | | | | | | | I99I99.I99I99. | | | | | | | |
| 640 | 7 | SGCYPPF | TVSYI | TTFGEAGRK | S85B00.G99G99. | T85B00.V85B00. | T71B00.T99T99. | 21 | 15 | 19 | 55 | Yes | Yes | Yes |
| | | | | | C85B00.Y99Y99. | S85B00.Y85B00. | F71B00.G71B00. | | | | | | | |
| | | | | | P85B00.P85B00. | I85B00. | E71B00.A71B00. | | | | | | | |
| | | | | | F85B00. | | G71B00.R71B00. | | | | | | | |
| | | | | | | | K71B00. | | | | | | | |
| 663 | 7 | NACVVFR | LSSRW | YAVHAILSDSDVT | N99N99.A99A99. | L99L99.S99S99. | Y99Y99.A99A99. | 21 | 15 | 39 | 75 | Yes | Yes | Yes |
| | | | | | C99C99.V99V99. | S99S99.R99R99. | V99V99.H99H99. | | | | | | | |
| | | | | | V99V99.F99F99. | W99W99. | A99A99.I99I99. | | | | | | | |
| | | | | | R99R99. | | L99L99.S99S99. | | | | | | | |
| | | | | | | | D99D99.S99S99. | | | | | | | |
| | | | | | | | D99D99.V99V99. | | | | | | | |
| | | | | | | | T99T99. | | | | | | | |
| 666 | 7 | VRISIWV | TWRER | LYGPFA | V99V99.R99R99. | T99T99.W99W99. | L99L99.Y99Y99. | 21 | 15 | 18 | 54 | Yes | Yes | Yes |
| | | | | | I99I99.S99S99. | R99R99.E99E99. | G99G99.P99P99. | | | | | | | |
| | | | | | I99I99.W99W99. | R99R99. | F99F99.A99A99. | | | | | | | |
| | | | | | V99V99. | | | | | | | | | |
| 673 | 7 | RVIGLWA | GLERR | YLYSALWGSI | R99R99.V99V99. | G99G99.L99L99. | Y99Y99.L99L99. | 21 | 15 | 30 | 66 | Yes | Yes | Yes |
| | | | | | I99I99.G99G99. | E99E99.R99R99. | Y99Y99.S99S99. | | | | | | | |
| | | | | | L99L99.W99W99. | R85B00. | A99A99.L99L99. | | | | | | | |
| | | | | | A99A99. | | W99W99.G99G99. | | | | | | | |
| | | | | | | | S99S99.I99I99. | | | | | | | |
| 684 | 7 | TCLHCLG | SSFSF | WMEADGECF | T71B00.C99C99. | S85B00.S99S99. | W99W99.M99M99. | 20 | 15 | 27 | 62 | Yes | Yes | Yes |
| | | | | | L99L99.H99H99. | F99F99.S99S99. | E99E99.A99A99. | | | | | | | |
| | | | | | C99C99.L99L99. | F99F99. | D99D99.G99G99. | | | | | | | |
| | | | | | G99G99. | | E99E99.C99C99. | | | | | | | |
| | | | | | | | F99F99. | | | | | | | |
| 696 | 7 | LDCFYYL | IGWGR | LHGERKPTPP | L99L99.D99D99. | I99I99.G99G99. | B00 | 21 | 15 | 0 | 36 | Yes | Yes | Yes |
| | | | | | C99C99.F99F99. | W99W99.G99G99. | | | | | | | | |
| | | | | | Y99Y99.Y99Y99. | R99R99. | | | | | | | | |
| | | | | | L99L99. | | | | | | | | | |
| 701 | 7 | KMHRVIW | CVPAG | GYLWCTYVL | K99K99.M99M99. | C99C99.V99V99. | G99G99.Y99Y99. | 21 | 15 | 27 | 63 | Yes | Yes | Yes |
| | | | | | H99H99.R99R99. | P99P99.A99A99. | L99L99.W99W99. | | | | | | | |
| | | | | | V99V99.I99I99. | G99G99. | C99C99.T99T99. | | | | | | | |
| | | | | | W99W99. | | Y99Y99.V99V99. | | | | | | | |
| | | | | | | | L99L99. | | | | | | | |
| 702 | 7 | ACYSGYV | AFTNN | FPSATTAWGY | A99A99.C85B00. | A99A99.F99F99. | F99F99.P99P99. | 21 | 15 | 30 | 66 | Yes | Yes | Yes |
| | | | | | Y99Y99.S99S99. | T99T99.N99N99. | S99S99.A99A99. | | | | | | | |
| | | | | | G99G99.Y99Y99. | N99N99. | T99T99.T99T99. | | | | | | | |
| | | | | | V99V99. | | A99A99.W99W99. | | | | | | | |
| | | | | | | | G99G99.Y99Y99. | | | | | | | |
| 72 | 7 | VYMAYCR | GIVGW | YIDAYSPTES | V99V99.Y99Y99. | G99G99.I99I99. | Y99Y99.I99I99. | 21 | 15 | 30 | 66 | Yes | Yes | Yes |
| | | | | | M99M99.A99A99. | V99V99.G99G99. | D99D99.A99A99. | | | | | | | |
| | | | | | Y99Y99.C99C99. | W99W99. | Y99Y99.S99S99. | | | | | | | |
| | | | | | R99R99. | | P99P99.T99T99. | | | | | | | |
| | | | | | | | E99E99.S99S99. | | | | | | | |
| 724 | 7 | AHHQSVI | DEDRA | YNFVARAGLTSIC | A85B00.H99H99. | D99D99.E99E99. | Y99Y99.N99N99. | 21 | 15 | 39 | 75 | Yes | Yes | Yes |
| | | | | | H99H99.Q99Q99. | D99D99.R85B00. | F85B00.V99V99. | | | | | | | |
| | | | | | S99S99.V99V99. | A99A99. | A99A99.R99R99. | | | | | | | |
| | | | | | I85B00. | | A99A99.G99G99. | | | | | | | |
| | | | | | | | L99L99.T99T99. | | | | | | | |
| | | | | | | | S99S99.I99I99. | | | | | | | |
| | | | | | | | C99C99. | | | | | | | |
| 729 | 7 | ERCSWSS | RCYRI | TIPSPAFGGD | E99E99.R99R99. | R99R99.C99C99. | T99T99.I99I99. | 21 | 15 | 30 | 66 | Yes | Yes | Yes |
| | | | | | C99C99.S99S99. | Y99Y99.R99R99. | P99P99.S99S99. | | | | | | | |
| | | | | | W99W99.S99S99. | I99I99. | P99P99.A99A99. | | | | | | | |
| | | | | | S99S99. | | F99F99.G99G99. | | | | | | | |
| | | | | | | | G99G99.D99D99. | | | | | | | |
| 736 | 7 | LRVRVMA | SYLCE | TVLDLAFAGSYTF | L99L99.R99R99. | S99S99.Y99Y99. | T99T99.V99V99. | 21 | 15 | 39 | 75 | Yes | Yes | Yes |
| | | | | | V99V99.R99R99. | L99L99.C99C99. | L99L99.D99D99. | | | | | | | |
| | | | | | V99V99.M99M99. | E99E99. | L99L99.A99A99. | | | | | | | |
| | | | | | A99A99. | | F99F99.A99A99. | | | | | | | |
| | | | | | | | G99G99.S99S99. | | | | | | | |
| | | | | | | | Y99Y99.T99T99. | | | | | | | |
| | | | | | | | F99F99. | | | | | | | |
| 756 | 7 | VPTCNVY | RIGST | AYWLNHSTVT | V99V99.P99P99. | R99R99.I99I99. | A99A99.Y99Y99. | 21 | 15 | 30 | 66 | Yes | Yes | Yes |
| | | | | | T99T99.C99C99. | G99G99.S99S99. | W99W99.L99L99. | | | | | | | |
| | | | | | N99N99.V99V99. | T99T99. | N99N99.H99H99. | | | | | | | |
| | | | | | Y99Y99. | | S99S99.T99T99. | | | | | | | |
| | | | | | | | V99V99.T99T99. | | | | | | | |
| 761 | 7 | GCMDMFV | FFGFH | AEDIIRVGVIPWV | G99G99.C99C99. | F99F99.F99F99. | A99A99.E99E99. | 21 | 15 | 39 | 75 | Yes | Yes | Yes |
| | | | | | M99M99.D99D99. | G99G99.F99F99. | D99D99.I99I99. | | | | | | | |
| | | | | | M99M99.F99F99. | H99H99. | I99I99.R99R99. | | | | | | | |
| | | | | | V99V99. | | V99V99.G99G99. | | | | | | | |
| | | | | | | | V99V99.I99I99. | | | | | | | |
| | | | | | | | P99P99.W99W99. | | | | | | | |
| | | | | | | | V99V99. | | | | | | | |
| 763 | 7 | RCSRCCY | TDMRH | SYLCDGLDVK | R99R99.C99C99. | T99T99.D99D99. | S99S99.Y99Y99. | 21 | 15 | 30 | 66 | Yes | Yes | Yes |
| | | | | | S99S99.R99R99. | M99M99.R99R99. | L99L99.C99C99. | | | | | | | |
| | | | | | C99C99.C99C99. | H99H99. | D99D99.G99G99. | | | | | | | |
| | | | | | Y99Y99. | | L99L99.D99D99. | | | | | | | |
| | | | | | | | V99V99.K99K99. | | | | | | | |
| 770 | 7 | NFVVVFG | FGSRE | HATDLRDSQLCIR | N99N99.F99F99. | F99F99.G99G99. | H99H99.A99A99. | 21 | 15 | 39 | 75 | Yes | Yes | Yes |
| | | | | | V99V99.V99V99. | S99S99.R99R99. | T99T99.D99D99. | | | | | | | |
| | | | | | V99V99.F99F99. | E99E99. | L99L99.R99R99. | | | | | | | |
| | | | | | G99G99. | | D99D99.S99S99. | | | | | | | |
| | | | | | | | Q99Q99.L99L99. | | | | | | | |
| | | | | | | | C99C99.I99I99. | | | | | | | |
| | | | | | | | R99R99. | | | | | | | |
| 778 | 7 | WSVKVFD | AHAGG | HRLTDVGLV | W99W99.S99S99. | A99A99.H99H99. | H99H99.R99R99. | 21 | 15 | 27 | 63 | Yes | Yes | Yes |
| | | | | | V99V99.K99K99. | A99A99.G99G99. | L99L99.T99T99. | | | | | | | |
| | | | | | V99V99.F99F99. | G99G99. | D99D99.V99V99. | | | | | | | |
| | | | | | D99D99. | | G99G99.L99L99. | | | | | | | |
| | | | | | | | V99V99. | | | | | | | |
| 780 | 7 | TLSLRSH | SFIFN | HAIHADSAELSVR | T99T99.L99L99. | S99S99.F99F99. | H99H99.A99A99. | 21 | 15 | 39 | 75 | Yes | Yes | Yes |
| | | | | | S99S99.L99L99. | I99I99.F99F99. | I99I99.H99H99. | | | | | | | |
| | | | | | R99R99.S99S99. | N99N99. | A99A99.D85B00. | | | | | | | |
| | | | | | H99H99. | | S99S99.A99A99. | | | | | | | |
| | | | | | | | E99E99.L99L99. | | | | | | | |
| | | | | | | | S99S99.V99V99. | | | | | | | |
| | | | | | | | R99R99. | | | | | | | |
| 781 | 7 | LPVPC | FFNGR | FATVSS | L99L99.P99P99. | F99F99.F99F99. | F99F99.A99A99. | 15 | 15 | 18 | 48 | Yes | Yes | Yes |
| | | | | | V99V99.P99P99. | N99N99.G99G99. | T99T99.V99V99. | | | | | | | |
| | | | | | C99C99. | R99R99. | S99S99.S99S99. | | | | | | | |
| 783 | 7 | GLHFVYS | FRADS | YCMAYDAVL | G99G99.L99L99. | F99F99.R99R99. | Y99Y99.C99C99. | 21 | 15 | 27 | 63 | Yes | Yes | Yes |
| | | | | | H99H99.F99F99. | A99A99.D99D99. | M99M99.A99A99. | | | | | | | |
| | | | | | V99V99.Y99Y99. | S99S99. | Y99Y99.D99D99. | | | | | | | |
| | | | | | S99S99. | | A99A99.V99V99. | | | | | | | |
| | | | | | | | L99L99. | | | | | | | |
| 792 | 7 | CFSAVGS | LWMVR | WLSCAG | C99C99.F99F99. | L99L99.W99W99. | W99W99.L99L99. | 21 | 15 | 18 | 54 | Yes | Yes | Yes |
| | | | | | S85B00.A99A99. | M99M99.V99V99. | S99S99.C99C99. | | | | | | | |
| | | | | | V99V99.G99G99. | R99R99. | A99A99.G99G99. | | | | | | | |
| | | | | | S99S99. | | | | | | | | | |
| 794 | 7 | LGVVLVQ | GGLVD | GAVWPF | L99L99.G99G99. | G99G99.G99G99. | G99G99.A99A99. | 21 | 15 | 18 | 54 | Yes | Yes | Yes |
| | | | | | V99V99.V99V99. | L99L99.V99V99. | V99V99.W99W99. | | | | | | | |
| | | | | | L99L99.V99V99. | D99D99. | P99P99.F99F99. | | | | | | | |
| | | | | | Q99Q99. | | | | | | | | | |
| 799 | 7 | PYE | NRGRG | IFLYTQKVSE | P99P99.Y99Y99. | N99N99.R99R99. | I99I99.F99F99. | 9 | 15 | 30 | 54 | Yes | Yes | Yes |
| | | | | | E99E99. | G99G99.R85B00. | L99L99.Y99Y99. | | | | | | | |
| | | | | | | G99G99. | T99T99.Q99Q99. | | | | | | | |
| | | | | | | | K99K99.V99V99. | | | | | | | |
| | | | | | | | S99S99.E99E99. | | | | | | | |
| 816 | 7 | YLFCTMA | LGAR | ELTNGL | Y99Y99.L99L99. | L99L99.G99G99. | E99E99.L99L99. | 21 | 12 | 18 | 5 | Yes | Yes | Yes |
| | | | | | F99F99.C99C99. | A99A99.R99R99. | T99T99.N99N99. | | | | | | | |
| | | | | | T99T99.M99M99. | | G99G99.L99L99. | | | | | | | |
| | | | | | A99A99. | | | | | | | | | |
| 825 | 7 | FTERVVS | YGARG | VMALFMAGLTLS | F99F99.T99T99. | Y99Y99.G99G99. | B00 | 21 | 15 | 0 | 36 | Yes | Yes | Yes |
| | | | | | E99E99.R99R99. | A99A99.R99R99. | | | | | | | | |
| | | | | | V99V99.V99V99. | G99G99. | | | | | | | | |
| | | | | | S99S99. | | | | | | | | | |
| 832 | 7 | VSEVPYA | TITTN | IMLRRTYVCY | V99V99.S99S99. | T99T99.I99I99. | I99I99.M99M99. | 21 | 15 | 30 | 66 | Yes | Yes | Yes |
| | | | | | E99E99.V99V99. | T99T99.T99T99. | L99L99.R99R99. | | | | | | | |
| | | | | | P99P99.Y99Y99. | N99N99. | R99R99.T99T99. | | | | | | | |
| | | | | | A99A99. | | Y99Y99.V99V99. | | | | | | | |
| | | | | | | | C99C99.Y99Y99. | | | | | | | |
| 84 | 7 | YSDTWYL | RCLAQ | KGLSGVSVT | Y99Y99.S99S99. | R99R99.C99C99. | K99K99.G99G99. | 21 | 15 | 27 | 63 | Yes | Yes | Yes |
| | | | | | D99D99.T99T99. | L99L99.A99A99. | L99L99.S99S99. | | | | | | | |
| | | | | | W99W99.Y99Y99. | Q99Q99. | G99G99.V99V99. | | | | | | | |
| | | | | | L99L99. | | S99S99.V99V99. | | | | | | | |
| | | | | | | | T99T99. | | | | | | | |
| 841 | 7 | GVNGNVY | ANDII | AYITLSSDVV | G99G99.V99V99. | A99A99.N99N99. | A99A99.Y99Y99. | 21 | 15 | 30 | 99 | Yes | Yes | Yes |
| | | | | | N85B00.G99G99. | D99D99.I99I99. | I99I99.T99T99. | | | | | | | |
| | | | | | N99N99.V99V99. | I99I99. | L99L99.S99S99. | | | | | | | |
| | | | | | Y99Y99. | | S99S99.D99D99. | | | | | | | |
| | | | | | | | V99V99.V99V99. | | | | | | | |
| 846 | 7 | CCINRFT | WYANF | PVPDDNVMFF | C99C99.C99C99. | W99W99.Y99Y99. | P99P99.V99V99. | 21 | 15 | 30 | 66 | Yes | Yes | Yes |
| | | | | | I99I99.N99N99. | A99A99.N99N99. | P99P99.D99D99. | | | | | | | |
| | | | | | R99R99.F99F99. | F99F99. | D99D99.N99N99. | | | | | | | |
| | | | | | T99T99. | | V99V99.M99M99. | | | | | | | |
| | | | | | | | F99F99.F99F99. | | | | | | | |
| 854 | 7 | FNVHVFG | LDTIR | AILNEYQYRIGVT | F85B00.N85B00. | L85B00.D85B00. | A99A99.I99I99. | 21 | 15 | 39 | 75 | Yes | Yes | Yes |
| | | | | | V85B00.H85B00. | T85B00.I85B00. | L99L99.N99N99. | | | | | | | |
| | | | | | V85B00.F85B00. | R85B00. | E99E99.Y99Y99. | | | | | | | |
| | | | | | G85B00. | | Q99Q99.Y99Y99. | | | | | | | |
| | | | | | | | R99R99.I99I99. | | | | | | | |
| | | | | | | | G99G99.V99V99. | | | | | | | |
| | | | | | | | T99T99. | | | | | | | |
| 861 | 7 | CIHSCVF | YASVG | CVYIPHGGVN | C99C99.I99I99. | Y99Y99.A99A99. | B00 | 21 | 15 | 0 | 36 | Yes | Yes | Yes |
| | | | | | H99H99.S99S99. | S99S99.V99V99. | | | | | | | | |
| | | | | | C99C99.V99V99. | G99G99. | | | | | | | | |
| | | | | | F99F99. | | | | | | | | | |
| 876 | 7 | SGATPMS | LPAIY | LFDQHDGSVL | S99S99.G99G99. | L99L99.P99P99. | L85B00.F85B00. | 21 | 15 | 29 | 65 | Yes | Yes | Yes |
| | | | | | A99A99.T99T99. | A99A99.I99I99. | D85B00.Q85B00. | | | | | | | |
| | | | | | P99P99.M99M99. | Y99Y99. | H85B00.D71B00. | | | | | | | |
| | | | | | S99S99. | | G85B00.S85B00. | | | | | | | |
| | | | | | | | V85B00.L85B00. | | | | | | | |
| 884 | 7 | PTCGQLS | RPFGD | VYWSQRVVI | P99P99.T99T99. | R99R99.P99P99. | V99V99.Y99Y99. | 21 | 15 | 27 | 63 | Yes | Yes | Yes |
| | | | | | C99C99.G99G99. | F99F99.G99G99. | W99W99.S99S99. | | | | | | | |
| | | | | | Q99Q99.L99L99. | D99D99. | Q99Q99.R99R99. | | | | | | | |
| | | | | | S85B00. | | V99V99.V99V99. | | | | | | | |
| | | | | | | | I99I99. | | | | | | | |
| 885 | 7 | VIGILEG | RVFCV | KSRCSPQFSC | V99V99.I99I99. | R99R99.V99V99. | K99K99.S99S99. | 21 | 15 | 30 | 66 | Yes | Yes | Yes |
| | | | | | G99G99.I99I99. | F99F99.C99C99. | R99R99.C99C99. | | | | | | | |
| | | | | | L99L99.E99E99. | V99V99. | S99S99.P99P99. | | | | | | | |
| | | | | | G99G99. | | Q99Q99.F99F99. | | | | | | | |
| | | | | | | | S99S99.C99C99. | | | | | | | |
| 893 | 7 | GVSDVFV | SCSGW | ASAHYQNIIL | G99G99.V99V99. | S99S99.C99C99. | A99A99.S99S99. | 21 | 15 | 30 | 66 | Yes | Yes | Yes |
| | | | | | S99S99.D99D99. | S99S99.G99G99. | A99A99.H99H99. | | | | | | | |
| | | | | | V99V99.F99F99. | W99W99. | Y99Y99.Q99Q99. | | | | | | | |
| | | | | | V99V99. | | N99N99.I99I99. | | | | | | | |
| | | | | | | | I99I99.L99L99. | | | | | | | |
| 894 | 7 | KTTSAVY | CSVYD | VYYCRLSSVN | K99K99.T99T99. | C99C99.S99S99. | V99V99.Y99Y99. | 21 | 15 | 30 | 66 | Yes | Yes | Yes |
| | | | | | T99T99.S99S99. | V99V99.Y99Y99. | Y99Y99.C99C99. | | | | | | | |
| | | | | | A99A99.V99V99. | D99D99. | R99R99.L99L99. | | | | | | | |
| | | | | | Y99Y99. | | S99S99.S99S99. | | | | | | | |
| | | | | | | | V99V99.N99N99. | | | | | | | |
| 901 | 7 | NGGKSVW | TCGCY | PYFSSGAVF | N99N99.G99G99. | T99T99.C99C99. | P99P99.Y99Y99. | 21 | 15 | 27 | 63 | Yes | Yes | Yes |
| | | | | | G99G99.K99K99. | G99G99.C99C99. | F99F99.S99S99. | | | | | | | |
| | | | | | S99S99.V99V99. | Y99Y99. | S99S99.G99G99. | | | | | | | |
| | | | | | W99W99. | | A99A99.V99V99. | | | | | | | |
| | | | | | | | F99F99. | | | | | | | |
| 909 | 7 | NACDVCQ | CSHRL | IDSSS | N99N99.A99A99. | C99C99.S99S99. | I99I99.D99D99. | 21 | 15 | 15 | 51 | Yes | Yes | Yes |
| | | | | | C99C99.D99D99. | H99H99.R99R99. | S99S99.S99S99. | | | | | | | |
| | | | | | V99V99.C99C99. | L99L99. | S99S99. | | | | | | | |
| | | | | | Q99Q99. | | | | | | | | | |
| 911 | 7 | LVSRMSE | YTRSR | TALVAQGYHYDAT | L99L99.V99V99. | Y99Y99.T99T99. | T99T99.A99A99. | 21 | 15 | 39 | 75 | Yes | Yes | Yes |
| | | | | | S99S99.R99R99. | R99R99.S99S99. | L99L99.V99V99. | | | | | | | |
| | | | | | M99M99.S99S99. | R99R99. | A99A99.Q99Q99. | | | | | | | |
| | | | | | E99E99. | | G99G99.Y99Y99. | | | | | | | |
| | | | | | | | H99H99.Y99Y99. | | | | | | | |
| | | | | | | | D99D99.A99A99. | | | | | | | |
| | | | | | | | T99T99. | | | | | | | |
| 915 | 7 | FGSI | HNYQL | HIRTRSSDGFWYE | F99F99.G99G99. | H99H99.N99N99. | H99H99.I99I99. | 12 | 15 | 39 | 66 | Yes | Yes | Yes |
| | | | | | S99S99.I99I99. | Y99Y99.Q99Q99. | R99R99.T99T99. | | | | | | | |
| | | | | | | L99L99. | R99R99.S99S99. | | | | | | | |
| | | | | | | | S99S99.D99D99. | | | | | | | |
| | | | | | | | G99G99.F99F99. | | | | | | | |
| | | | | | | | W99W99.Y99Y99. | | | | | | | |
| | | | | | | | E99E99. | | | | | | | |
| 920 | 7 | A | LDCGR | SHIHLPLNRWVVT | A99A99. | L99L99.D99D99. | S85B00.H99H99. | 3 | 15 | 39 | 57 | Yes | Yes | Yes |
| | | | | | | C99C99.G99G99. | I99I99.H99H99. | | | | | | | |
| | | | | | | R85B00. | L99L99.P99P99. | | | | | | | |
| | | | | | | | L99L99.N99N99. | | | | | | | |
| | | | | | | | R99R99.W99W99. | | | | | | | |
| | | | | | | | V99V99.V99V99. | | | | | | | |
| | | | | | | | T99T99. | | | | | | | |
| 113 | 6 | PLYCAV | SGGVG | ACLTSTGFLSYVK | P99P99.L99L99. | S99S99.G99G99. | A99A99.C99C99. | 21 | 15 | 39 | 75 | Yes | Yes | Yes |
| | | | | | Y99Y99.C99C99. | G99G99.V99V99. | L99L99.T99T99. | | | | | | | |
| | | | | | A99A99.V99V99. | G99G99. | S99S99.T99T99. | | | | | | | |
| | | | | | Y99Y99. | | G99G99.F99F99. | | | | | | | |
| | | | | | | | L99L99.S99S99. | | | | | | | |
| | | | | | | | Y99Y99.V99V99. | | | | | | | |
| | | | | | | | K99K99. | | | | | | | |
| 132 | 6 | PIDRLVF | VDSMS | VAFFGN | P99P99.I99I99. | V99V99.D99D99. | B00 | 21 | 15 | 0 | 36 | Yes | Yes | Yes |
| | | | | | D99D99.R99R99. | S99S99.M99M99. | | | | | | | | |
| | | | | | L99L99.V99V99. | S99S99. | | | | | | | | |
| | | | | | F99F99. | | | | | | | | | |
| 169 | 6 | EINFCLF | TGSQE | SLYVFPSAHR | E99E99.I99I99. | T99T99.G99G99. | S99S99.L99L99. | 21 | 15 | 30 | 66 | Yes | Yes | Yes |
| | | | | | N99N99.F99F99. | S99S99.Q99Q99. | Y99Y99.V99V99. | | | | | | | |
| | | | | | C99C99.L99L99. | E99E99. | F99F99.P99P99. | | | | | | | |
| | | | | | F99F99. | | S99S99.A99A99. | | | | | | | |
| | | | | | | | H99H99.R99R99. | | | | | | | |
| 269 | 6 | LYCGCVF | VDRQL | AIMRNVGLDYEIN | L99L99.Y99Y99. | V99V99.D99D99. | B00 | 21 | 15 | 0 | 36 | Yes | Yes | Yes |
| | | | | | C99C99.G99G99. | R99R99.Q99Q99. | | | | | | | | |
| | | | | | C99C99.V99V99. | L99L99. | | | | | | | | |
| | | | | | F99F99. | | | | | | | | | |
| 282 | 6 | RSSRRVY | VNSWD | VCYEPSVGAV | R99R99.S99S99. | V99V99.N99N99. | V99V99.C99C99. | 21 | 15 | 30 | 66 | Yes | Yes | Yes |
| | | | | | S99S99.R99R99. | S99S99.W99W99. | Y99Y99.E99E99. | | | | | | | |
| | | | | | R99R99.V99V99. | D99D99. | P99P99.S99S99. | | | | | | | |
| | | | | | Y99Y99. | | V99V99.G99G99. | | | | | | | |
| | | | | | | | A99A99.V99V99. | | | | | | | |
| 296 | 6 | GVHLVAI | LFEGV | LCVAPTRLAW | G99G99.V99V99. | L99L99.F99F99. | L99L99.C99C99. | 21 | 15 | 30 | 66 | Yes | Yes | Yes |
| | | | | | H99H99.L99L99. | E99E99.G99G99. | V99V99.A99A99. | | | | | | | |
| | | | | | V99V99.A99A99. | V99V99. | P99P99.T99T99. | | | | | | | |
| | | | | | I99I99. | | R99R99.L99L99. | | | | | | | |
| | | | | | | | A99A99.W99W99. | | | | | | | |
| 320 | 6 | QATRCPV | VSAQI | PTRMLTGLDI | Q99Q99.A99A99. | V99V99.S99S99. | P99P99.T99T99. | 21 | 15 | 30 | 66 | Yes | Yes | Yes |
| | | | | | T99T99.R99R99. | A99A99.Q99Q99. | R99R99.M99M99. | | | | | | | |
| | | | | | C99C99.P99P99. | I99I99. | L99L99.T99T99. | | | | | | | |
| | | | | | V99V99. | | G99G99.L99L99. | | | | | | | |
| | | | | | | | D99D99.I99I99. | | | | | | | |
| 329 | 6 | TWMWCLR | WQPAR | QVLTTHNAQV | T99T99.W99W99. | W99W99.Q99Q99. | Q99Q99.V99V99. | 21 | 15 | 30 | 66 | Yes | Yes | Yes |
| | | | | | M99M99.W99W99. | P99P99.A99A99. | L99L99.T99T99. | | | | | | | |
| | | | | | C99C99.L99L99. | R99R99. | T99T99.H99H99. | | | | | | | |
| | | | | | R99R99. | | N99N99.A99A99. | | | | | | | |
| | | | | | | | Q99Q99.V99V99. | | | | | | | |
| 343 | 6 | DCHRRVW | CGAAT | AHFNAGVIC | D99D99.C99C99. | C99C99.G99G99. | A99A99.H99H99. | 21 | 15 | 27 | 63 | Yes | Yes | Yes |
| | | | | | H99H99.R99R99. | A99A99.A99A99. | F99F99.N99N99. | | | | | | | |
| | | | | | R99R99.V99V99. | T99T99. | A99A99.G99G99. | | | | | | | |
| | | | | | W99W99. | | V99V99.I99I99. | | | | | | | |
| | | | | | | | C83B00. | | | | | | | |
| 355 | 6 | SGRPHVR | LNSDW | WGHG | S99S99.G99G99. | L99L99.N99N99. | W99W99.G99G99. | 21 | 15 | 12 | 48 | Yes | Yes | Yes |
| | | | | | R99R99.P99P99. | S99S99.D99D99. | H99H99.G99G99. | | | | | | | |
| | | | | | H99H99.V99V99. | W99W99. | | | | | | | | |
| | | | | | R99R99. | | | | | | | | | |
| 368 | 6 | IYNAYSC | YSLRV | ESKSGHCVGVEVS | I99I99.Y99Y99. | Y99Y99.S99S99. | E99E99.S99S99. | 21 | 15 | 39 | 75 | Yes | Yes | Yes |
| | | | | | N99N99.A99A99. | L99L99.R99R99. | K99K99.S99S99. | | | | | | | |
| | | | | | Y99Y99.S99S99. | V99V99. | G99G99.H99H99. | | | | | | | |
| | | | | | C99C99. | | C99C99.V99V99. | | | | | | | |
| | | | | | | | G99G99.V99V99. | | | | | | | |
| | | | | | | | E99E99.V99V99. | | | | | | | |
| | | | | | | | S99S99. | | | | | | | |
| 383 | 6 | VWVLGQR | HSGRD | HTVQIVCFSIILL | V99V99.W99W99. | H99H99.S99S99. | H99H99.T99T99. | 21 | 15 | 39 | 75 | Yes | Yes | Yes |
| | | | | | V99V99.L99L99. | G99G99.R99R99. | V99V99.Q99Q99. | | | | | | | |
| | | | | | G99G99.Q99Q99. | D99D99. | I99I99.V99V99. | | | | | | | |
| | | | | | R99R99. | | C99C99.F99F99. | | | | | | | |
| | | | | | | | S99S99.I99I99. | | | | | | | |
| | | | | | | | I99I99.L99L99. | | | | | | | |
| | | | | | | | L99L99. | | | | | | | |
| 406 | 6 | RDVERIV | TLATR | TWVLSQ | R99R99.D99D99. | T99T99.L99L99. | T99T99.W99W99. | 21 | 15 | 18 | 54 | Yes | Yes | Yes |
| | | | | | V99V99.E99E99. | A99A99.T99T99. | V99V99.L99L99. | | | | | | | |
| | | | | | R99R99.I99I99. | R99R99. | S99S99.Q99Q99. | | | | | | | |
| | | | | | V99V99. | | | | | | | | | |
| 412 | 6 | GLPNCVF | SDSSR | VLYVRNSWPL | G99G99.L99L99. | S99S99.D99D99. | V99V99.L99L99. | 21 | 15 | 30 | 66 | Yes | Yes | Yes |
| | | | | | P99P99.N99N99. | S99S99.S99S99. | Y99Y99.V99V99. | | | | | | | |
| | | | | | C99C99.V99V99. | R99R99. | R99R99.N99N99. | | | | | | | |
| | | | | | F99F99. | | S99S99.W99W99. | | | | | | | |
| | | | | | | | P99P99.L99L99. | | | | | | | |
| 415 | 6 | VLGAMGH | LVSGT | VDDWF | V99V99.L99L99. | L99L99.V99V99. | V99V99.D99D99. | 21 | 15 | 15 | 51 | Yes | Yes | Yes |
| | | | | | G99G99.A99A99. | S99S99.G83B00. | D99D99.W99W99. | | | | | | | |
| | | | | | M99M99.G99G99. | T99T99. | F99F99. | | | | | | | |
| | | | | | H99H99. | | | | | | | | | |
| 416 | 6 | WGRIPFV | LGGEE | PFTIAAFGPY | W99W99.G99G99. | L99L99.G99G99. | P99P99.F99F99. | 21 | 15 | 30 | 66 | Yes | Yes | Yes |
| | | | | | R99R99.I99I99. | G99G99.E99E99. | T99T99.I99I99. | | | | | | | |
| | | | | | P99P99.F99F99. | E99E99. | A99A99.A99A99. | | | | | | | |
| | | | | | V99V99. | | F99F99.G99G99. | | | | | | | |
| | | | | | | | P99P99.Y99Y99. | | | | | | | |
| 420 | 6 | SWNTPLA | PESLC | HLWMHAPVGF | S99S99.W99W99. | P99P99.E99E99. | H99H99.L99L99. | 21 | 15 | 30 | 66 | Yes | Yes | Yes |
| | | | | | N99N99.T99T99. | S99S99.L99L99. | W99W99.M99M99. | | | | | | | |
| | | | | | P99P99.L99L99. | C99C99. | H99H99.A99A99. | | | | | | | |
| | | | | | A99A99. | | P99P99.V99V99. | | | | | | | |
| | | | | | | | G99G99.F99F99. | | | | | | | |
| 422 | 6 | SMVGLLQ | NTALI | LVVTTSGHVG | S99S99.M99M99. | N99N99.T99T99. | L99L99.V99V99. | 21 | 15 | 30 | 66 | Yes | Yes | Yes |
| | | | | | V99V99.G99G99. | A99A99.L99L99. | V99V99.T99T99. | | | | | | | |
| | | | | | L99L99.L99L99. | I99I99. | T99T99.S99S99. | | | | | | | |
| | | | | | Q99Q99. | | G99G99.H99H99. | | | | | | | |
| | | | | | | | V99V99.G99G99. | | | | | | | |
| 458 | 6 | SPAHLLN | FCFGW | TLVPANDFPC | S99S99.P99P99. | F99F99.C99C99. | T99T99.L99L99. | 21 | 15 | 30 | 66 | Yes | Yes | Yes |
| | | | | | A99A99.H99H99. | F99F99.G99G99. | V99V99.P99P99. | | | | | | | |
| | | | | | L99L99.L99L99. | W99W99. | A99A99.N83B00. | | | | | | | |
| | | | | | N99N99. | | D99D99.F99F99. | | | | | | | |
| | | | | | | | P99P99.C99C99. | | | | | | | |
| 467 | 6 | SRA | GFGNC | PCYCI | S99S99.R99R99. | G99G99.F99F99. | B00 | 9 | 15 | 0 | 24 | Yes | Yes | Yes |
| | | | | | A99A99. | G99G99.N99N99. | | | | | | | | |
| | | | | | | C99C99. | | | | | | | | |
| 473 | 6 | LPFSVHS | VVFSL | TTPIGDYHYSLGP | L99L99.P99P99. | V99V99.V99V99. | T99T99.T99T99. | 21 | 15 | 39 | 75 | Yes | Yes | Yes |
| | | | | | F99F99.S99S99. | F99F99.S99S99. | P99P99.I99I99. | | | | | | | |
| | | | | | V99V99.H99H99. | L99L99. | G99G99.D99D99. | | | | | | | |
| | | | | | S99S99. | | Y99Y99.H99H99. | | | | | | | |
| | | | | | | | Y99Y99.S99S99. | | | | | | | |
| | | | | | | | L99L99.G99G99. | | | | | | | |
| | | | | | | | P99P99. | | | | | | | |
| 484 | 6 | LMTRVVH | GPRGS | ARFHANSVR | L99L99.M99M99. | G99G99.P99P99. | A99A99.R99R99. | 21 | 15 | 27 | 63 | Yes | Yes | Yes |
| | | | | | T99T99.R99R99. | R99R99.G99G99. | F99F99.H99H99. | | | | | | | |
| | | | | | V99V99.V99V99. | S99S99. | A83B00.N99N99. | | | | | | | |
| | | | | | H99H99. | | S99S99.V99V99. | | | | | | | |
| | | | | | | | R99R99. | | | | | | | |
| 489 | 6 | WRNWVLT | TAHSH | EYDEAK | W99W99.R99R99. | T99T99.A83B00. | E99E99.Y99Y99. | 21 | 15 | 18 | 54 | Yes | Yes | Yes |
| | | | | | N99N99.W99W99. | H99H99.S99S99. | D99D99.E99E99. | | | | | | | |
| | | | | | V99V99.L99L99. | H99H99. | A99A99.K99K99. | | | | | | | |
| | | | | | T99T99. | | | | | | | | | |
| 502 | 6 | LFSSVVF | CAGGL | VTASMSENLMLCR | L99L99.F99F99. | C99C99.A99A99. | V99V99.T99T99. | 21 | 15 | 39 | 75 | Yes | Yes | Yes |
| | | | | | S99S99.S99S99. | G99G99.G99G99. | A99A99.S99S99. | | | | | | | |
| | | | | | V99V99.V99V99. | L99L99. | M99M99.S99S99. | | | | | | | |
| | | | | | F99F99. | | E99E99.N99N99. | | | | | | | |
| | | | | | | | L99L99.M99M99. | | | | | | | |
| | | | | | | | L99L99.C99C99. | | | | | | | |
| | | | | | | | R99R99. | | | | | | | |
| 507 | 6 | LRRVDTS | TYEPG | RNSCSAIYGESCV | L99L99.R99R99. | T99T99.Y99Y99. | R99R99.N99N99. | 21 | 15 | 39 | 75 | Yes | Yes | Yes |
| | | | | | R99R99.V99V99. | E99E99.P83B00. | S99S99.C99C99. | | | | | | | |
| | | | | | D99D99.T99T99. | G99G99. | S99S99.A99A99. | | | | | | | |
| | | | | | S99S99. | | I99I99.Y99Y99. | | | | | | | |
| | | | | | | | G99G99.E99E99. | | | | | | | |
| | | | | | | | S99S99.C99C99. | | | | | | | |
| | | | | | | | V99V99. | | | | | | | |
| 521 | 6 | VYGILSS | VYGGC | YNRWSG | V99V99.Y99Y99. | V99V99.Y99Y99. | Y99Y99.N99N99. | 21 | 15 | 18 | 54 | Yes | Yes | Yes |
| | | | | | G99G99.I99I99. | G99G99.G99G99. | R99R99.W99W99. | | | | | | | |
| | | | | | L99L99.S99S99. | C99C99. | S83B00.G99G99. | | | | | | | |
| | | | | | S99S99. | | | | | | | | | |
| 526 | 6 | CRVEYSF | CVRGD | FRD | C99C99.R99R99. | C99C99.V99V99. | F99F99.R99R99. | 21 | 15 | 9 | 45 | Yes | Yes | Yes |
| | | | | | V99V99.E99E99. | R99R99.G99G99. | D83B00. | | | | | | | |
| | | | | | Y99Y99.S99S99. | D99D99. | | | | | | | | |
| | | | | | F99F99. | | | | | | | | | |
| 552 | 6 | STPDGFF | WFVED | YWISCVGYV | S99S99.T99T99. | W99W99.F99F99. | Y99Y99.W99W99. | 21 | 15 | 27 | 63 | Yes | Yes | Yes |
| | | | | | P99P99.D99D99. | V99V99.E99E99. | I99I99.S99S99. | | | | | | | |
| | | | | | G99G99.F99F99. | D99D99. | C99C99.V99V99. | | | | | | | |
| | | | | | F99F99. | | G99G99.Y99Y99. | | | | | | | |
| | | | | | | | V99V99. | | | | | | | |
| 570 | 6 | VKNFSAR | TDSVI | LYDWT | V99V99.K99K99. | T99T99.D99D99. | B00 | 21 | 15 | 0 | 36 | Yes | Yes | Yes |
| | | | | | N99N99.F99F99. | S99S99.V99V99. | | | | | | | | |
| | | | | | S99S99.A99A99. | I99I99. | | | | | | | | |
| | | | | | R99R99. | | | | | | | | | |
| 571 | 6 | ISVDRHQ | DVAGI | FSFSLMSRS | I99I99.S99S99. | D99D99.V99V99. | F99F99.S99S99. | 21 | 15 | 27 | 63 | Yes | Yes | Yes |
| | | | | | V99V99.D99D99. | A99A99.G99G99. | F99F99.S99S99. | | | | | | | |
| | | | | | R99R99.H99H99. | I99I99. | L99L99.M99M99. | | | | | | | |
| | | | | | Q99Q99. | | S99S99.R99R99. | | | | | | | |
| | | | | | | | S99S99. | | | | | | | |
| 574 | 6 | LGTVLLR | MHCNH | LLTCTALGSR | L99L99.G99G99. | M99M99.H99H99. | L99L99.L99L99. | 21 | 15 | 30 | 66 | Yes | Yes | Yes |
| | | | | | T99T99.V99V99. | C99C99.N99N99. | T99T99.C99C99. | | | | | | | |
| | | | | | L83B00.L99L99. | H99H99. | T99T99.A99A99. | | | | | | | |
| | | | | | R99R99. | | L99L99.G99G99. | | | | | | | |
| | | | | | | | S99S99.R99R99. | | | | | | | |
| 577 | 6 | FW | HPVSV | INFADGRRR | F99F99.W99W99. | H99H99.P99P99. | I99I99.N99N99. | 6 | 15 | 27 | 48 | Yes | Yes | Yes |
| | | | | | | V99V99.S99S99. | F99F99.A99A99. | | | | | | | |
| | | | | | | V99V99. | D99D99.G99G99. | | | | | | | |
| | | | | | | | R99R99.R99R99. | | | | | | | |
| | | | | | | | R99R99. | | | | | | | |
| 600 | 6 | RGSYTVVCRAV | MHNDYFNM | LTAYKDRCTNIY | R99R99.G99G99. | M99M99.H99H99. | L99L99.T99T99. | 21 | 15 | 27 | 63 | Yes | Yes | Yes |
| | | | | SVWSDAV | S99S99.Y99Y99. | N99N99.D99D99. | A99A99.Y99Y99. | | | | | | | |
| | | | | | T99T99.V99V99. | Y99Y99. | K99K99.D99D99. | | | | | | | |
| | | | | | V99V99. | | R99R99.C99C99. | | | | | | | |
| | | | | | | | T99T99. | | | | | | | |
| 602 | 6 | VCG | FMNSC | NIYSDAVCHGVWS | C99C99.R99R99. | F99F99.M99M99. | N99N99.I99I99. | 21 | 15 | 39 | 75 | Yes | Yes | Yes |
| | | | | | V99V99.C99C99. | N99N99.S99S99. | Y99Y99.S99S99. | | | | | | | |
| | | | | | G99G99.A99A99. | C99C99. | D99D99.A99A99. | | | | | | | |
| | | | | | V99V99. | | V99V99.C99C99. | | | | | | | |
| | | | | | | | H99H99.G99G99. | | | | | | | |
| | | | | | | | V99V99.W99W99. | | | | | | | |
| | | | | | | | S99S99. | | | | | | | |
| 607 | 6 | RVWCCYT | SGSWR | LAAFEYGAL | R99R99.V99V99. | S99S99.G99G99. | L99L99.A99A99. | 21 | 15 | 27 | 63 | Yes | Yes | Yes |
| | | | | | W99W99.C99C99. | S99S99.W99W99. | A99A99.F99F99. | | | | | | | |
| | | | | | C99C99.Y99Y99. | R99R99. | E99E99.Y99Y99. | | | | | | | |
| | | | | | T99T99. | | G99G99.A99A99. | | | | | | | |
| | | | | | | | L99L99. | | | | | | | |
| 622 | 6 | CLEHSYQ | GEFFR | FHHRDA | C99C99.L99L99. | G99G99.E99E99. | F66B00.H66B00. | 21 | 15 | 12 | 48 | Yes | Yes | Yes |
| | | | | | E99E99.H99H99. | F99F99.F99F99. | H66B00.R66B00. | | | | | | | |
| | | | | | S99S99.Y99Y99. | R99R99. | D66B00.A66B00. | | | | | | | |
| | | | | | Q99Q99. | | | | | | | | | |
| 625 | 6 | YCYTLLA | WSSSF | HFFASRSSIPTVQ | Y99Y99.C99C99. | W99W99.S99S99. | H99H99.F99F99. | 21 | 15 | 39 | 75 | Yes | Yes | Yes |
| | | | | | Y99Y99.T99T99. | S99S99.S99S99. | F99F99.A99A99. | | | | | | | |
| | | | | | L99L99.L99L99. | F99F99. | S99S99.R99R99. | | | | | | | |
| | | | | | A99A99. | | S99S99.S83B00. | | | | | | | |
| | | | | | | | I99I99.P99P99. | | | | | | | |
| | | | | | | | T99T99.V99V99. | | | | | | | |
| | | | | | | | Q99Q99. | | | | | | | |
| 637 | 6 | FQ | RHNLV | GHIFVH | F99F99.Q99Q99. | R99R99.H99H99. | G83B00.H99H99. | 6 | 15 | 18 | 39 | Yes | Yes | Yes |
| | | | | | | N99N99.L99L99. | I99I99.F83B00. | | | | | | | |
| | | | | | | V99V99. | V99V99.H99H99. | | | | | | | |
| 638 | 6 | PVARYWS | DVSHA | HNWGCLGRQ | P99P99.V99V99. | D99D99.V99V99. | H99H99.N99N99. | 21 | 15 | 27 | 63 | Yes | Yes | Yes |
| | | | | | A99A99.R99R99. | S99S99.H83B00. | W99W99.G99G99. | | | | | | | |
| | | | | | Y99Y99.W99W99. | A99A99. | C99C99.L99L99. | | | | | | | |
| | | | | | S99S99. | | G99G99.R99R99. | | | | | | | |
| | | | | | | | Q99Q99. | | | | | | | |
| 639 | 6 | LWVVYAK | SNLRL | MGATVY | L99L99.W99W99. | S99S99.N99N99. | M99M99.G99G99. | 21 | 15 | 18 | 54 | Yes | Yes | Yes |
| | | | | | V99V99.V99V99. | L99L99.R99R99. | A99A99.T99T99. | | | | | | | |
| | | | | | Y99Y99.A99A99. | L99L99. | V99V99.Y99Y99. | | | | | | | |
| | | | | | K99K99. | | | | | | | | | |
| 642 | 6 | FVFCQFL | EDGHG | H | F99F99.V99V99. | E99E99.D99D99. | H99H99. | 21 | 15 | 3 | 39 | Yes | Yes | Yes |
| | | | | | F99F99.C99C99. | G99G99.H99H99. | | | | | | | | |
| | | | | | Q99Q99.F99F99. | G99G99. | | | | | | | | |
| | | | | | L99L99. | | | | | | | | | |
| 650 | 6 | RLCGLVW | TSARD | IGSPYGH | R99R99.L99L99. | T99T99.S99S99. | I99I99.G99G99. | 21 | 15 | 21 | 57 | Yes | Yes | Yes |
| | | | | | C99C99.G99G99. | A99A99.R99R99. | S83B00.P99P99. | | | | | | | |
| | | | | | L99L99.V99V99. | D99D99. | Y99Y99.G99G99. | | | | | | | |
| | | | | | W99W99. | | H99H99. | | | | | | | |
| 651 | 6 | ELGRSVY | SCGTA | ATSNYSSSIV | E99E99.L99L99. | S99S99.C99C99. | A99A99.T99T99. | 21 | 15 | 30 | 66 | Yes | Yes | Yes |
| | | | | | G99G99.R99R99. | G99G99.T99T99. | S99S99.N99N99. | | | | | | | |
| | | | | | S99S99.V99V99. | A99A99. | Y99Y99.S99S99. | | | | | | | |
| | | | | | Y99Y99. | | S99S99.S99S99. | | | | | | | |
| | | | | | | | I99I99.V99V99. | | | | | | | |
| 658 | 6 | KRTDFQL | VGIEI | LTFVTRDTRL | K99K99.R99R99. | V99V99.G99G99. | L99L99.T99T99. | 21 | 15 | 30 | 66 | Yes | Yes | Yes |
| | | | | | T99T99.D99D99. | I99I99.E99E99. | F99F99.V99V99. | | | | | | | |
| | | | | | F99F99.Q99Q99. | I99I99. | T99T99.R99R99. | | | | | | | |
| | | | | | L99L99. | | D99D99.T99T99. | | | | | | | |
| | | | | | | | R99R99.L99L99. | | | | | | | |
| 66 | 6 | HRCMA | RGSRD | WIHRDTLYCE | H99H99.R99R99. | R99R99.G99G99. | W99W99.I99I99. | 15 | 15 | 30 | 60 | Yes | Yes | Yes |
| | | | | | C99C99.M99M99. | S99S99.R99R99. | H99H99.R99R99. | | | | | | | |
| | | | | | A99A99. | D99D99. | D99D99.T99T99. | | | | | | | |
| | | | | | | | L99L99.Y99Y99. | | | | | | | |
| | | | | | | | C99C99.E99E99. | | | | | | | |
| 660 | 6 | SLVRLVF | HRDPT | ANINQNHGVF | S99S99.L99L99. | H99H99.R99R99. | A99A99.N99N99. | 21 | 15 | 30 | 66 | Yes | Yes | Yes |
| | | | | | V99V99.R99R99. | D99D99.P99P99. | I99I99.N99N99. | | | | | | | |
| | | | | | L99L99.V99V99. | T99T99. | Q99Q99.N99N99. | | | | | | | |
| | | | | | F99F99. | | H99H99.G99G99. | | | | | | | |
| | | | | | | | V99V99.F99F99. | | | | | | | |
| 667 | 6 | CRANEVV | GYVRC | QTSNVD | C99C99.R99R99. | G99G99.Y99Y99. | Q99Q99.T99T99. | 21 | 15 | 18 | 54 | Yes | Yes | Yes |
| | | | | | A99A99.N99N99. | V99V99.R99R99. | S99S99.N99N99. | | | | | | | |
| | | | | | E99E99.V99V99. | C99C99. | V99V99.D99D99. | | | | | | | |
| | | | | | V99V99. | | | | | | | | | |
| 692 | 6 | PHCSDRL | HRYVQ | LLWSNDSFPR | P99P99.H99H99. | H99H99.R99R99. | L99L99.L99L99. | 21 | 15 | 30 | 66 | Yes | Yes | Yes |
| | | | | | C99C99.S99S99. | Y99Y99.V99V99. | W99W99.S99S99. | | | | | | | |
| | | | | | D99D99.R99R99. | Q99Q99. | N99N99.D99D99. | | | | | | | |
| | | | | | L99L99. | | S99S99.F99F99. | | | | | | | |
| | | | | | | | P99P99.R99R99. | | | | | | | |
| 694 | 6 | YVSYVIY | NGEDP | HRYSANGSYP | Y99Y99.V99V99. | N99N99.G99G99. | H66B00.R66B00. | 21 | 15 | 20 | 56 | Yes | Yes | Yes |
| | | | | | S99S99.Y99Y99. | E99E99.D99D99. | Y66B00.S66B00. | | | | | | | |
| | | | | | V99V99.I83B00. | P99P99. | A66B00.N66B00. | | | | | | | |
| | | | | | Y99Y99. | | G66B00.S66B00. | | | | | | | |
| | | | | | | | Y66B00.P66B00. | | | | | | | |
| 709 | 6 | HLYMILI | SRLEH | DIVLPSGQVG | H99H99.L99L99. | S99S99.R99R99. | D99D99.I99I99. | 21 | 15 | 30 | 66 | Yes | Yes | Yes |
| | | | | | Y99Y99.M99M99. | L99L99.E99E99. | V99V99.L99L99. | | | | | | | |
| | | | | | I99I99.L99L99. | H99H99. | P99P99.S99S99. | | | | | | | |
| | | | | | I99I99. | | G99G99.Q99Q99. | | | | | | | |
| | | | | | | | V99V99.G99G99. | | | | | | | |
| 716 | 6 | YLAVLAW | SVNG | CGEY | Y99Y99.L99L99. | S99S99.V99V99. | C99C99.G99G99. | 21 | 12 | 12 | 45 | Yes | Yes | Yes |
| | | | | | A99A99.V99V99. | N99N99.G99G99. | E99E99.Y99Y99. | | | | | | | |
| | | | | | L99L99.A99A99. | | | | | | | | | |
| | | | | | W99W99. | | | | | | | | | |
| 723 | 6 | YIERLWV | PPLPR | LSTCVHGYRP | Y99Y99.I99I99. | P99P99.P99P99. | L99L99.S99S99. | 21 | 15 | 30 | 66 | Yes | Yes | Yes |
| | | | | | E99E99.R99R99. | L99L99.P99P99. | T99T99.C99C99. | | | | | | | |
| | | | | | L99L99.W99W99. | R99R99. | V99V99.H99H99. | | | | | | | |
| | | | | | V99V99. | | G99G99.Y99Y99. | | | | | | | |
| | | | | | | | R99R99.P99P99. | | | | | | | |
| 744 | 6 | DGTRCVF | RVGLT | AYFDNHSRVD | D99D99.G99G99. | R99R99.V99V99. | A99A99.Y99Y99. | 21 | 15 | 30 | 66 | Yes | Yes | Yes |
| | | | | | T83B00.R99R99. | G99G99.L99L99. | F99F99.D99D99. | | | | | | | |
| | | | | | C99C99.V99V99. | T99T99. | N99N99.H99H99. | | | | | | | |
| | | | | | F99F99. | | S99S99.R99R99. | | | | | | | |
| | | | | | | | V99V99.D99D99. | | | | | | | |
| 758 | 6 | GTYCVHL | PDMSV | LLTTTYGQLF | G99G99.T99T99. | P99P99.D99D99. | L99L99.L99L99. | 21 | 15 | 30 | 66 | Yes | Yes | Yes |
| | | | | | Y99Y99.C99C99. | M99M99.S99S99. | T99T99.T99T99. | | | | | | | |
| | | | | | V99V99.H99H99. | V99V99. | T99T99.Y99Y99. | | | | | | | |
| | | | | | L99L99. | | G99G99.Q99Q99. | | | | | | | |
| | | | | | | | L99L99.F99F99. | | | | | | | |
| 765 | 6 | GCIQSVV | GIIGV | YRRLPHVGVW | G99G99.C99C99. | G99G99.I99I99. | Y99Y99.R99R99. | 21 | 15 | 30 | 66 | Yes | Yes | Yes |
| | | | | | I99I99.Q99Q99. | I99I99.G99G99. | R99R99.L99L99. | | | | | | | |
| | | | | | S99S99.V99V99. | V99V99. | P99P99.H99H99. | | | | | | | |
| | | | | | V99V99. | | V99V99.G99G99. | | | | | | | |
| | | | | | | | V99V99.W99W99. | | | | | | | |
| 772 | 6 | DALQ | CFEYY | FNWQPRGRV | D99D99.A99A99. | C99C99.F99F99. | F99F99.N99N99. | 12 | 15 | 27 | 54 | Yes | Yes | Yes |
| | | | | | L99L99.Q99Q99. | E99E99.Y99Y99. | W99W99.Q99Q99. | | | | | | | |
| | | | | | | Y99Y99. | P99P99.R99R99. | | | | | | | |
| | | | | | | | G99G99.R99R99. | | | | | | | |
| | | | | | | | V99V99. | | | | | | | |
| 776 | 6 | CWCNEAH | GCSFV | FD | C99C99.W99W99. | G99G99.C99C99. | F99F99.D99D99. | 21 | 15 | 6 | 42 | Yes | Yes | Yes |
| | | | | | C99C99.N99N99. | S99S99.F99F99. | | | | | | | | |
| | | | | | E99E99.A99A99. | V99V99. | | | | | | | | |
| | | | | | H99H99. | | | | | | | | | |
| 790 | 6 | MMCGIVQ | PCE | HALCLTCTQGVIL | M99M99.M99M99. | P99P99.C99C99. | H99H99.A99A99. | 21 | 9 | 39 | 69 | Yes | Yes | Yes |
| | | | | | C99C99.G99G99. | E99E99. | L99L99.C99C99. | | | | | | | |
| | | | | | I99I99.V99V99. | | L99L99.T99T99. | | | | | | | |
| | | | | | Q99Q99. | | C99C99.T99T99. | | | | | | | |
| | | | | | | | Q99Q99.G99G99. | | | | | | | |
| | | | | | | | V99V99.I99I99. | | | | | | | |
| | | | | | | | L99L99. | | | | | | | |
| 793 | 6 | NYVAYLL | STMAS | VDLCLL | N99N99.Y99Y99. | S99S99.T99T99. | V99V99.D99D99. | 21 | 15 | 18 | 54 | Yes | Yes | Yes |
| | | | | | V99V99.A99A99. | M99M99.A99A99. | L99L99.C99C99. | | | | | | | |
| | | | | | Y99Y99.L99L99. | S99S99. | L99L99.L99L99. | | | | | | | |
| | | | | | L99L99. | | | | | | | | | |
| 803 | 6 | R | PAIMC | LQVGFG | R99R99. | P99P99.A99A99. | L99L99.Q99Q99. | 3 | 15 | 18 | 36 | Yes | Yes | Yes |
| | | | | | | I99I99.M99M99. | V99V99.G99G99. | | | | | | | |
| | | | | | | C99C99. | F99F99.G99G99. | | | | | | | |
| 811 | 6 | LTHSCVY | GCGPY | ALYISSNHVH | L99L99.T99T99. | G99G99.C99C99. | A99A99.L99L99. | 21 | 15 | 30 | 66 | Yes | Yes | Yes |
| | | | | | H99H99.S99S99. | G99G99.P99P99. | Y99Y99.I99I99. | | | | | | | |
| | | | | | C99C99.V99V99. | Y99Y99. | S99S99.S99S99. | | | | | | | |
| | | | | | Y99Y99. | | N99N99.H99H99. | | | | | | | |
| | | | | | | | V99V99.H99H99. | | | | | | | |
| 813 | 6 | AVNAQVW | RGSHC | AYWAPGGVF | A99A99.V99V99. | R99R99.G99G99. | A99A99.Y99Y99. | 21 | 15 | 27 | 63 | Yes | Yes | Yes |
| | | | | | N99N99.A99A99. | S99S99.H99H99. | W99W99.A99A99. | | | | | | | |
| | | | | | Q99Q99.V99V99. | C99C99. | P99P99.G99G99. | | | | | | | |
| | | | | | W99W99. | | G99G99.V99V99. | | | | | | | |
| | | | | | | | F99F99. | | | | | | | |
| 815 | 6 | NHRPIVS | GAIAV | NSYRGVGLIL | N99N99.H99H99. | G99G99.A99A99. | N99N99.S99S99. | 21 | 15 | 30 | 66 | Yes | Yes | Yes |
| | | | | | R99R99.P99P99. | I99I99.A99A99. | Y99Y99.R99R99. | | | | | | | |
| | | | | | I99I99.V99V99. | V99V99. | G99G99.V99V99. | | | | | | | |
| | | | | | S99S99. | | G99G99.L99L99. | | | | | | | |
| | | | | | | | I99I99.L99L99. | | | | | | | |
| 822 | 6 | HPYEDSA | RFGDV | IHLVRNKLLA | H99H99.P99P99. | R99R99.F99F99. | I99I99.H99H99. | 21 | 15 | 30 | 66 | Yes | Yes | Yes |
| | | | | | Y99Y99.E99E99. | G99G99.D99D99. | L99L99.V99V99. | | | | | | | |
| | | | | | D99D99.S99S99. | V99V99. | R99R99.N99N99. | | | | | | | |
| | | | | | A99A99. | | K99K99.L99L99. | | | | | | | |
| | | | | | | | L99L99.A99A99. | | | | | | | |
| 824 | 6 | WR | PSFGY | AHVGLNCCVI | W99W99.R99R99. | P99P99.S99S99. | A99A99.H99H99. | 6 | 15 | 30 | 51 | Yes | Yes | Yes |
| | | | | | | F99F99.G99G99. | V99V99.G99G99. | | | | | | | |
| | | | | | | Y99Y99. | L99L99.N99N99. | | | | | | | |
| | | | | | | | C83B00.C99C99. | | | | | | | |
| | | | | | | | V99V99.I99I99. | | | | | | | |
| 831 | 6 | EWRSVVW | PGATG | TIFSHGP | E99E99.W99W99. | P99P99.G99G99. | T99T99.I99I99. | 21 | 15 | 30 | 66 | Yes | Yes | Yes |
| | | | | | R99R99.S99S99. | A99A99.T99T99. | F99F99.S99S99. | | | | | | | |
| | | | | | V99V99.V99V99. | G99G99. | H99H99.G99G99. | | | | | | | |
| | | | | | W99W99. | | P99P99.V99V99. | | | | | | | |
| | | | | | | | L99L99.T99T99. | | | | | | | |
| 833 | 6 | LLRKCVF | NGICV | VIYSPAAVE | L99L99.L99L99. | N99N99.G99G99. | V99V99.I99I99. | 21 | 15 | 27 | 63 | Yes | Yes | Yes |
| | | | | | R99R99.K99K99. | I99I99.C99C99. | Y99Y99.S99S99. | | | | | | | |
| | | | | | C99C99.V99V99. | V99V99. | P99P99.A99A99. | | | | | | | |
| | | | | | F99F99. | | A99A99.V99V99. | | | | | | | |
| | | | | | | | E99E99. | | | | | | | |
| 843 | 6 | VGLLCVV | PSTF | FQPSACCSVR | V99V99.G99G99. | P99P99.S83B00. | F99F99.Q99Q99. | 21 | 12 | 30 | 63 | Yes | Yes | Yes |
| | | | | | L99L99.L99L99. | T99T99.F99F99. | P99P99.S99S99. | | | | | | | |
| | | | | | C99C99.V99V99. | | A99A99.C99C99. | | | | | | | |
| | | | | | V99V99. | | C99C99.S99S99. | | | | | | | |
| | | | | | | | V99V99.R99R99. | | | | | | | |
| 845 | 6 | ILSCWYV | IAPVN | FPAYSACFHF | I99I99.L99L99. | I99I99.A99A99. | F99F99.P99P99. | 21 | 15 | 30 | 66 | Yes | Yes | Yes |
| | | | | | S99S99.C99C99. | P99P99.V99V99. | A99A99.Y99Y99. | | | | | | | |
| | | | | | W99W99.Y99Y99. | N99N99. | S99S99.A99A99. | | | | | | | |
| | | | | | V99V99. | | C99C99.F99F99. | | | | | | | |
| | | | | | | | H99H99.F99F99. | | | | | | | |
| 848 | 6 | MSLSSST | MFLFV | FLTNVL | M99M99.S99S99. | M99M99.F99F99. | F99F99.L99L99. | 21 | 15 | 18 | 54 | Yes | Yes | Yes |
| | | | | | L99L99.S99S99. | L99L99.F99F99. | T99T99.N99N99. | | | | | | | |
| | | | | | S99S99.S99S99. | V99V99. | V99V99.L99L99. | | | | | | | |
| | | | | | T99T99. | | | | | | | | | |
| 850 | 6 | MVNANVY | RDHYV | AYCCSASGRYTVA | M99M99.V99V99. | R99R99.D99D99. | A99A99.Y99Y99. | 21 | 15 | 39 | 75 | Yes | Yes | Yes |
| | | | | | N99N99.A99A99. | H99H99.Y99Y99. | C99C99.C99C99. | | | | | | | |
| | | | | | N99N99.V99V99. | V99V99. | S99S99.A99A99. | | | | | | | |
| | | | | | Y99Y99. | | S99S99.G99G99. | | | | | | | |
| | | | | | | | R83B00.Y99Y99. | | | | | | | |
| | | | | | | | T99T99.V99V99. | | | | | | | |
| | | | | | | | A99A99. | | | | | | | |
| 851 | 6 | ACVV | ATHLN | YCFGDS | A99A99.C99C99. | A99A99.T99T99. | B00 | 12 | 15 | 0 | 27 | Yes | Yes | Yes |
| | | | | | V99V99.V99V99. | H99H99.L99L99. | | | | | | | | |
| | | | | | | N99N99. | | | | | | | | |
| 857 | 6 | WNGTALN | PVFAT | FCYNTSCVIE | W99W99.N83B00. | P99P99.V99V99. | F99F99.C99C99. | 21 | 15 | 30 | 66 | Yes | Yes | Yes |
| | | | | | G99G99.T99T99. | F99F99.A99A99. | Y99Y99.N99N99. | | | | | | | |
| | | | | | A99A99.L99L99. | T99T99. | T99T99.S99S99. | | | | | | | |
| | | | | | N99N99. | | C99C99.V99V99. | | | | | | | |
| | | | | | | | I99I99.E99E99. | | | | | | | |
| 862 | 6 | WVVRECF | VDASS | AALVTLVSVV | W99W99.V99V99. | V99V99.D99D99. | B00 | 21 | 15 | 0 | 36 | Yes | Yes | Yes |
| | | | | | V99V99.R83B00. | A99A99.S99S99. | | | | | | | | |
| | | | | | E99E99.C99C99. | S99S99. | | | | | | | | |
| | | | | | F99F99. | | | | | | | | | |
| 865 | 6 | PTIGCCY | VGSIS | LYATGSSEELTIH | P99P99.T99T99. | V99V99.G99G99. | L99L99.Y99Y99. | 21 | 15 | 39 | 75 | Yes | Yes | Yes |
| | | | | | I99I99.G99G99. | S99S99.I99I99. | A99A99.T99T99. | | | | | | | |
| | | | | | C99C99.C99C99. | S99S99. | G99G99.S99S99. | | | | | | | |
| | | | | | Y99Y99. | | S99S99.E99E99. | | | | | | | |
| | | | | | | | E99E99.L99L99. | | | | | | | |
| | | | | | | | T83B00.I99I99. | | | | | | | |
| | | | | | | | H99H99. | | | | | | | |
| 870 | 6 | YLSRRIF | VLGVP | YCIDCLFTVV | Y99Y99.L99L99. | V99V99.L99L99. | B00 | 21 | 15 | 0 | 36 | Yes | Yes | Yes |
| | | | | | S99S99.R99R99. | G99G99.V99V99. | | | | | | | | |
| | | | | | R99R99.I99I99. | P99P99. | | | | | | | | |
| | | | | | F99F99. | | | | | | | | | |
| 872 | 6 | DMLVIYG | TCSFE | NIHVTGYGNC | D99D99.M99M99. | T99T99.C99C99. | N99N99.I99I99. | 21 | 15 | 30 | 66 | Yes | Yes | Yes |
| | | | | | L99L99.V99V99. | S99S99.F99F99. | H99H99.V99V99. | | | | | | | |
| | | | | | I99I99.Y83B00. | E99E99. | T99T99.G99G99. | | | | | | | |
| | | | | | G99G99. | | Y99Y99.G99G99. | | | | | | | |
| | | | | | | | N99N99.C99C99. | | | | | | | |
| 873 | 6 | HIAGCHA | YGNMI | PGF | H99H99.I99I99. | Y99Y99.G99G99. | P99P99.G99G99. | 21 | 15 | 9 | 45 | Yes | Yes | Yes |
| | | | | | A99A99.G99G99. | N99N99.M99M99. | F99F99. | | | | | | | |
| | | | | | C99C99.H99H99. | I99I99. | | | | | | | | |
| | | | | | A99A99. | | | | | | | | | |
| 881 | 6 | TLGRNVY | VLD | VYLSRLSNVL | T99T99.L99L99. | V99V99.L99L99. | V99V99.Y99Y99. | 21 | 9 | 30 | 60 | Yes | Yes | Yes |
| | | | | | G99G99.R99R99. | D99D99. | L99L99.S99S99. | | | | | | | |
| | | | | | N99N99.V99V99. | | R99R99.L99L99. | | | | | | | |
| | | | | | Y99Y99. | | S99S99.N99N99. | | | | | | | |
| | | | | | | | V99V99.L99L99. | | | | | | | |
| 886 | 6 | LCFHSYC | FARKG | NDIYWV | L99L99.C99C99. | F99F99.A99A99. | N99N99.D99D99. | 21 | 15 | 18 | 54 | Yes | Yes | Yes |
| | | | | | F99F99.H99H99. | R99R99.K99K99. | I99I99.Y99Y99. | | | | | | | |
| | | | | | S99S99.Y83B00. | G99G99. | W99W99.V99V99. | | | | | | | |
| | | | | | C99C99. | | | | | | | | | |
| 892 | 6 | DGWLVGC | SWQSS | NSWNVCFGD | D99D99.G99G99. | S99S99.W99W99. | N99N99.S99S99. | 21 | 15 | 27 | 63 | Yes | Yes | Yes |
| | | | | | W99W99.L99L99. | Q99Q99.S99S99. | W99W99.F99F99. | | | | | | | |
| | | | | | V99V99.G99G99. | S99S99. | G99G99.D99D99. | | | | | | | |
| | | | | | C99C99. | | N99N99.V99V99. | | | | | | | |
| | | | | | | | C99C99. | | | | | | | |
| 898 | 6 | GPYCWER | MCFND | SPSGYCLFLL | G99G99.P99P99. | M99M99.C99C99. | S99S99.P99P99. | 21 | 15 | 30 | 66 | Yes | Yes | Yes |
| | | | | | Y99Y99.C99C99. | F99F99.N99N99. | S99S99.G99G99. | | | | | | | |
| | | | | | W99W99.E99E99. | D99D99. | Y99Y99.C99C99. | | | | | | | |
| | | | | | R99R99. | | L99L99.F99F99. | | | | | | | |
| | | | | | | | L99L99.L99L99. | | | | | | | |
| 908 | 6 | VLEFLVY | TGGCC | ACYNTTAICA | V99V99.L99L99. | T99T99.G99G99. | B00 | 21 | 15 | 0 | 36 | Yes | Yes | Yes |
| | | | | | E99E99.F99F99. | G99G99.C99C99. | | | | | | | | |
| | | | | | L99L99.V99V99. | C99C99. | | | | | | | | |
| | | | | | Y99Y99. | | | | | | | | | |
| 913 | 6 | VVTRKVF | PDLAS | YCNSRTGVVV | V99V99.V83B00. | P99P99.D99D99. | B00 | 21 | 15 | 0 | 36 | Yes | Yes | Yes |
| | | | | | T99T99.R99R99. | L99L99.A99A99. | | | | | | | | |
| | | | | | K99K99.V99V99. | S99S99. | | | | | | | | |
| | | | | | F99F99. | | | | | | | | | |
| 914 | 6 | TYDHCFG | EMEWL | NMWISSALG | T99T99.Y83B00. | E99E99.M99M99. | N99N99.M99M99. | 21 | 15 | 27 | 63 | Yes | Yes | Yes |
| | | | | | D99D99.H99H99. | E99E99.W99W99. | W99W99.I99I99. | | | | | | | |
| | | | | | C99C99.F99F99. | L99L99. | S99S99.S99S99. | | | | | | | |
| | | | | | G99G99. | | A99A99.L99L99. | | | | | | | |
| | | | | | | | G99G99. | | | | | | | |
| 916 | 6 | DWTRIVF | TAGGH | FRLSLSGSII | D99D99.W99W99. | T99T99.A99A99. | F99F99.R99R99. | 21 | 15 | 30 | 66 | Yes | Yes | Yes |
| | | | | | T99T99.R83B00. | G99G99.G99G99. | L99L99.S99S99. | | | | | | | |
| | | | | | I99I99.V99V99. | H99H99. | L99L99.S99S99. | | | | | | | |
| | | | | | F99F99. | | G99G99.S99S99. | | | | | | | |
| | | | | | | | I99I99.I99I99. | | | | | | | |
| 103 | 5 | TYSALVW | ELGCD | VMLLYSRDHCCAQ | T99T99.Y99Y99. | E99E99.L99L99. | V99V99.M99M99. | 21 | 15 | 39 | 75 | Yes | Yes | Yes |
| | | | | | S99S99.A99A99. | G99G99.C99C99. | L99L99.L99L99. | | | | | | | |
| | | | | | L99L99.V99V99. | D99D99. | Y99Y99.S99S99. | | | | | | | |
| | | | | | W99W99. | | R99R99.D99D99. | | | | | | | |
| | | | | | | | H99H99.C99C99. | | | | | | | |
| | | | | | | | C99C99.A99A99. | | | | | | | |
| | | | | | | | Q99Q99. | | | | | | | |
| 12 | 5 | LNVFA | TCGPR | HHYEHNYMLN | L99L99.N99N99. | T99T99.C99C99. | H99H99.H99H99. | 21 | 15 | 30 | 66 | Yes | Yes | Yes |
| | | | | | R99R99.D99D99. | G99G99.P99P99. | Y99Y99.E99E99. | | | | | | | |
| | | | | | V99V99.F99F99. | R99R99. | H99H99.N99N99. | | | | | | | |
| | | | | | A99A99. | | Y99Y99.M99M99. | | | | | | | |
| | | | | | | | L99L99.N99N99. | | | | | | | |
| 126 | 5 | CSNEYPL | ALHKV | VSPSLS | C99C99.S99S99. | A99A99.L99L99. | V99V99.S99S99. | 21 | 15 | 18 | 54 | Yes | Yes | Yes |
| | | | | | N99N99.E99E99. | H99H99.K99K99. | P99P99.S99S99. | | | | | | | |
| | | | | | Y99Y99.P99P99. | V99V99. | L99L99.S99S99. | | | | | | | |
| | | | | | L99L99. | | | | | | | | | |
| 173 | 5 | CPNTRVY | SSGAL | YYYCALNCLD | C99C99.P99P99. | S99S99.S99S99. | Y99Y99.Y99Y99. | 21 | 15 | 30 | 66 | Yes | Yes | Yes |
| | | | | | N99N99.T99T99. | G99G99.A99A99. | Y99Y99.C99C99. | | | | | | | |
| | | | | | R99R99.V99V99. | L99L99. | A99A99.L99L99. | | | | | | | |
| | | | | | Y99Y99. | | N99N99.C99C99. | | | | | | | |
| | | | | | | | L99L99.D99D99. | | | | | | | |
| 183 | 5 | GGCSCST | LV | IAHRCYCCF | G99G99.G99G99. | L99L99.V99V99. | I99I99.A99A99. | 21 | 6 | 27 | 54 | Yes | Yes | Yes |
| | | | | | C99C99.S99S99. | | H99H99.R99R99. | | | | | | | |
| | | | | | C99C99.S99S99. | | C99C99.Y99Y99. | | | | | | | |
| | | | | | T99T99. | | C99C99.C99C99. | | | | | | | |
| | | | | | | | F99F99. | | | | | | | |
| 197 | 5 | VTVLSLG | GLKRA | HFFARHFVD | V99V99.T99T99. | G99G99.L99L99. | H99H99.F99F99. | 16 | 15 | 27 | 58 | Yes | Yes | Yes |
| | | | | | V80B00.L80B00. | K99K99.R99R99. | F99F99.A99A99. | | | | | | | |
| | | | | | S80B00.L80B00. | A99A99. | R99R99.H99H99. | | | | | | | |
| | | | | | G80B00. | | F99F99.V99V99. | | | | | | | |
| | | | | | | | D99D99. | | | | | | | |
| 198 | 5 | VVCNRIF | NDMCG | AVLTVCGLVT | V99V99.V99V99. | N99N99.D99D99. | A99A99.V99V99. | 21 | 15 | 30 | 66 | Yes | Yes | Yes |
| | | | | | C99C99.N99N99. | M99M99.C99C99. | L99L99.T99T99. | | | | | | | |
| | | | | | R99R99.I99I99. | G99G99. | V99V99.C99C99. | | | | | | | |
| | | | | | F99F99. | | G99G99.L99L99. | | | | | | | |
| | | | | | | | V99V99.T99T99. | | | | | | | |
| 215 | 5 | VRSAWFY | PHYRG | PLFYNVLTGSLSG | V99V99.R99R99. | P99P99.H99H99. | P99P99.L99L99. | 21 | 15 | 39 | 75 | Yes | Yes | Yes |
| | | | | | S99S99.A99A99. | Y99Y99.R99R99. | F99F99.Y99Y99. | | | | | | | |
| | | | | | W99W99.F99F99. | G99G99. | N99N99.V99V99. | | | | | | | |
| | | | | | Y99Y99. | | L99L99.T99T99. | | | | | | | |
| | | | | | | | G99G99.S99S99. | | | | | | | |
| | | | | | | | L99L99.S99S99. | | | | | | | |
| | | | | | | | G99G99. | | | | | | | |
| 23 | 5 | WYVDTSH | AVSDH | VCQARW | W99W99.Y99Y99. | A99A99.V99V99. | V99V99.C99C99. | 20 | 15 | 18 | 53 | Yes | Yes | Yes |
| | | | | | V99V99.D80B00. | S99S99.D99D99. | Q99Q99.A99A99. | | | | | | | |
| | | | | | T99T99.S99S99. | H99H99. | R99R99.W99W99. | | | | | | | |
| | | | | | H99H99. | | | | | | | | | |
| 233 | 5 | VHFKYSC | CLLDR | FLIDRRDDFVLCM | V99V99.H80B00. | C99C99.L99L99. | F99F99.L99L99. | 20 | 15 | 39 | 74 | Yes | Yes | Yes |
| | | | | | F99F99.K99K99. | L99L99.D99D99. | I99I99.D99D99. | | | | | | | |
| | | | | | Y99Y99.S99S99. | R99R99. | R99R99.R99R99. | | | | | | | |
| | | | | | C99C99. | | D99D99.D99D99. | | | | | | | |
| | | | | | | | F99F99.V99V99. | | | | | | | |
| | | | | | | | L99L99.C99C99. | | | | | | | |
| | | | | | | | M99M99. | | | | | | | |
| 246 | 5 | CLSHTVY | AGSLG | TLIDSQGYVA | C99C99.L99L99. | A99A99.G99G99. | T99T99.L99L99. | 21 | 15 | 30 | 66 | Yes | Yes | Yes |
| | | | | | S99S99.H99H99. | S99S99.L99L99. | I99I99.D99D99. | | | | | | | |
| | | | | | T99T99.V99V99. | G99G99. | S99S99.Q99Q99. | | | | | | | |
| | | | | | Y99Y99. | | G99G99.Y99Y99. | | | | | | | |
| | | | | | | | V99V99.A99A99. | | | | | | | |
| 262 | 5 | LRSLLG | RSDTD | HVYSLTGAVM | L99L99.R99R99. | R99R99.S99S99. | H99H99.V99V99. | 18 | 15 | 30 | 63 | Yes | Yes | Yes |
| | | | | | S99S99.L99L99. | D99D99.T99T99. | Y99Y99.S99S99. | | | | | | | |
| | | | | | L99L99.G99G99. | D99D99. | L99L99.T99T99. | | | | | | | |
| | | | | | | | G99G99.A99A99. | | | | | | | |
| | | | | | | | V99V99.M99M99. | | | | | | | |
| 279 | 5 | VRVLGVV | TRACN | TYFAHSSVLT | V99V99.R99R99. | T99T99.R99R99. | T80B00.Y99Y99. | 21 | 15 | 22 | 58 | Yes | Yes | Yes |
| | | | | | V99V99.L99L99. | A99A99.C99C99. | F80B00.A80B00. | | | | | | | |
| | | | | | G99G99.V99V99. | N99N99. | H80B00.S80B00. | | | | | | | |
| | | | | | V99V99. | | S99S99.V80B00. | | | | | | | |
| | | | | | | | L80B00.T80B00. | | | | | | | |
| 283 | 5 | LPLPPIR | ILTRW | LYNLSTSVME | L99L99.P99P99. | I99I99.L99L99. | L99L99.Y99Y99. | 21 | 15 | 30 | 66 | Yes | Yes | Yes |
| | | | | | L99L99.P99P99. | T99T99.R99R99. | N99N99.L99L99. | | | | | | | |
| | | | | | P99P99.I99I99. | W99W99. | S99S99.T99T99. | | | | | | | |
| | | | | | R99R99. | | S99S99.V99V99. | | | | | | | |
| | | | | | | | M99M99.E99E99. | | | | | | | |
| 291 | 5 | LWASEFG | EEDGI | MICSYR | L99L99.W99W99. | E99E99.E99E99. | M99M99.I99I99. | 21 | 15 | 18 | 54 | Yes | Yes | Yes |
| | | | | | A99A99.S99S99. | D99D99.G99G99. | C99C99.S99S99. | | | | | | | |
| | | | | | E99E99.F99F99. | I99I99. | Y99Y99.R99R99. | | | | | | | |
| | | | | | G99G99. | | | | | | | | | |
| 294 | 5 | WSNCFIV | SVTHA | LDTGLC | W99W99.S99S99. | S99S99.V99V99. | L99L99.D99D99. | 21 | 15 | 18 | 54 | Yes | Yes | Yes |
| | | | | | N99N99.C99C99. | T99T99.H99H99. | T99T99.G99G99. | | | | | | | |
| | | | | | F99F99.I99I99. | A99A99. | L99L99.C99C99. | | | | | | | |
| | | | | | V99V99. | | | | | | | | | |
| 309 | 5 | NLFRWAH | DWGQS | PIVTGHGTVV | N99N99.L99L99. | D99D99.W99W99. | P99P99.I99I99. | 21 | 15 | 30 | 66 | Yes | Yes | Yes |
| | | | | | F99F99.R99R99. | G99G99.Q99Q99. | V99V99.T99T99. | | | | | | | |
| | | | | | W99W99.A99A99. | S99S99. | G99G99.H99H99. | | | | | | | |
| | | | | | H99H99. | | G99G99.T99T99. | | | | | | | |
| | | | | | | | V99V99.V99V99. | | | | | | | |
| 331 | 5 | LSCFCRV | SRACT | FPSIHSEDCY | L99L99.S99S99. | S99S99.R99R99. | F99F99.P99P99. | 21 | 15 | 30 | 66 | Yes | Yes | Yes |
| | | | | | C99C99.F99F99. | A99A99.C99C99. | S99S99.I99I99. | | | | | | | |
| | | | | | C99C99.R99R99. | T99T99. | H99H99.S99S99. | | | | | | | |
| | | | | | V99V99. | | E99E99.D99D99. | | | | | | | |
| | | | | | | | C99C99.Y99Y99. | | | | | | | |
| 363 | 5 | YGCGLVY | KQSLG | WFFRNDLDPQ | Y99Y99.G99G99. | K99K99.Q99Q99. | W99W99.F99F99. | 21 | 15 | 30 | 66 | Yes | Yes | Yes |
| | | | | | C99C99.G99G99. | S99S99.L99L99. | F99F99.R99R99. | | | | | | | |
| | | | | | L99L99.V99V99. | G99G99. | N99N99.D99D99. | | | | | | | |
| | | | | | Y99Y99. | | L99L99.D99D99. | | | | | | | |
| | | | | | | | P99P99.Q99Q99. | | | | | | | |
| 380 | 5 | RNFNTGD | RSFLV | FAVCTGLGVF | R99R99.N99N99. | R99R99.S99S99. | F99F99.A99A99. | 21 | 15 | 30 | 66 | Yes | Yes | Yes |
| | | | | | F99F99.N99N99. | F99F99.L99L99. | V99V99.C99C99. | | | | | | | |
| | | | | | T99T99.G99G99. | V99V99. | T99T99.G99G99. | | | | | | | |
| | | | | | D99D99. | | L99L99.G99G99. | | | | | | | |
| | | | | | | | V99V99.F99F99. | | | | | | | |
| 389 | 5 | YDILYMF | PGRYV | SPDFSL | Y99Y99.D99D99. | P99P99.G99G99. | S99S99.P99P99. | 21 | 15 | 18 | 54 | Yes | Yes | Yes |
| | | | | | I99I99.L99L99. | R99R99.Y99Y99. | D99D99.F99F99. | | | | | | | |
| | | | | | Y99Y99.M99M99. | V99V99. | S99S99.L99L99. | | | | | | | |
| | | | | | F99F99. | | | | | | | | | |
| 404 | 5 | YCYHTYY | HDDNM | GVYVQWRGVY | Y99Y99.C99C99. | H99H99.D99D99. | G99G99.V99V99. | 21 | 15 | 30 | 66 | Yes | Yes | Yes |
| | | | | | Y99Y99.H99H99. | D99D99.N99N99. | Y99Y99.V99V99. | | | | | | | |
| | | | | | T99T99.Y99Y99. | M99M99. | Q99Q99.W99W99. | | | | | | | |
| | | | | | Y99Y99. | | R99R99.G99G99. | | | | | | | |
| | | | | | | | V99V99.Y99Y99. | | | | | | | |
| 407 | 5 | LIS | RTCSS | CCLREDLTCF | G99G99.Y99Y99. | R99R99.T99T99. | C99C99.C99C99. | 21 | 15 | 30 | 66 | Yes | Yes | Yes |
| | | | | | V99V99.V99V99. | C99C99.S99S99. | L99L99.R99R99. | | | | | | | |
| | | | | | L99L99.I99I99. | S99S99. | E99E99.D99D99. | | | | | | | |
| | | | | | S99S99. | | L99L99.T99T99. | | | | | | | |
| | | | | | | | C99C99.F99F99. | | | | | | | |
| 411 | 5 | SWPAFAC | GCNRN | VDQSW | S80B00.W99W99. | G99G99.C99C99. | V99V99.D99D99. | 20 | 15 | 15 | 50 | Yes | Yes | Yes |
| | | | | | P99P99.A99A99. | N99N99.R99R99. | Q99Q99.S99S99. | | | | | | | |
| | | | | | F99F99.A99A99. | N99N99. | W99W99. | | | | | | | |
| | | | | | C99C99. | | | | | | | | | |
| 429 | 5 | FIQQLVF | IDGVS | YTLCAG | F99F99.I99I99. | I99I99.D99D99. | Y99Y99.T99T99. | 21 | 15 | 18 | 54 | Yes | Yes | Yes |
| | | | | | Q99Q99.Q99Q99. | G99G99.V99V99. | L99L99.C99C99. | | | | | | | |
| | | | | | L99L99.V99V99. | S99S99. | A99A99.G99G99. | | | | | | | |
| | | | | | F99F99. | | | | | | | | | |
| 435 | 5 | SVIYVMW | KLTES | AVNCCL | S99S99.V99V99. | K99K99.L99L99. | A99A99.V99V99. | 21 | 15 | 18 | 54 | Yes | Yes | Yes |
| | | | | | I99I99.Y99Y99. | T99T99.E99E99. | N99N99.C99C99. | | | | | | | |
| | | | | | V99V99.M99M99. | S99S99. | C99C99.L99L99. | | | | | | | |
| | | | | | W99W99. | | | | | | | | | |
| 446 | 5 | GISALLF | CPERR | IDMYGC | G99G99.I99I99. | C99C99.P99P99. | I99I99.D99D99. | 21 | 15 | 18 | 54 | Yes | Yes | Yes |
| | | | | | S99S99.A99A99. | E99E99.R99R99. | M99M99.Y99Y99. | | | | | | | |
| | | | | | L99L99.L99L99. | R99R99. | G99G99.C99C99. | | | | | | | |
| | | | | | F99F99. | | | | | | | | | |
| 453 | 5 | NIICVFS | LRCAG | LGTLTPVSCD | N99N99.I99I99. | L99L99.R99R99. | L99L99.G99G99. | 21 | 15 | 30 | 66 | Yes | Yes | Yes |
| | | | | | I99I99.C99C99. | C99C99.A99A99. | T99T99.L99L99. | | | | | | | |
| | | | | | V99V99.F99F99. | G99G99. | T99T99.P99P99. | | | | | | | |
| | | | | | S99S99. | | V99V99.S99S99. | | | | | | | |
| | | | | | | | C99C99.D99D99. | | | | | | | |
| 459 | 5 | VYYVERA | GYGTV | PLC | V99V99.Y99Y99. | G99G99.Y99Y99. | P99P99.L99L99. | 21 | 15 | 9 | 45 | Yes | Yes | Yes |
| | | | | | Y99Y99.V99V99. | G99G99.T99T99. | C99C99. | | | | | | | |
| | | | | | E99E99.R99R99. | V99V99. | | | | | | | | |
| | | | | | A99A99. | | | | | | | | | |
| 465 | 5 | RFGSNLY | GVLVN | ICQWGC | R99R99.F99F99. | G99G99.V99V99. | I99I99.C99C99. | 21 | 15 | 18 | 54 | Yes | Yes | Yes |
| | | | | | G99G99.S99S99. | L99L99.V99V99. | Q99Q99.W99W99. | | | | | | | |
| | | | | | N99N99.L99L99. | N99N99. | G99G99.C99C99. | | | | | | | |
| | | | | | Y99Y99. | | | | | | | | | |
| 478 | 5 | YLVAYEN | MTCKS | PNGTVPHCSI | Y99Y99.L99L99. | M99M99.T99T99. | B00 | 21 | 15 | 0 | 36 | Yes | Yes | Yes |
| | | | | | V99V99.A99A99. | C99C99.K99K99. | | | | | | | | |
| | | | | | Y99Y99.E99E99. | S99S99. | | | | | | | | |
| | | | | | N99N99. | | | | | | | | | |
| 479 | 5 | NIDPV | VHPCN | FALLTTAGFF | N99N99.I99I99. | V99V99.H99H99. | F99F99.A99A99. | 21 | 15 | 30 | 66 | Yes | Yes | Yes |
| | | | | | F99F99.N99N99. | P99P99.C99C99. | L99L99.L99L99. | | | | | | | |
| | | | | | D99D99.P99P99. | N99N99. | T99T99.T99T99. | | | | | | | |
| | | | | | V99V99. | | A99A99.G99G99. | | | | | | | |
| | | | | | | | F99F99.F99F99. | | | | | | | |
| 487 | 5 | PSPVFMI | CCFFF | LHLDPNDRVL | P80B00.S99S99. | C99C99.C99C99. | L99L99.H99H99. | 20 | 15 | 30 | 65 | Yes | Yes | Yes |
| | | | | | P99P99.V99V99. | F99F99.F99F99. | L99L99.D99D99. | | | | | | | |
| | | | | | F99F99.M99M99. | F99F99. | P99P99.N99N99. | | | | | | | |
| | | | | | I99I99. | | D99D99.R99R99. | | | | | | | |
| | | | | | | | V99V99.L99L99. | | | | | | | |
| 492 | 5 | FSDFLQI | VGCGS | YQWRLSGRF | F99F99.S99S99. | V99V99.G99G99. | Y99Y99.Q99Q99. | 21 | 15 | 27 | 63 | Yes | Yes | Yes |
| | | | | | D99D99.P99P99. | C99C99.G99G99. | W99W99.R99R99. | | | | | | | |
| | | | | | L99L99.Q99Q99. | S99S99. | L99L99.S99S99. | | | | | | | |
| | | | | | I99I99. | | G99G99.R99R99. | | | | | | | |
| | | | | | | | F99F99. | | | | | | | |
| 505 | 5 | GFVGCID | NRLPA | WPIARQSDLRRF | G99G99.F99F99. | N99N99.R99R99. | W99W99.P99P99. | 21 | 15 | 36 | 72 | Yes | Yes | Yes |
| | | | | | V99V99.G99G99. | L99L99.P99P99. | I99I99.A99A99. | | | | | | | |
| | | | | | C99C99.I99I99. | A99A99. | R99R99.Q99Q99. | | | | | | | |
| | | | | | D99D99. | | S99S99.D99D99. | | | | | | | |
| | | | | | | | L99L99.R99R99. | | | | | | | |
| | | | | | | | R99R99.F99F99. | | | | | | | |
| 506 | 5 | VNTWRSL | PFDDD | SAYTCMGPQVVRL | V99V99.N99N99. | P99P99.F99F99. | S99S99.A99A99. | 21 | 15 | 38 | 74 | Yes | Yes | Yes |
| | | | | | T99T99.W99W99. | D99D99.D99D99. | Y99Y99.T99T99. | | | | | | | |
| | | | | | R99R99.S99S99. | D99D99. | C99C99.M99M99. | | | | | | | |
| | | | | | L99L99. | | G99G99.P99P99. | | | | | | | |
| | | | | | | | Q99Q99.V99V99. | | | | | | | |
| | | | | | | | V80B00.R99R99. | | | | | | | |
| | | | | | | | L99L99. | | | | | | | |
| 517 | 5 | RVFQV | CGCGV | SHFGIR | R99R99.V99V99. | C99C99.G99G99. | B00 | 14 | 15 | 0 | 29 | Yes | Yes | Yes |
| | | | | | F99F99.Q80B00. | C99C99.G99G99. | | | | | | | | |
| | | | | | V99V99. | V99V99. | | | | | | | | |
| 524 | 5 | SW | VFFCD | TGGTYH | S99S99.W99W99. | V99V99.F99F99. | T99T99.G99G99. | 6 | 15 | 18 | 39 | Yes | Yes | Yes |
| | | | | | | F99F99.C99C99. | G99G99.T99T99. | | | | | | | |
| | | | | | | D99D99. | Y99Y99.H99H99. | | | | | | | |
| 548 | 5 | YQLKFCG | MCGTL | CPRLDW | Y99Y99.Q80B00. | M99M99.C99C99. | C99C99.P99P99. | 20 | 15 | 18 | 53 | Yes | Yes | Yes |
| | | | | | L99L99.K99K99. | G99G99.T99T99. | R99R99.L99L99. | | | | | | | |
| | | | | | F99F99.C99C99. | L99L99. | D99D99.W99W99. | | | | | | | |
| | | | | | G99G99. | | | | | | | | | |
| 553 | 5 | AIRCCVY | SAGLA | VLYSPIGITK | A99A99.I99I99. | S99S99.A99A99. | V99V99.L99L99. | 21 | 15 | 30 | 66 | Yes | Yes | Yes |
| | | | | | R99R99.C99C99. | G99G99.L99L99. | Y99Y99.S99S99. | | | | | | | |
| | | | | | C99C99.V99V99. | A99A99. | P99P99.I99I99. | | | | | | | |
| | | | | | Y99Y99. | | G99G99.I99I99. | | | | | | | |
| | | | | | | | T99T99.K99K99. | | | | | | | |
| 567 | 5 | RSVVCSV | MRGCN | HCVLETYMT | R99R99.S99S99. | M99M99.R99R99. | B00 | 21 | 15 | 0 | 36 | Yes | Yes | Yes |
| | | | | | V99V99.V99V99. | G99G99.C99C99. | | | | | | | | |
| | | | | | C99C99.S99S99. | N99N99. | | | | | | | | |
| | | | | | V99V99. | | | | | | | | | |
| 578 | 5 | AAGARMS | NRATH | DPNPYIWPS | A99A99.A99A99. | N99N99.R99R99. | D99D99.P99P99. | 21 | 15 | 27 | 63 | Yes | Yes | Yes |
| | | | | | G99G99.A99A99. | A99A99.T99T99. | N99N99.P99P99. | | | | | | | |
| | | | | | R99R99.M99M99. | H99H99. | Y99Y99.I99I99. | | | | | | | |
| | | | | | S99S99. | | W99W99.P99P99. | | | | | | | |
| | | | | | | | S99S99. | | | | | | | |
| 579 | 5 | SYNRSTF | IDMVS | MICTPTLEVK | S99S99.Y99Y99. | I99I99.D99D99. | M99M99.I99I99. | 20 | 15 | 30 | 65 | Yes | Yes | Yes |
| | | | | | N99N99.R99R99. | M99M99.V99V99. | C99C99.T99T99. | | | | | | | |
| | | | | | S99S99.T80B00. | S99S99. | P99P99.T99T99. | | | | | | | |
| | | | | | F99F99. | | L99L99.E99E99. | | | | | | | |
| | | | | | | | V99V99.K99K99. | | | | | | | |
| 589 | 5 | TSFRVYG | LDSHG | NPGCFP | T99T99.S99S99. | L99L99.D99D99. | N99N99.P99P99. | 21 | 15 | 18 | 54 | Yes | Yes | Yes |
| | | | | | F99F99.R99R99. | S99S99.H99H99. | G99G99.C99C99. | | | | | | | |
| | | | | | V99V99.Y99Y99. | G99G99. | F99F99.P99P99. | | | | | | | |
| | | | | | G99G99. | | | | | | | | | |
| 591 | 5 | QLYGSHV | NEWVC | FPFEPASDTWEVF | Q99Q99.L99L99. | N99N99.E99E99. | F99F99.P99P99. | 21 | 15 | 39 | 75 | Yes | Yes | Yes |
| | | | | | Y99Y99.G99G99. | W99W99.V99V99. | F99F99.E99E99. | | | | | | | |
| | | | | | S99S99.H99H99. | C99C99. | P99P99.A99A99. | | | | | | | |
| | | | | | V99V99. | | S99S99.D99D99. | | | | | | | |
| | | | | | | | T99T99.W99W99. | | | | | | | |
| | | | | | | | E99E99.V99V99. | | | | | | | |
| | | | | | | | F99F99. | | | | | | | |
| 606 | 5 | YHAFG | VSTLL | HLWCPHSNSS | Y99Y99.H80B00. | V99V99.S99S99. | H99H99.L99L99. | 14 | 15 | 30 | 59 | Yes | Yes | Yes |
| | | | | | A99A99.F99F99. | T99T99.L99L99. | W99W99.C99C99. | | | | | | | |
| | | | | | G99G99. | L99L99. | P99P99.H99H99. | | | | | | | |
| | | | | | | | S99S99.N99N99. | | | | | | | |
| | | | | | | | S99S99.S99S99. | | | | | | | |
| 611 | 5 | LGVQSPA | PQSNR | PELHQWDWWYGRT | L99L99.G99G99. | P99P99.Q99Q99. | P99P99.E99E99. | 21 | 15 | 39 | 75 | Yes | Yes | Yes |
| | | | | | V99V99.Q99Q99. | S99S99.N99N99. | L99L99.H99H99. | | | | | | | |
| | | | | | S99S99.P99P99. | R99R99. | Q99Q99.W99W99. | | | | | | | |
| | | | | | A99A99. | | D99D99.W99W99. | | | | | | | |
| | | | | | | | W99W99.Y99Y99. | | | | | | | |
| | | | | | | | G99G99.R99R99. | | | | | | | |
| | | | | | | | T99T99. | | | | | | | |
| 612 | 5 | ILVSCGW | CYGEG | YMARIRAGCITVL | I80B00.L99L99. | C99C99.Y99Y99. | Y99Y99.M99M99. | 20 | 15 | 37 | 72 | Yes | Yes | Yes |
| | | | | | V99V99.S99S99. | G99G99.E99E99. | A99A99.R99R99. | | | | | | | |
| | | | | | C99C99.G99G99. | G99G99. | I99I99.R99R99. | | | | | | | |
| | | | | | W99W99. | | A80B00.G99G99. | | | | | | | |
| | | | | | | | C99C99.I99I99. | | | | | | | |
| | | | | | | | T99T99.V80B00. | | | | | | | |
| | | | | | | | L99L99. | | | | | | | |
| 620 | 5 | DVSWYCQ | PFGGL | LSSTRVAVLW | D99D99.V99V99. | P99P99.F99F99. | L99L99.S99S99. | 21 | 15 | 30 | 66 | Yes | Yes | Yes |
| | | | | | S99S99.W99W99. | G99G99.G99G99. | S99S99.T99T99. | | | | | | | |
| | | | | | Y99Y99.C99C99. | L99L99. | R99R99.V99V99. | | | | | | | |
| | | | | | Q99Q99. | | A99A99.V99V99. | | | | | | | |
| | | | | | | | L99L99.W99W99. | | | | | | | |
| 628 | 5 | QI | NAPSH | HFFDASGFH | Q99Q99.I99I99. | N99N99.A99A99. | H99H99.F99F99. | 6 | 15 | 27 | 48 | Yes | Yes | Yes |
| | | | | | | P99P99.S99S99. | F99F99.D99D99. | | | | | | | |
| | | | | | | H99H99. | A99A99.S99S99. | | | | | | | |
| | | | | | | | G99G99.F99F99. | | | | | | | |
| | | | | | | | H99H99. | | | | | | | |
| 643 | 5 | RICRCVW | QGPWG | SVLTQFGLVL | R99R99.I99I99. | Q99Q99.G99G99. | B00 | 21 | 15 | 0 | 36 | Yes | Yes | Yes |
| | | | | | C99C99.R99R99. | P99P99.W99W99. | | | | | | | | |
| | | | | | C99C99.V99V99. | G99G99. | | | | | | | | |
| | | | | | W99W99. | | | | | | | | | |
| 645 | 5 | SFVHLLL | NAAKT | YTYSIFGVV | S99S99.F99F99. | N99N99.A99A99. | Y99Y99.T99T99. | 21 | 15 | 27 | 63 | Yes | Yes | Yes |
| | | | | | V99V99.H99H99. | A99A99.K99K99. | Y99Y99.S99S99. | | | | | | | |
| | | | | | L99L99.L99L99. | T99T99. | I99I99.F99F99. | | | | | | | |
| | | | | | L99L99. | | G99G99.V99V99. | | | | | | | |
| | | | | | | | V99V99. | | | | | | | |
| 664 | 5 | GRATIRV | MWGDR | VTHTDPWGEL | G99G99.R99R99. | M99M99.W99W99. | V99V99.T99T99. | 21 | 15 | 30 | 66 | Yes | Yes | Yes |
| | | | | | A99A99.T99T99. | G99G99.D99D99. | H99H99.T99T99. | | | | | | | |
| | | | | | I99I99.R99R99. | R99R99. | D99D99.P99P99. | | | | | | | |
| | | | | | V99V99. | | W99W99.G99G99. | | | | | | | |
| | | | | | | | E99E99.L99L99. | | | | | | | |
| 665 | 5 | SLGGKIY | VSSVL | ITYDTISANR | S99S99.L99L99. | V99V99.S99S99. | I99I99.T99T99. | 21 | 15 | 30 | 66 | Yes | Yes | Yes |
| | | | | | G99G99.G99G99. | S99S99.V99V99. | Y99Y99.D99D99. | | | | | | | |
| | | | | | K99K99.I99I99. | L99L99. | T99T99.I99I99. | | | | | | | |
| | | | | | Y99Y99. | | S99S99.A99A99. | | | | | | | |
| | | | | | | | N99N99.R99R99. | | | | | | | |
| 678 | 5 | SNVLPQT | GSFID | DHNFTFAP | S99S99.N99N99. | G99G99.S99S99. | D80B00.H99H99. | 21 | 15 | 17 | 53 | Yes | Yes | Yes |
| | | | | | V99V99.L99L99. | F99F99.I99I99. | N80B00.F80B00. | | | | | | | |
| | | | | | P99P99.Q99Q99. | D99D99. | T80B00.F80B00. | | | | | | | |
| | | | | | T99T99. | | A80B00.P80B00. | | | | | | | |
| 688 | 5 | FWGTLMF | LSPIL | ICDYGV | F99F99.W99W99. | L99L99.S99S99. | I99I99.C99C99. | 21 | 15 | 18 | 54 | Yes | Yes | Yes |
| | | | | | G99G99.T99T99. | P99P99.I99I99. | D99D99.Y99Y99. | | | | | | | |
| | | | | | L99L99.M99M99. | L99L99. | G99G99.V99V99. | | | | | | | |
| | | | | | F99F99. | | | | | | | | | |
| 691 | 5 | SYVL | WTTSR | VSLTLR | S99S99.Y99Y99. | W99W99.T99T99. | V99V99.S99S99. | 12 | 15 | 18 | 45 | Yes | Yes | Yes |
| | | | | | V99V99.L99L99. | T99T99.S99S99. | L99L99.T99T99. | | | | | | | |
| | | | | | | R99R99. | L99L99.R99R99. | | | | | | | |
| 693 | 5 | SESAIWF | SHTFE | RAFYYN | S99S99.E99E99. | S99S99.H99H99. | R99R99.A99A99. | 21 | 15 | 18 | 54 | Yes | Yes | Yes |
| | | | | | S99S99.A99A99. | T99T99.F99F99. | F99F99.Y99Y99. | | | | | | | |
| | | | | | I99I99.W99W99. | E99E99. | Y99Y99.N99N99. | | | | | | | |
| | | | | | F99F99. | | | | | | | | | |
| 698 | 5 | LDSGVCR | NALHD | VCPTMGW | L99L99.D99D99. | N99N99.A99A99. | V99V99.C99C99. | 21 | 15 | 21 | 57 | Yes | Yes | Yes |
| | | | | | S99S99.G99G99. | L99L99.H99H99. | P99P99.T99T99. | | | | | | | |
| | | | | | V99V99.C99C99. | D99D99. | M99M99.G99G99. | | | | | | | |
| | | | | | R99R99. | | W99W99. | | | | | | | |
| 708 | 5 | NVVGQVF | QAGDP | VKWAHQVCQ | N99N99.V99V99. | Q99Q99.A99A99. | V99V99.K99K99. | 21 | 15 | 27 | 63 | Yes | Yes | Yes |
| | | | | | V99V99.G99G99. | G99G99.D99D99. | W99W99.A99A99. | | | | | | | |
| | | | | | Q99Q99.V99V99. | P99P99. | H99H99.Q99Q99. | | | | | | | |
| | | | | | F99F99. | | V99V99.C99C99. | | | | | | | |
| | | | | | | | Q99Q99. | | | | | | | |
| 713 | 5 | LLSEFIV | STTHL | LSVWCC | _80B00.L99L99. | S99S99.T99T99. | L99L99.S99S99. | 20 | 15 | 18 | 53 | Yes | Yes | Yes |
| | | | | | S99S99.E99E99. | T99T99.H99H99. | V99V99.W99W99. | | | | | | | |
| | | | | | F99F99.I99I99. | L99L99. | C99C99.C99C99. | | | | | | | |
| | | | | | V99V99. | | | | | | | | | |
| 720 | 5 | TTRNIWY | CNLLV | RFGISA | T99T99.T99T99. | C99C99.N99N99. | R99R99.F60A40. | 21 | 15 | 14 | 50 | Yes | Yes | Yes |
| | | | | | R99R99.N99N99. | L99L99.L99L99. | G60C40.I99I99. | | | | | | | |
| | | | | | I99I99.W99W99. | V99V99. | S60M40.A60C40. | | | | | | | |
| | | | | | Y99Y99. | | | | | | | | | |
| 721 | 5 | DIYHNLY | IDSAH | AYWSPLRQST | D99D99.I99I99. | I99I99.D99D99. | A99A99.Y99Y99. | 20 | 15 | 30 | 65 | Yes | Yes | Yes |
| | | | | | Y99Y99.H99H99. | S99S99.A99A99. | W99W99.S99S99. | | | | | | | |
| | | | | | N99N99.L99L99. | H99H99. | P99P99.L99L99. | | | | | | | |
| | | | | | Y80B00. | | R99R99.Q99Q99. | | | | | | | |
| | | | | | | | S99S99.T99T99. | | | | | | | |
| 730 | 5 | VVQIVRS | VLDSP | STRFRH | V99V99.V99V99. | V99V99.L99L99. | S99S99.T99T99. | 21 | 15 | 18 | 54 | Yes | Yes | Yes |
| | | | | | Q99Q99.I99I99. | D99D99.S99S99. | R99R99.F99F99. | | | | | | | |
| | | | | | V99V99.R99R99. | P99P99. | R99R99.H99H99. | | | | | | | |
| | | | | | S99S99. | | | | | | | | | |
| 742 | 5 | RVKYEVY | PACPP | ASLYGSKIC | R99R99.V99V99. | P99P99.A99A99. | A99A99.S99S99. | 21 | 15 | 27 | 63 | Yes | Yes | Yes |
| | | | | | K99K99.Y99Y99. | C99C99.P99P99. | L99L99.Y99Y99. | | | | | | | |
| | | | | | E99E99.V99V99. | P99P99. | G99G99.S99S99. | | | | | | | |
| | | | | | Y99Y99. | | K99K99.I99I99. | | | | | | | |
| | | | | | | | C99C99. | | | | | | | |
| 745 | 5 | ALSSQVF | PGIGI | LTLLSLSVLR | A99A99.L99L99. | P99P99.G99G99. | L99L99.T99T99. | 21 | 15 | 30 | 66 | Yes | Yes | Yes |
| | | | | | S99S99.S99S99. | I99I99.G99G99. | L99L99.L99L99. | | | | | | | |
| | | | | | Q99Q99.V99V99. | I99I99. | S99S99.L99L99. | | | | | | | |
| | | | | | F99F99. | | S99S99.V99V99. | | | | | | | |
| | | | | | | | L99L99.R99R99. | | | | | | | |
| 753 | 5 | GLLLGA | RVYAL | TTFDLSGKR | G99G99.L99L99. | R99R99.V99V99. | T99T99.T99T99. | 21 | 15 | 27 | 63 | Yes | Yes | Yes |
| | | | | | L99L99.L99L99. | Y99Y99.A99A99. | F99F99.D99D99. | | | | | | | |
| | | | | | G99G99.A99A99. | L99L99. | L99L99.S99S99. | | | | | | | |
| | | | | | I99I99. | | G99G99.K99K99. | | | | | | | |
| | | | | | | | R99R99. | | | | | | | |
| 754 | 5 | HILGLDG | WRVGG | SYDPWTMAY | H99H99.I99I99. | W99W99.R99R99. | S99S99.Y99Y99. | 21 | 15 | 27 | 63 | Yes | Yes | Yes |
| | | | | | L99L99.G99G99. | V99V99.G99G99. | D99D99.P99P99. | | | | | | | |
| | | | | | L99L99.D99D99. | G99G99. | W99W99.T99T99. | | | | | | | |
| | | | | | G99G99. | | M99M99.A99A99. | | | | | | | |
| | | | | | | | Y99Y99. | | | | | | | |
| 757 | 5 | CFKTIPC | NYITM | FLSVEA | C99C99.F99F99. | N99N99.Y99Y99. | F99F99.L99L99. | 21 | 15 | 18 | 54 | Yes | Yes | Yes |
| | | | | | K99K99.T99T99. | I99I99.T99T99. | S99S99.V99V99. | | | | | | | |
| | | | | | I99I99.P99P99. | M99M99. | E99E99.A99A99. | | | | | | | |
| | | | | | C99C99. | | | | | | | | | |
| 764 | 5 | QTANCVM | MDFEH | YAWKSLGCIV | Q80B00.T99T99. | M99M99.D99D99. | Y99Y99.A99A99. | 20 | 15 | 30 | 65 | Yes | Yes | Yes |
| | | | | | A99A99.N99N99. | F99F99.E99E99. | W99W99.K99K99. | | | | | | | |
| | | | | | C99C99.V99V99. | H99H99. | S99S99.L99L99. | | | | | | | |
| | | | | | M99M99 | | G99G99.C99C99. | | | | | | | |
| | | | | | | | I99I99.V99V99. | | | | | | | |
| 767 | 5 | VRVCGCS | FLTAY | SVYELHMLS | V99V99.R99R99. | F99F99.L99L99. | S99S99.V99V99. | 21 | 15 | 27 | 63 | Yes | Yes | Yes |
| | | | | | V99V99.C99C99. | T99T99.A99A99. | Y99Y99.E99E99. | | | | | | | |
| | | | | | G99G99.C99C99. | Y99Y99. | L99L99.H99H99. | | | | | | | |
| | | | | | S99S99. | | M99M99.L99L99. | | | | | | | |
| | | | | | | | S99S99. | | | | | | | |
| 769 | 5 | GVSLIYS | HVPGR | FVSSVM | G99G99.V99V99. | H99H99.V99V99. | F99F99.V99V99. | 21 | 15 | 18 | 54 | Yes | Yes | Yes |
| | | | | | S99S99.L99L99. | P99P99.G99G99. | S99S99.S99S99. | | | | | | | |
| | | | | | I99I99.Y99Y99. | R99R99. | V99V99.M99M99. | | | | | | | |
| | | | | | S99S99. | | | | | | | | | |
| 771 | 5 | LNSTCYA | GISLC | LVATSTRVCW | L99L99.N99N99. | G99G99.I99I99. | L99L99.V99V99. | 21 | 15 | 30 | 66 | Yes | Yes | Yes |
| | | | | | S99S99.T99T99. | S99S99.L99L99. | A99A99.T99T99. | | | | | | | |
| | | | | | C99C99.Y99Y99. | C99C99. | S99S99.T99T99. | | | | | | | |
| | | | | | A99A99. | | R99R99.V99V99. | | | | | | | |
| | | | | | | | C99C99.W99W99. | | | | | | | |
| 782 | 5 | SSDVT | LSGQW | QYIEC | S99S99.S99S99. | L99L99.S99S99. | Q99Q99.Y99Y99. | 21 | 15 | 15 | 51 | Yes | Yes | Yes |
| | | | | | L99L99.V99V99. | G99G99.Q99Q99. | I99I99.E99E99. | | | | | | | |
| | | | | | D99D99.V99V99. | W99W99. | C99C99. | | | | | | | |
| | | | | | T99T99. | | | | | | | | | |
| 786 | 5 | GFSCTVY | KNDTL | CVWDKFNVL | G99G99.F99F99. | K99K99.N99N99. | C99C99.V99V99. | 21 | 15 | 27 | 63 | Yes | Yes | Yes |
| | | | | | S99S99.C99C99. | D99D99.T99T99. | W99W99.D99D99. | | | | | | | |
| | | | | | T99T99.V99V99. | L99L99. | K99K99.F99F99. | | | | | | | |
| | | | | | Y99Y99. | | N99N99.V99V99. | | | | | | | |
| | | | | | | | L99L99. | | | | | | | |
| 79 | 5 | GIRCLIH | GSRAW | LIEHVDSSSF | G99G99.I99I99. | G99G99.S99S99. | L99L99.I99I99. | 21 | 15 | 30 | 66 | Yes | Yes | Yes |
| | | | | | R99R99.C99C99. | R99R99.A99A99. | E99E99.H99H99. | | | | | | | |
| | | | | | L99L99.I99I99. | W99W99. | V99V99.D99D99. | | | | | | | |
| | | | | | H99H99. | | S99S99.S99S99. | | | | | | | |
| | | | | | | | S99S99.F99F99. | | | | | | | |
| 801 | 5 | FLFVRCF | SRGSA | TYTMFSRSAC | F99F99.L99L99. | S99S99.R99R99. | T99T99.Y99Y99. | 21 | 15 | 30 | 66 | Yes | Yes | Yes |
| | | | | | F99F99.V99V99. | G99G99.S99S99. | T99T99.M99M99. | | | | | | | |
| | | | | | R99R99.C99C99. | A99A99. | F99F99.S99S99. | | | | | | | |
| | | | | | F99F99. | | R99R99.S99S99. | | | | | | | |
| | | | | | | | A99A99.C99C99. | | | | | | | |
| 807 | 5 | CQSYSWP | GECGF | RTWGLMGRM | C99C99.Q99Q99. | G99G99.E99E99. | R99R99.T99T99. | 21 | 15 | 27 | 63 | Yes | Yes | Yes |
| | | | | | S99S99.Y99Y99. | C99C99.G99G99. | W99W99.G99G99. | | | | | | | |
| | | | | | S99S99.W99W99. | F99F99. | L99L99.M99M99. | | | | | | | |
| | | | | | P99P99. | | G99G99.R99R99. | | | | | | | |
| | | | | | | | M99M99. | | | | | | | |
| 808 | 5 | GLTGMTI | PGDAA | YYYNLHSLI | G99G99.L99L99. | P99P99.G99G99. | Y99Y99.Y99Y99. | 21 | 15 | 27 | 63 | Yes | Yes | Yes |
| | | | | | T99T99.G99G99. | D99D99.A99A99. | Y99Y99.N99N99. | | | | | | | |
| | | | | | M99M99.T99T99. | A99A99. | L99L99.H99H99. | | | | | | | |
| | | | | | I99I99. | | S99S99.L99L99. | | | | | | | |
| | | | | | | | I99I99. | | | | | | | |
| 817 | 5 | QLSRTGY | TGPVG | IDSYGR | Q99Q99.L99L99. | T99T99.G99G99. | I99I99.D99D99. | 21 | 15 | 18 | 54 | Yes | Yes | Yes |
| | | | | | S99S99.R99R99. | P99P99.V99V99. | S99S99.Y99Y99. | | | | | | | |
| | | | | | T99T99.G99G99. | G99G99. | G99G99.R99R99. | | | | | | | |
| | | | | | Y99Y99. | | | | | | | | | |
| 819 | 5 | LAWHFCC | VTRSS | STFESHPFVR | L99L99.A99A99. | V99V99.T99T99. | S99S99.T99T99. | 21 | 15 | 30 | 66 | Yes | Yes | Yes |
| | | | | | W99W99.H99H99. | R99R99.S99S99. | F99F99.E99E99. | | | | | | | |
| | | | | | F99F99.C99C99. | S99S99. | S99S99.H99H99. | | | | | | | |
| | | | | | C99C99. | | P99P99.F99F99. | | | | | | | |
| | | | | | | | V99V99.R99R99. | | | | | | | |
| 820 | 5 | VTCMWST | MRYDN | CHGGWM | V99V99.T99T99. | M99M99.R99R99. | C99C99.H99H99. | 21 | 15 | 18 | 54 | Yes | Yes | Yes |
| | | | | | C99C99.M99M99. | Y99Y99.D99D99. | G99G99.G99G99. | | | | | | | |
| | | | | | W99W99.S99S99. | N99N99. | W99W99.M99M99. | | | | | | | |
| | | | | | T99T99. | | | | | | | | | |
| 823 | 5 | LIVSVST | YTRGF | DPDRRV | L99L99.I99I99. | Y99Y99.T99T99. | D99D99.P99P99. | 21 | 15 | 18 | 54 | Yes | Yes | Yes |
| | | | | | V99V99.S99S99. | R99R99.G99G99. | D99D99.R99R99. | | | | | | | |
| | | | | | V99V99.S99S99. | F99F99. | R99R99.V99V99. | | | | | | | |
| | | | | | T99T99. | | | | | | | | | |
| 826 | 5 | NAFFGLL | TLSCD | WLMHPDCLVV | N99N99.A99A99. | T99T99.L99L99. | W99W99.L99L99. | 21 | 15 | 30 | 66 | Yes | Yes | Yes |
| | | | | | F99F99.F99F99. | S99S99.C99C99. | M99M99.H99H99. | | | | | | | |
| | | | | | G99G99.L99L99. | D99D99. | P99P99.D99D99. | | | | | | | |
| | | | | | L99L99. | | C99C99.L99L99. | | | | | | | |
| | | | | | | | V99V99.V99V99. | | | | | | | |
| 834 | 5 | DVKWLT | ARTFH | LCLNW | D99D99.V99V99. | A99A99.R99R99. | L99L99.C99C99. | 18 | 15 | 15 | 48 | Yes | Yes | Yes |
| | | | | | K99K99.W99W99. | T99T99.F99F99. | L99L99.N99N99. | | | | | | | |
| | | | | | L99L99.T99T99. | H99H99. | W99W99. | | | | | | | |
| 836 | 5 | YGVSHSC | TISEL | LGYIGLFGF | Y99Y99.G99G99. | T99T99.I99I99. | L99L99.G99G99. | 21 | 15 | 27 | 63 | Yes | Yes | Yes |
| | | | | | V99V99.S99S99. | S99S99.E99E99. | Y99Y99.I99I99. | | | | | | | |
| | | | | | H99H99.S99S99. | L99L99. | G99G99.L99L99. | | | | | | | |
| | | | | | C99C99. | | F99F99.G99G99. | | | | | | | |
| | | | | | | | F99F99. | | | | | | | |
| 840 | 5 | DDWCSCT | LFAPF | QSLNNNGFFS | D99D99.D80B00. | L99L99.F99F99. | Q99Q99.S99S99. | 20 | 15 | 30 | 65 | Yes | Yes | Yes |
| | | | | | W99W99.C99C99. | A99A99.P99P99. | L99L99.N99N99. | | | | | | | |
| | | | | | S99S99.C99C99. | F99F99. | N99N99.N99N99. | | | | | | | |
| | | | | | T99T99. | | G99G99.F99F99. | | | | | | | |
| | | | | | | | F99F99.S99S99. | | | | | | | |
| 852 | 5 | CCVLQMW | PHGYR | DLLNDVVHSA | C99C99.C99C99. | P99P99.H99H99. | D99D99.L99L99. | 21 | 15 | 30 | 66 | Yes | Yes | Yes |
| | | | | | V99V99.L99L99. | G99G99.Y99Y99. | L99L99.N99N99. | | | | | | | |
| | | | | | Q99Q99.M99M99. | R99R99. | D99D99.V99V99. | | | | | | | |
| | | | | | W99W99. | | V99V99.H99H99. | | | | | | | |
| | | | | | | | S99S99.A99A99. | | | | | | | |
| 853 | 5 | SSSDFVV | VVPGV | VSRDANADM | S99S99.S99S99. | V99V99.V99V99. | B00 | 21 | 15 | 0 | 36 | Yes | Yes | Yes |
| | | | | | S99S99.D99D99. | P99P99.G99G99. | | | | | | | | |
| | | | | | F99F99.V99V99. | V99V99. | | | | | | | | |
| | | | | | V99V99. | | | | | | | | | |
| 856 | 5 | VQSEHRV | LACAI | SFRVGHAGFG | V99V99.Q99Q99. | L99L99.A99A99. | S99S99.F99F99. | 21 | 15 | 30 | 66 | Yes | Yes | Yes |
| | | | | | S99S99.E99E99. | C99C99.A99A99. | R99R99.V99V99. | | | | | | | |
| | | | | | H99H99.R99R99. | I99I99. | G99G99.H99H99. | | | | | | | |
| | | | | | V99V99. | | A99A99.G99G99. | | | | | | | |
| | | | | | | | F99F99.G99G99. | | | | | | | |
| 858 | 5 | YNSQIVW | CGCRI | ALFRPREDVI | Y99Y99.N99N99. | C99C99.G99G99. | A99A99.L99L99. | 21 | 15 | 30 | 66 | Yes | Yes | Yes |
| | | | | | S99S99.Q99Q99. | C99C99.R99R99. | F99F99.R99R99. | | | | | | | |
| | | | | | I99I99.V99V99. | I99I99. | P99P99.R99R99. | | | | | | | |
| | | | | | W99W99. | | E99E99.D99D99. | | | | | | | |
| | | | | | | | V99V99.I99I99. | | | | | | | |
| 859 | 5 | LFTGAWI | GVAQS | SMCRRENMLC | L99L99.F99F99. | G99G99.V99V99. | S99S99.M99M99. | 21 | 15 | 30 | 66 | Yes | Yes | Yes |
| | | | | | T99T99.G99G99. | A99A99.Q99Q99. | C99C99.R99R99. | | | | | | | |
| | | | | | A99A99.W99W99. | S99S99. | R99R99.E99E99. | | | | | | | |
| | | | | | I99I99. | | N99N99.M99M99. | | | | | | | |
| | | | | | | | L99L99.C99C99. | | | | | | | |
| 860 | 5 | RLDRLVK | CYGVL | WHFLTHDKII | R99R99.L99L99. | C99C99.Y99Y99. | W99W99.H99H99. | 21 | 15 | 30 | 66 | Yes | Yes | Yes |
| | | | | | D99D99.R99R99. | G99G99.V99V99. | F99F99.L99L99. | | | | | | | |
| | | | | | L99L99.V99V99. | L99L99. | T99T99.H99H99. | | | | | | | |
| | | | | | K99K99. | | D99D99.K99K99. | | | | | | | |
| | | | | | | | I99I99.I99I99. | | | | | | | |
| 866 | 5 | VVGILRG | CYRDA | YSRFVITPFG | V99V99.V99V99. | C99C99.Y99Y99. | Y99Y99.S99S99. | 21 | 15 | 30 | 66 | Yes | Yes | Yes |
| | | | | | G99G99.I99I99. | R99R99.D99D99. | R99R99.F99F99. | | | | | | | |
| | | | | | L99L99.R99R99. | A99A99. | V99V99.I99I99. | | | | | | | |
| | | | | | G99G99. | | T99T99.P99P99. | | | | | | | |
| | | | | | | | F99F99.G99G99. | | | | | | | |
| 868 | 5 | SPSLLCS | MPYWA | VEPHLYDLWS | S99S99.P99P99. | M99M99.P99P99. | V99V99.E99E99. | 21 | 15 | 30 | 66 | Yes | Yes | Yes |
| | | | | | S99S99.L99L99. | Y99Y99.W99W99. | P99P99.H99H99. | | | | | | | |
| | | | | | L99L99.C99C99. | A99A99. | L99L99.Y99Y99. | | | | | | | |
| | | | | | S99S99. | | D99D99.L99L99. | | | | | | | |
| | | | | | | | W99W99.S99S99. | | | | | | | |
| 869 | 5 | TFNFGLR | ACDPPL | AFTTLSKYAS | T99T99.F99F99. | A99A99.C99C99. | A99A99.F99F99. | 21 | 15 | 30 | 66 | Yes | Yes | Yes |
| | | | | | N99N99.F99F99. | D99D99.P99P99. | T99T99.T99T99. | | | | | | | |
| | | | | | G99G99.L99L99. | L99L99. | L99L99.S99S99. | | | | | | | |
| | | | | | R99R99. | | K99K99.Y99Y99. | | | | | | | |
| | | | | | | | A99A99.S99S99. | | | | | | | |
| 871 | 5 | GRYGVVW | SQCGV | SIFHHPYVY | G99G99.R99R99. | S99S99.Q99Q99. | S99S99.I99I99. | 21 | 15 | 27 | 63 | Yes | Yes | Yes |
| | | | | | Y99Y99.G99G99. | C99C99.G99G99. | F99F99.H99H99. | | | | | | | |
| | | | | | V99V99.V99V99. | V99V99. | H99H99.P99P99. | | | | | | | |
| | | | | | W99W99. | | Y99Y99.V99V99. | | | | | | | |
| | | | | | | | Y99Y99. | | | | | | | |
| 875 | 5 | VADGIVY | YASVS | WRYVSGDIL | V99V99.A99A99. | Y99Y99.A99A99. | W99W99.R99R99. | 21 | 14 | 27 | 62 | Yes | Yes | Yes |
| | | | | | D99D99.G99G99. | S99S99.V99V99. | Y99Y99.V99V99. | | | | | | | |
| | | | | | I99I99.V99V99. | S80B00. | S99S99.G99G99. | | | | | | | |
| | | | | | Y99Y99. | | D99D99.I99I99. | | | | | | | |
| | | | | | | | L99L99. | | | | | | | |
| 877 | 5 | T | DGG | WASFVD | T99T99. | R99R99.T99T99. | W99W99.A99A99. | 3 | 15 | 18 | 36 | Yes | Yes | Yes |
| | | | | | | D99D99.G99G99. | S99S99.F99F99. | | | | | | | |
| | | | | | | G99G99. | V99V99.D99D99. | | | | | | | |
| 878 | 5 | MLCANTY | LSHTV | MSCIG | M99M99.L99L99. | L99L99.S99S99. | M99M99.S99S99. | 21 | 15 | 15 | 51 | Yes | Yes | Yes |
| | | | | | C99C99.A99A99. | H99H99.T99T99. | C99C99.I99I99. | | | | | | | |
| | | | | | N99N99.T99T99. | V99V99. | G99G99. | | | | | | | |
| | | | | | Y99Y99. | | | | | | | | | |
| 887 | 5 | VV | EYGYR | LTQDTRRCSW | V99V99.V99V99. | E99E99.Y99Y99. | L99L99.T99T99. | 6 | 15 | 30 | 51 | Yes | Yes | Yes |
| | | | | | | G99G99.Y99Y99. | Q99Q99.D99D99. | | | | | | | |
| | | | | | | R99R99. | T99T99.R99R99. | | | | | | | |
| | | | | | | | R99R99.C99C99. | | | | | | | |
| | | | | | | | S99S99.W99W99. | | | | | | | |
| 888 | 5 | FVFLVQE | CARQT | NSVGVIMTCWWRT | F99F99.V80B00. | C99C99.A99A99. | N99N99.S99S99. | 20 | 15 | 39 | 74 | Yes | Yes | Yes |
| | | | | | F99F99.L99L99. | R99R99.Q99Q99. | V99V99.G99G99. | | | | | | | |
| | | | | | V99V99.Q99Q99. | T99T99. | V99V99.I99I99. | | | | | | | |
| | | | | | E99E99. | | M99M99.T99T99. | | | | | | | |
| | | | | | | | C99C99.W99W99. | | | | | | | |
| | | | | | | | W99W99.R99R99. | | | | | | | |
| | | | | | | | T99T99. | | | | | | | |
| 889 | 5 | GFGTVLF | PARAW | CTTDLF | G99G99.F99F99. | P99P99.A99A99. | C99C99.T99T99. | 21 | 15 | 18 | 54 | Yes | Yes | Yes |
| | | | | | G99G99.T99T99. | R99R99.A99A99. | T99T99.D99D99. | | | | | | | |
| | | | | | V99V99.L99L99. | W99W99. | L99L99.F99F99. | | | | | | | |
| | | | | | F99F99. | | | | | | | | | |
| 891 | 5 | ILKIVFG | LDDIR | HIFDSF | I99I99.L99L99. | L99L99.D99D99. | H99H99.I99I99. | 21 | 15 | 18 | 54 | Yes | Yes | Yes |
| | | | | | K99K99.H99H99. | D99D99.I99I99. | F99F99.D99D99. | | | | | | | |
| | | | | | V99V99.F99F99. | R99R99. | S99S99.F99F99. | | | | | | | |
| | | | | | G99G99. | | | | | | | | | |
| 896 | 5 | LCTGPAWVV | LRWPG | NHPSHTCVMC | L99L99.C99C99. | L99L99.R99R99. | N99N99.H80B00. | 21 | 15 | 29 | 65 | Yes | Yes | Yes |
| | | | | | T99T99.G99G99. | W99W99.P99P99. | P99P99.S99S99. | | | | | | | |
| | | | | | P99P99.A99A99. | G99G99. | H99H99.T99T99. | | | | | | | |
| | | | | | W99W99. | | C99C99.V99V99. | | | | | | | |
| | | | | | | | M99M99.C99C99. | | | | | | | |
| 899 | 5 | GGGSWFP | IGSSL | IMYASDFWVF | G99G99.G99G99. | I99I99.G99G99. | I60B00.M60B00. | 20 | 15 | 20 | 55 | Yes | Yes | Yes |
| | | | | | G99G99.S99S99. | S99S99.S99S99. | Y60B00.A60B00. | | | | | | | |
| | | | | | W99W99.F80B00. | L99L99. | S60Y40.D60B00. | | | | | | | |
| | | | | | P99P99. | | F60B00.W60B00. | | | | | | | |
| | | | | | | | V60B00.F60B00. | | | | | | | |
| 900 | 5 | LSLRNVF | NAGVH | AYFVDGIVIIT | L99L99.S99S99. | N99N99.A99A99. | A99A99.Y99Y99. | 20 | 15 | 27 | 62 | Yes | Yes | Yes |
| | | | | | L99L99.R99R99. | G99G99.V99V99. | F99F99.V99V99. | | | | | | | |
| | | | | | N80B00.V99V99. | H99H99. | D99D99.G99G99. | | | | | | | |
| | | | | | F99F99. | | I99I99.I99I99. | | | | | | | |
| | | | | | | | T99T99. | | | | | | | |
| 902 | 5 | ACFGLVY | GSQSQ | VYFRSMFCVH | A99A99.C99C99. | G99G99.S99S99. | V99V99.Y99Y99. | 21 | 15 | 30 | 66 | Yes | Yes | Yes |
| | | | | | F99F99.G99G99. | Q99Q99.S99S99. | F99F99.R99R99. | | | | | | | |
| | | | | | L99L99.V99V99. | Q99Q99. | S99S99.M99M99. | | | | | | | |
| | | | | | Y99Y99. | | F99F99.C99C99. | | | | | | | |
| | | | | | | | V99V99.H99H99. | | | | | | | |
| 903 | 5 | RVVR | SEAPK | FVQCTL | R99R99.V99V99. | S99S99.E99E99. | F99F99.V99V99. | 12 | 15 | 18 | 45 | Yes | Yes | Yes |
| | | | | | V99V99.R99R99. | A99A99.P99P99. | Q99Q99.C99C99. | | | | | | | |
| | | | | | | K99K99. | T99T99.L99L99. | | | | | | | |
| 904 | 5 | SLYAVVW | LCGYD | TCFVNHMKIS | S99S99.L99L99. | L99L99.C99C99. | T99T99.C99C99. | 21 | 15 | 30 | 66 | Yes | Yes | Yes |
| | | | | | Y99Y99.A99A99. | G99G99.Y99Y99. | F99F99.V99V99. | | | | | | | |
| | | | | | V99V99.V99V99. | D99D99. | N99N99.H99H99. | | | | | | | |
| | | | | | W99W99. | | M99M99.K99K99. | | | | | | | |
| | | | | | | | I99I99.S99S99. | | | | | | | |
| 905 | 5 | NPDPCVV | AYSAV | TYVSHPCHLY | N99N99.P99P99. | A99A99.Y99Y99. | T99T99.Y99Y99. | 21 | 15 | 30 | 66 | Yes | Yes | Yes |
| | | | | | D99D99.P99P99. | S99S99.A99A99. | V99V99.S99S99. | | | | | | | |
| | | | | | C99C99.V99V99. | V99V99. | H99H99.P99P99. | | | | | | | |
| | | | | | V99V99. | | C99C99.H99H99. | | | | | | | |
| | | | | | | | L99L99.Y99Y99. | | | | | | | |
| 906 | 5 | GHWCSLT | LAQYG | AYATYNLDRGYSM | G99G99.H99H99. | L99L99.A80B00. | A99A99.Y99Y99. | 21 | 14 | 39 | 74 | Yes | Yes | Yes |
| | | | | | W99W99.C99C99. | Q99Q99.Y99Y99. | A99A99.T99T99. | | | | | | | |
| | | | | | S99S99.L99L99. | G99G99. | Y99Y99.N99N99. | | | | | | | |
| | | | | | T99T99. | | L99L99.D99D99. | | | | | | | |
| | | | | | | | R99R99.G99G99. | | | | | | | |
| | | | | | | | Y99Y99.S99S99. | | | | | | | |
| | | | | | | | M99M99. | | | | | | | |
| 910 | 5 | VSFHVFY | NSGTH | VSIVQGTTG | V99V99.S99S99. | N99N99.S99S99. | V99V99.S99S99. | 21 | 15 | 27 | 63 | Yes | Yes | Yes |
| | | | | | F99F99.H99H99. | G99G99.T99T99. | I99I99.V99V99. | | | | | | | |
| | | | | | V99V99.F99F99. | H99H99. | Q99Q99.G99G99. | | | | | | | |
| | | | | | Y99Y99. | | T99T99.T99T99. | | | | | | | |
| | | | | | | | G99G99. | | | | | | | |
| 912 | 5 | MILVAGW | DVGDG | LITDTAGGSF | M99M99.I99I99. | D99D99.V99V99. | B00 | 21 | 15 | 0 | 36 | Yes | Yes | Yes |
| | | | | | L99L99.V99V99. | G99G99.D99D99. | | | | | | | | |
| | | | | | A99A99.G99G99. | G99G99. | | | | | | | | |
| | | | | | W99W99. | | | | | | | | | |
| 917 | 5 | LDPRA | LYAAY | FCATYQETCY | L99L99.D99D99. | L99L99.Y99Y99. | F99F99.C99C99. | 15 | 15 | 30 | 60 | Yes | Yes | Yes |
| | | | | | P99P99.R99R99. | A99A99.A99A99. | A99A99.T99T99. | | | | | | | |
| | | | | | A99A99. | Y99Y99. | Y99Y99.Q99Q99. | | | | | | | |
| | | | | | | | E99E99.T99T99. | | | | | | | |
| | | | | | | | C99C99.Y99Y99. | | | | | | | |
| 918 | 5 | RSHDCIN | GFP | PVVLRRNII | R99R99.S99S99. | G99G99.F99F99. | P99P99.V99V99. | 21 | 15 | 27 | 63 | Yes | Yes | Yes |
| | | | | | H99H99.D99D99. | P99P99.I99I99. | V99V99.L99L99. | | | | | | | |
| | | | | | C99C99.I99I99. | I99I99. | R99R99.R99R99. | | | | | | | |
| | | | | | N99N99. | | N99N99.I99I99. | | | | | | | |
| | | | | | | | I99I99. | | | | | | | |
| 919 | 5 | NWSCVFQ | QSPAV | LACSLTGIC | N99N99.W99W99. | Q99Q99.S99S99. | L99L99.A99A99. | 20 | 15 | 27 | 62 | Yes | Yes | Yes |
| | | | | | S80B00.C99C99. | P99P99.A99A99. | C99C99.S99S99. | | | | | | | |
| | | | | | V99V99.F99F99. | V99V99. | L99L99.T99T99. | | | | | | | |
| | | | | | Q99Q99. | | G99G99.I99I99. | | | | | | | |
| | | | | | | | C99C99. | | | | | | | |
| 689 | 6 | VLVCYSY | ASYR | LTSPLSDSS | V83B00.L83B00. | A66B00.S66B00. | B00 | 20 | 6 | 0 | 26 | No | Yes | Yes |
| | | | | | V66B00.C83B00. | Y50B00.R50B00. | | | | | | | | |
| | | | | | Y99Y99.S83B00. | | | | | | | | | |
| | | | | | Y83B00. | | | | | | | | | |
| 222 | 20 | RLICDMQ | FGD | GMVRDWSTRLSSE | R99R99.L99L99. | F99F99.G99G99. | G80B00.M80B00. | 21 | 9 | 27 | 57 | Yes | No | Yes |
| | | | | | I99I99.C99C99. | D99D99. | V80B00.R80B00. | | | | | | | |
| | | | | | D99D99.M95B00. | | D80B00.W80B00. | | | | | | | |
| | | | | | Q99Q99. | | S80B00.T80B00. | | | | | | | |
| | | | | | | | R90B00.L80B00. | | | | | | | |
| | | | | | | | S80B00.S80B00. | | | | | | | |
| | | | | | | | E80B00. | | | | | | | |
| 212 | 14 | HLVAT | ASYRYY | WPSLPTGGTP | B00 | A50B00.S50B00. | W99W99.P99P99. | 0 | 7 | 30 | 37 | Yes | No | Yes |
| | | | | | | Y50B00.R64B00. | S99S99.L99L99. | | | | | | | |
| | | | | | | Y57B00. | P99P99.T99T99. | | | | | | | |
| | | | | | | | G99G99.G99G99. | | | | | | | |
| | | | | | | | T99T99.P99P99. | | | | | | | |
| 456 | 8 | VLVCYSY | ASYRYY | SNHVPSEPKPSVF | B00 | A62B00.S50B00. | S99S99.N99N99. | 0 | 6 | 39 | 45 | Yes | No | Yes |
| | | | | | | Y50B00.R50B00. | H99H99.V99V99. | | | | | | | |
| | | | | | | Y37B00. | P99P99.S99S99. | | | | | | | |
| | | | | | | | E99E99.P99P99. | | | | | | | |
| | | | | | | | K99K99.P99P99. | | | | | | | |
| | | | | | | | S99S99.V99V99. | | | | | | | |
| | | | | | | | F99F99. | | | | | | | |
| 4 | 32009 | VLVCYSY | ASYRY | LTSPLSDSS | V99B00.L99B00. | A99B00.S99B00. | B00 | 21 | 15 | 0 | 36 | No | No | Yes |
| | | | | | V99B00.C99B00. | Y99B00.R99B00. | | | | | | | | |
| | | | | | Y99B00.S99B00. | Y99B00. | | | | | | | | |
| | | | | | Y99B00. | | | | | | | | | |
| 80 | 166 | LVVTYER | ATLRG | LIPAESGLVPLVD | L98B00.V99B00. | A99A99.T99T99. | B00 | 21 | 15 | 0 | 36 | No | No | Yes |
| | | | | | V99V99.T98B00. | L99L99.R99R99. | | | | | | | | |
| | | | | | Y99B00.E99B00. | G99B00. | | | | | | | | |
| | | | | | R99B00. | | | | | | | | | |
| 16 | 112 | VCVSYTH | ETWMH | MRCPPHFFV | V99B00.C99B00. | E99E99.T99B00. | B00 | 21 | 15 | 0 | 36 | No | No | Yes |
| | | | | | V98B00.S99B00. | W99B00.M99B00. | | | | | | | | |
| | | | | | Y99B00.T97B00. | H99B00. | | | | | | | | |
| | | | | | H98B00. | | | | | | | | | |
| 216 | 111 | ILCMYEQ | CNART | AHLV | I97B00.L99L99. | C99B00.N99N99. | B00 | 21 | 15 | 0 | 36 | No | No | Yes |
| | | | | | C99C99.M99M99. | A99A99.R99R99. | | | | | | | | |
| | | | | | Y99Y99.E99E99. | T99B00. | | | | | | | | |
| | | | | | Q94B00. | | | | | | | | | |
| 161 | 48 | IYNCKST | CGVPF | TTDSVT | I97B00.Y93B00. | C99C99.G99G99. | T64B00.T66B00. | 21 | 15 | 12 | 48 | No | No | Yes |
| | | | | | N95B00.C99C99. | V99V99.P99P99. | D64S35.S64B00. | | | | | | | |
| | | | | | K97B00.S99S99. | F99F99. | V66B00.T64B00. | | | | | | | |
| | | | | | T97B00. | | | | | | | | | |
| 68 | 36 | LLMAYEC | GCHLV | YLIRHA | L99L99.L99L99. | G99G99.C99C99. | B00 | 21 | 15 | 0 | 36 | No | No | Yes |
| | | | | | M99M99.A99A99. | H99H99.L99L99. | | | | | | | | |
| | | | | | Y99Y99.E97B00. | V99V99. | | | | | | | | |
| | | | | | C99C99. | | | | | | | | | |
| 40 | 29 | LRVCYTR | ANYMN | SHYTALVCNV | L99L99.R89B00. | A99A99.N99N99. | B00 | 21 | 15 | 0 | 36 | No | No | Yes |
| | | | | | V99V99.C99C99. | Y99Y99.M99M99. | | | | | | | | |
| | | | | | Y99Y99.T99T99. | N99N99. | | | | | | | | |
| | | | | | R99R99. | | | | | | | | | |
| 181 | 18 | IPVFYC | PGFNL | CNCNAPSFVQ | I99I99.P99P99. | P99P99.G99G99. | B00 | 21 | 15 | 0 | 36 | No | No | Yes |
| | | | | | V99V99.F99F99. | F99F99.N99N99. | | | | | | | | |
| | | | | | Y99Y99.C99C99. | L99L99. | | | | | | | | |
| | | | | | I94B00. | | | | | | | | | |
| 140 | 15 | FLCCYGI | ANL | LGPHVP | F99F99.L99L99. | A99A99.N99N99. | B00 | 21 | 15 | 0 | 36 | No | No | Yes |
| | | | | | C99C99.C99C99. | L99L99.N99N99. | | | | | | | | |
| | | | | | Y99Y99.G99G99. | R99R99. | | | | | | | | |
| | | | | | I99I99. | | | | | | | | | |
| 229 | 9 | DYGYCTF | YPGCH | LLSRPKRCFVMVM | D99D99.Y99Y99. | Y99Y99.P99P99. | B00 | 21 | 15 | 0 | 36 | No | No | Yes |
| | | | | | G99G99.Y99Y99. | G99G99.C99C99. | | | | | | | | |
| | | | | | C99C99.T99T99. | H99H99. | | | | | | | | |
| | | | | | F99F99. | | | | | | | | | |
| 654 | 7 | RP | AYGCV | NFQASN | R99R99.P99P99. | A99A99.Y99Y99. | N99N99.F99F99. | 6 | 15 | 18 | 39 | No | No | Yes |
| | | | | | | G99G99.C99C99. | Q99Q99.A99A99. | | | | | | | |
| | | | | | | V99V99. | S99S99.N99N99. | | | | | | | |
| 38 | 9 | TKFEGLV | YFLQH | SC | T99T99.K99K99. | Y99Y99.F99F99. | B00 | 21 | 15 | 0 | 36 | No | No | Yes |
| | | | | | F99F99.E99E99. | L99L99.Q99Q99. | | | | | | | | |
| | | | | | G99G99.L99L99. | H99H99. | | | | | | | | |
| | | | | | V99V99. | | | | | | | | | |
| 855 | 5 | VNLLVCA | NGWHM | LTSPLSDSS | T40B00.G60B00. | A40B00.V60B00. | L99L99.T99T99. | 9 | 6 | 27 | 42 | Yes | Yes | No |
| | | | | | G40L40.L40B00. | W40B00.A40B00. | S99S99.P99P99. | | | | | | | |
| | | | | | C80B00.B00B00. | B00B00. | L99L99.S99S99. | | | | | | | |
| | | | | | S40B00. | | D99D99.S99S99. | | | | | | | |
| | | | | | | | S99S99. | | | | | | | |
| 511 | 20 | SSRSRFN | ASYRY | LTSPLSDSS | B00B00.B00B00. | A90B00.S95B00. | L95B00.T95B00. | 7 | 15 | 27 | 49 | Yes | No | No |
| | | | | | B00B00.B00B00. | Y95B00.R95B00. | S99S99.P95B00. | | | | | | | |
| | | | | | B00B00.B00B00. | Y90B00. | L90B00.S90B00. | | | | | | | |
| | | | | | B00B00. | | D90B00.S90B00. | | | | | | | |
| | | | | | | | S90B00. | | | | | | | |
| 10 | 13312 | SSRSRFN | GTGYE | YLMVTG | S97B00.S99B00. | G99B00.T99B00. | Y99B00.L99B00. | 21 | 15 | 18 | 54 | No | No | No |
| | | | | | R99B00.S99B00. | G99B00.Y99B00. | M99B00.V99B00. | | | | | | | |
| | | | | | R99B00.F99B00. | E99B00. | T99B00.G99B00. | | | | | | | |
| | | | | | N97B00. | | | | | | | | | |
| 0 | 2960 | SYVNVWG | GYAIS | TIYGVY | S99B00.Y98B00. | G99B00.Y99B00. | T99B00.I99B00. | 21 | 15 | 18 | 54 | No | No | No |
| | | | | | V99B00.N99B00. | A99B00.I99B00. | Y99B00.G99B00. | | | | | | | |
| | | | | | V99B00.W99B00. | S99B00. | V99B00.Y99B00. | | | | | | | |
| | | | | | G99B00. | | | | | | | | | |
| 1 | 2873 | GNVFLCG | FHTCG | WPILSA | G99B00.N98B00. | F99B00.H99B00. | W99B00.P99B00. | 21 | 15 | 18 | 54 | No | No | No |
| | | | | | V99B00.F99B00. | T99B00.C99B00. | I99B00.L99B00. | | | | | | | |
| | | | | | L99B00.C99B00. | G99G99. | S99B00.A99B00. | | | | | | | |
| | | | | | G99B00. | | | | | | | | | |
| 6 | 2527 | LRSRVIT | DVVSF | MTSEVT | L99B00.R99B00. | D99B00.V99B00. | M99B00.T99B00. | 21 | 15 | 18 | 54 | No | No | No |
| | | | | | S98B00.R99B00. | V99B00.S99B00. | S99B00.E99B00. | | | | | | | |
| | | | | | V99B00.I99B00. | F99B00. | V99B00.T99B00. | | | | | | | |
| | | | | | T98B00. | | | | | | | | | |
| 35 | 2206 | DRCGTST | SGLVW | FLSAIE | D99B00.R97B00. | S99B00.G99B00. | F99B00.L99B00. | 21 | 15 | 18 | 54 | No | No | No |
| | | | | | C99B00.G99B00. | L99B00.V99B00. | S99B00.A98B00. | | | | | | | |
| | | | | | T99B00.S98B00. | W99B00. | I99B00.E99B00. | | | | | | | |
| | | | | | T98B00. | | | | | | | | | |
| 18 | 1855 | ATIYIYA | CQSVR | IINCL | A99B00.T99B00. | C99B00.Q99B00. | I60F38.I99B00. | 21 | 15 | 14 | 50 | No | No | No |
| | | | | | I98B00.Y99B00. | S99B00.V99B00. | N99B00.C60D38. | | | | | | | |
| | | | | | I99B00.Y99B00. | R99B00. | L61D38.I61V38. | | | | | | | |
| | | | | | A99B00. | | | | | | | | | |
| 28 | 1090 | RP | AYGCV | PSEVFE | R99B00.P99B00. | A99A99.Y99B00. | P99P99.S99B00. | 6 | 15 | 18 | 39 | No | No | No |
| | | | | | | G99G99.C99B00. | E99B00.V99B00. | | | | | | | |
| | | | | | | V99B00. | F99B00.E98B00. | | | | | | | |
| 27 | 788 | MLTLSAR | LRAPT | FQSSNL | M97B00.L99B00. | L99L99.R99B00. | F99B00.Q99B00. | 21 | 15 | 18 | 54 | No | No | No |
| | | | | | T97B00.L99B00. | A99B00.P99P99. | S99B00.S99B00. | | | | | | | |
| | | | | | S99B00.A99B00. | T99B00. | N99B00.L98B00. | | | | | | | |
| | | | | | R99B00. | | | | | | | | | |
| 5 | 759 | HLVPVAT | ELSRW | QPSCYQ | H99B00.L99B00. | E99B00.L99L99. | Q99B00.P99B00. | 21 | 15 | 18 | 54 | No | No | No |
| | | | | | V97B00.P99B00. | S99B00.R99B00. | S99B00.C99B00. | | | | | | | |
| | | | | | V99B00.A99B00. | W99W99. | Y99B00.Q99B00. | | | | | | | |
| | | | | | T98B00. | | | | | | | | | |
| 19 | 743 | SVCYVYG | YSNLH | QINPML | S97B00.V99B00. | Y99B00.S99S99. | Q99B00.I99B00. | 21 | 15 | 18 | 54 | No | No | No |
| | | | | | C99B00.Y99B00. | N99N99.L99L99. | N99B00.P99B00. | | | | | | | |
| | | | | | V99B00.Y99B00. | H99B00. | M99B00.L99B00. | | | | | | | |
| | | | | | G99B00. | | | | | | | | | |
| 37 | 385 | NIGPCMC | GWSSS | FASVLK | N98B00.I99B00. | G99B00.W99W99. | F99B00.A99B00. | 21 | 15 | 18 | 54 | No | No | No |
| | | | | | G99B00.P99B00. | S99S99.S99S99. | S99B00.V99B00. | | | | | | | |
| | | | | | C99B00.M98B00. | S99S99. | L99B00.K98B00. | | | | | | | |
| | | | | | C99B00. | | | | | | | | | |
| 21 | 345 | RCVIVGC | GDGFD | NPFLGRFAGT | R99B00.C99B00. | G99G99.D99D99. | N99N99.P99B00. | 21 | 15 | 30 | 66 | No | No | No |
| | | | | | V99B00.I99B00. | G99B00.F99F99. | F99F99.L99B00. | | | | | | | |
| | | | | | V99V99.G99B00. | D99B00. | G99B00.R99R99. | | | | | | | |
| | | | | | C99B00. | | F99B00.A99B00. | | | | | | | |
| | | | | | | | G99B00.T99T99. | | | | | | | |
| 124 | 245 | ITVVVGS | CCGEP | PLIIQGCCY | I96B00.T99B00. | C99C99.C99C99. | P99P99.L99L99. | 21 | 15 | 27 | 63 | No | No | No |
| | | | | | V99B00.V99B00. | G99G99.E99E99. | I99I99.I99I99. | | | | | | | |
| | | | | | V99B00.G99B00. | P99B00. | Q99Q99.G99G99. | | | | | | | |
| | | | | | S99B00. | | C99C99.C99C99. | | | | | | | |
| | | | | | | | Y99B00. | | | | | | | |
| 48 | 229 | LALARVS | IGGCL | DTMPNYIYPM | L99B00.A98B00. | I99B00.G99B00. | D99B00.T99B00. | 21 | 15 | 30 | 66 | No | No | No |
| | | | | | L98B00.A99B00. | G99B00.C99B00. | M99B00.P99B00. | | | | | | | |
| | | | | | R99B00.V98B00. | L99B00. | N99B00.Y99B00. | | | | | | | |
| | | | | | S99B00. | | I99B00.Y99B00. | | | | | | | |
| | | | | | | | P99B00.M99B00. | | | | | | | |
| 13 | 173 | SSIYVYL | NNLNS | RINCDL | S97B00.S99B00. | N99N99.N99N99. | R99B00.I99B00. | 21 | 15 | 18 | 54 | No | No | No |
| | | | | | I98B00.Y98B00. | L99L99.N99N99. | N99B00.C99B00. | | | | | | | |
| | | | | | V99V99.Y99B00. | S99S99. | D99B00.L99B00. | | | | | | | |
| | | | | | L99B00. | | | | | | | | | |
| 139 | 134 | WMFVLSS | GNVPN | SGMAWIYPI | W99W99.M99B00. | G99G99.N99N99. | S98B00.G97B00. | 21 | 15 | 27 | 63 | No | No | No |
| | | | | | F99F99.V98B00. | V99V99.P99P99. | M98B00.A97B00. | | | | | | | |
| | | | | | L99L99.S99S99. | N99N99. | W97B00.I97B00. | | | | | | | |
| | | | | | S99S99. | | Y97B00.P98B00. | | | | | | | |
| | | | | | | | I98B00. | | | | | | | |
| 9 | 126 | HNVGVGT | MHAQS | NHTDHYIFPS | H98B00.N95B00. | M98B00.H98B00. | N99B00.H99B00. | 21 | 15 | 30 | 66 | No | No | No |
| | | | | | V98B00.G99B00. | A82B00.Q98B00. | T98B00.D99B00. | | | | | | | |
| | | | | | V98B00.G98B00. | S98B00. | H99B00.Y98B00. | | | | | | | |
| | | | | | T99B00. | | I99B00.F98B00. | | | | | | | |
| | | | | | | | P99B00.S99B00. | | | | | | | |
| 47 | 106 | PEISLIC | SYSLR | FASSCC | P99P99.E99E99. | S99S99.Y99Y99. | F99B00.A99B00. | 21 | 15 | 18 | 54 | No | No | No |
| | | | | | I97B00.S99S99. | S99S99.L99L99. | S99B00.S98B00. | | | | | | | |
| | | | | | L99L99.I99I99. | R99B00. | C99B00.C98B00. | | | | | | | |
| | | | | | C99C99. | | | | | | | | | |
| 357 | 80 | DTVYLLV | LLSSS | IINCTK | D99D99.T99T99. | L99L99.L99L99. | I99I99.I98B00. | 21 | 15 | 18 | 54 | No | No | No |
| | | | | | V99V99.Y98B00. | S99S99.S99S99. | N99N99.C99C99. | | | | | | | |
| | | | | | L99L99.L99L99. | S99S99. | T99T99.K99K99. | | | | | | | |
| | | | | | V98B00. | | | | | | | | | |
| 122 | 71 | ILVGIYW | VRDWS | QRSVFGSSG | I95B00.L99L99. | V99V99.R98B00. | Q99Q99.R98B00. | 21 | 15 | 27 | 63 | No | No | No |
| | | | | | V99V99.G99G99. | D99D99.W99W99. | S99S99.V99V99. | | | | | | | |
| | | | | | I99I99.Y99Y99. | S98B00. | F99F99.G99G99. | | | | | | | |
| | | | | | W99W99. | | S99S99.S99S99. | | | | | | | |
| | | | | | | | G99G99. | | | | | | | |
| 149 | 63 | ESQALRV | SVHCC | SYLGYIFPE | E99E99.S99S99. | S98B00.V98B00. | S99S99.Y99Y99. | 21 | 15 | 27 | 63 | No | No | No |
| | | | | | Q98B00.A99A99. | H99H99.C98B00. | L99L99.G99G99. | | | | | | | |
| | | | | | L99L99.R99R99. | C99C99. | Y99Y99.I99I99. | | | | | | | |
| | | | | | V99V99. | | F99F99.P99P99. | | | | | | | |
| | | | | | | | E99E99. | | | | | | | |
| 168 | 54 | CHSGALY | PMGVA | RMRTPCLMLSGIS | C99C99.H98B00. | P99P99.M99M99. | R99R99.M99M99. | 21 | 15 | 39 | 75 | No | No | No |
| | | | | | S99S99.G99G99. | G99G99.V99V99. | R99R99.T99T99. | | | | | | | |
| | | | | | A99A99.L99L99. | A99A99. | P99P99.C99C99. | | | | | | | |
| | | | | | Y96B00. | | L99L99.M99M99. | | | | | | | |
| | | | | | | | L99L99.S99S99. | | | | | | | |
| | | | | | | | G99G99.I99I99. | | | | | | | |
| | | | | | | | S81B00. | | | | | | | |
| 190 | 50 | VLMLL | IFQNR | YHGPG | V99V99.L99L99. | I99I99.F99F99. | Y99Y99.H99H99. | 21 | 15 | 15 | 51 | No | No | No |
| | | | | | K98B00.S99S99. | Q99Q99.N98B00. | G99G99.P99P99. | | | | | | | |
| | | | | | M99M99.L99L99. | R99R99. | G99G99. | | | | | | | |
| | | | | | L99L99. | | | | | | | | | |
| 232 | 48 | LLFT | RAAPS | PCTISG | L99L99.L99L99. | R99R99.A99A99. | P99P99.C99C99. | 12 | 15 | 18 | 45 | No | No | No |
| | | | | | F97B00.T99T99. | A99A99.P99P99. | T99T99.I99I99. | | | | | | | |
| | | | | | | S99S99. | S99S99.G99G99. | | | | | | | |
| 231 | 41 | YG | IITSG | SYLNSW | Y99Y99.G99G99. | I99I99.I99I99. | S99S99.Y99Y99. | 6 | 15 | 18 | 39 | No | No | No |
| | | | | | | T99T99.S99S99. | L99L99.N99N99. | | | | | | | |
| | | | | | | G99G99. | S99S99.W99W99. | | | | | | | |
| 417 | 38 | DMYGSLT | MFSDI | YGSTMTGCHC | D97B00.M99M99. | M99M99.F99F99. | Y99Y99.G99G99. | 21 | 15 | 30 | 66 | No | No | No |
| | | | | | Y99Y99.G99G99. | S99S99.D99D99. | S99S99.T99T99. | | | | | | | |
| | | | | | S99S99.L99L99. | I99I99. | M97B00.T99T99. | | | | | | | |
| | | | | | T99T99. | | G99G99.C99C99. | | | | | | | |
| | | | | | | | H99H99.C99C99. | | | | | | | |
| 36 | 27 | NMVYMKH | NWLH | ALLVRE | N96B00.M99M99. | N99N99.W99W99. | A51S44.L55B00. | 21 | 12 | 12 | 45 | No | No | No |
| | | | | | V99V99.Y99Y99. | L99L99.H99H99. | L74B00.V55B00. | | | | | | | |
| | | | | | M99M99.K99K99. | | R77B00.E51P40. | | | | | | | |
| | | | | | H99H99. | | | | | | | | | |
| 558 | 27 | PLATSG | FGD | YIQGAC | P99P99.L99L99. | F99F99.G99G99. | Y99Y99.I74B00. | 18 | 9 | 14 | 41 | No | No | No |
| | | | | | A99A99.T99T99. | D99D99. | Q74B00.G74B00. | | | | | | | |
| | | | | | S99S99.G99G99. | | A99A99.C74B00. | | | | | | | |
| 61 | 26 | VLSSEFT | VGAGW | TFSTRY | V99V99.L99L99. | V99V99.G99G99. | T99T99.F99F99. | 21 | 15 | 18 | 54 | No | No | No |
| | | | | | S99S99.S99S99. | A99A99.G99G99. | S99S99.T99T99. | | | | | | | |
| | | | | | E99E99.F99F99. | W99W99. | R99R99.Y99Y99. | | | | | | | |
| | | | | | T99T99. | | | | | | | | | |
| 621 | 26 | VHITRFV | VPGQR | SGLSFGAVR | V99V99.H99H99. | V99V99.P99P99. | S99S99.G99G99. | 21 | 15 | 27 | 63 | No | No | No |
| | | | | | I99I99.T99T99. | G99G99.Q99Q99. | L99L99.S99S99. | | | | | | | |
| | | | | | R99R99.F99F99. | R99R99. | F99F99.G99G99. | | | | | | | |
| | | | | | V99V99. | | A99A99.V99V99. | | | | | | | |
| | | | | | | | R99R99. | | | | | | | |
| 288 | 20 | RLRP | QYGRI | PDLVIYLMPN | R99R99.L99L99. | Q99Q99.Y99Y99. | P99P99.D99D99. | 12 | 15 | 30 | 57 | No | No | No |
| | | | | | R99R99.P99P99. | G99G99.R99R99. | L99L99.V99V99. | | | | | | | |
| | | | | | | I99I99. | I99I99.Y99Y99. | | | | | | | |
| | | | | | | | L99L99.M99M99. | | | | | | | |
| | | | | | | | P99P99.N99N99. | | | | | | | |
| 257 | 18 | AIGCNGL | CCFCS | NAHQYF | A99A99.I99I99. | C99C99.C99C99. | N99N99.A99A99. | 21 | 15 | 18 | 54 | No | No | No |
| | | | | | G99G99.C99C99. | F99F99.C99C99. | H99H99.Q99Q99. | | | | | | | |
| | | | | | N99N99.G99G99. | S99S99 | Y99Y99.F99F99. | | | | | | | |
| | | | | | L99L99. | | | | | | | | | |
| 401 | 16 | IDAHDSV | NIRRG | WITCES | I99I99.D99D99. | N99N99.I99I99. | W99W99.I99I99. | 21 | 15 | 18 | 54 | No | No | No |
| | | | | | A99A99.H99H99. | R99R99.R99R99. | T99T99.C99C99. | | | | | | | |
| | | | | | D99D99.S99S99. | G99G99. | E99E99.S99S99. | | | | | | | |
| | | | | | V99V99. | | | | | | | | | |
| 544 | 14 | VLICRTA | YAVRF | WPDCCN | V99V99.L99L99. | Y99Y99.A99A99. | W99W99.P99P99. | 21 | 15 | 18 | 54 | No | No | No |
| | | | | | I99I99.C99C99. | V99V99.R99R99. | D99D99.C99C99. | | | | | | | |
| | | | | | R99R99.T92B00. | F99F99. | C99C99.N99N99 | | | | | | | |
| | | | | | A99A99. | | | | | | | | | |
| 275 | 10 | VSGFRAC | DFCTG | FLSCDA | V99V99.S99S99. | D99D99.F99F99. | F99F99.L99L99. | 21 | 15 | 18 | 54 | No | No | No |
| | | | | | G99G99.F99F99. | C99C99.T99T99. | S99S99.C99C99. | | | | | | | |
| | | | | | R99R99.A99A99. | G99G99. | D99D99.A99A99 | | | | | | | |
| | | | | | C99C99. | | | | | | | | | |
| 515 | 10 | FDAAQAW | VYYVA | KDM | F99F99.D99D99. | V99V99.Y99Y99. | K99K99.D99D99. | 21 | 15 | 9 | 45 | No | No | No |
| | | | | | A99A99.A99A99. | Y99Y99.V99V99. | M99M99. | | | | | | | |
| | | | | | Q99Q99.A90B00. | A99A99. | | | | | | | | |
| | | | | | W99W99. | | | | | | | | | |
| 488 | 8 | NCNRVIS | RSPQV | WPDCIV | N99N99.C99C99. | R99R99.S99S99. | W99W99.P99P99. | 21 | 15 | 18 | 54 | No | No | No |
| | | | | | N99N99.R99R99. | P99P99.Q99Q99. | D99D99.C99C99. | | | | | | | |
| | | | | | V99V99.I99I99. | V99V99. | I99I99.V99V99. | | | | | | | |
| | | | | | S99S99. | | | | | | | | | |
| 518 | 8 | CVINYHV | TPWVM | MCCAATFWDP | C87B00.V87B00. | T99T99.P99P99. | M99M99.C99C99. | 21 | 15 | 30 | 66 | No | No | No |
| | | | | | I87B00.N87B00. | W99W99.V99V99. | C99C99.A99A99. | | | | | | | |
| | | | | | Y87B00.H87B00. | M99M99. | A99A99.T99T99. | | | | | | | |
| | | | | | V87B00. | | F99F99.W99W99. | | | | | | | |
| | | | | | | | D99D99.P99P99. | | | | | | | |
| 531 | 7 | VCYTGWD | ANQPR | GPDILSFYGC | V99V99.C99C99. | A99A99.N99N99. | G99G99.P99P99. | 21 | 15 | 30 | 66 | No | No | No |
| | | | | | Y99Y99.T99T99. | Q99Q99.P99P99. | D99D99.I99I99. | | | | | | | |
| | | | | | G99G99.W99W99. | R99R99. | L99L99.S99S99. | | | | | | | |
| | | | | | D99D99. | | F99F99.Y99Y99. | | | | | | | |
| | | | | | | | G99G99.C99C99. | | | | | | | |
| 595 | 6 | TRTELRS | LIFIM | TDDFFN | T99T99.R99R99. | L99L99.I99I99. | T83B00.D83B00. | 21 | 15 | 18 | 54 | No | No | No |
| | | | | | T99T99.E99E99. | F99F99.I99I99. | D83B00.F99F99. | | | | | | | |
| | | | | | L99L99.R99R99. | M99M99. | F83B00.N83B00. | | | | | | | |
| | | | | | S99S99. | | | | | | | | | |
| 705 | 6 | SDTVGLV | YFRHS | ITF | S99S99.D99D99. | Y99Y99.F99F99. | I99I99.T99T99. | 21 | 15 | 9 | 45 | No | No | No |
| | | | | | T99T99.V99V99. | R99R99.H99H99. | F99F99. | | | | | | | |
| | | | | | G99G99.L99L99. | S99S99. | | | | | | | | |
| | | | | | V99V99. | | | | | | | | | |

TABLE 8
List of EGFP binder clusters. A list containing key information for all predicted EGFP binding clusters. Cluster ID, size, CDR representative sequences, CDR consensus sequences, CDR scores
(see Materials and Methods), and whether each CDR is unique to EGFP and not found in RBD clusters were shown.
Column 3-CDR1_rep-SEQ ID NOS: 5461-5577
Column 4-CDR2_rep: SEQ ID NOS: 5578-5698
Column 5-CDR3_rep: SEQ ID NOS: 5699-5810

| | | | | | | | | | CDR1_ | CDR2_ | CDR3_ | total_ | CDR1_ | CDR2_ | CDR3_ |
|---|---|---|---|---|---|---|---|---|---|---|---|---|---|---|---|
| cluster_type | cluster_ID | cluster_size | CDR1_rep | CDR2_rep | CDR3_rep | CDR1_consensus | CDR2_consensus | CDR3_consensus | score | score | score | score | unique | unique | unique |
| RC | 6 | 5182 | LNL | EVS | HMK | L99B00.N97B00. | E99B00.V99B00. | H99B00.M99B00. | 21 | 15 | 27 | 63 | Yes | Yes | Yes |
| | | | AYF | AK | LWS | L99B00.A99B00. | S99B00.A99B00. | K99B00.L99B00. | | | | | | | |
| | | | V | | NSM | Y99B00.F99B00. | K99B00. | W99B00.S99B00. | | | | | | | |
| | | | | | | V99B00. | | N99B00.S99B00. | | | | | | | |
| | | | | | | | | M98B00. | | | | | | | |
| RC | 5 | 1189 | VC | DFL | SHS | V99B00.C99B00. | D99B00.F99F99. | S99B00.H99B00. | 6 | 15 | 39 | 60 | Yes | Yes | Yes |
| | | | | AA | TDL | | L99L99.A99B00. | S99S99.T99B00. | | | | | | | |
| | | | | | YWR | | A99B00. | D99B00.L99L99. | | | | | | | |
| | | | | | GHP | | | Y99Y99.W99B00. | | | | | | | |
| | | | | | G | | | R99B00.G99B00. | | | | | | | |
| | | | | | | | | H99B00.P99B00. | | | | | | | |
| | | | | | | | | G99B00. | | | | | | | |
| RC | 20 | 463 | DISA | FIFA | TTC | D99D99.I99I99. | F99B00.I99B00. | T99T99.T93B00. | 21 | 15 | 30 | 66 | Yes | Yes | Yes |
| | | | YHR | R | KICY | S99S99.A99B00. | F99B00.A99B00. | C93B00K93B00. | | | | | | | |
| | | | | | GYQ | Y99Y99.H98B00. | R99R99. | I93B00.C93B00. | | | | | | | |
| | | | | | | R99R99. | | Y93B00.G93B00. | | | | | | | |
| | | | | | | | | Y93B00.Q93B00. | | | | | | | |
| RC | 31 | 257 | SCSI | STW | TTL | S99B00.C99B00. | S99S99.T99T99. | T99T99.T98B00. | 21 | 15 | 18 | 54 | Yes | Yes | Yes |
| | | | SNS | DR | YFR | S98B00.I99B00. | W99W99.D99D99. | L99B00.Y99B00. | | | | | | | |
| | | | | | | S99B00.N96B00 | R99R99. | F99F99.R99B00. | | | | | | | |
| | | | | | | S98B00. | | | | | | | | | |
| RC | 22 | 244 | GKV | LYY | NHS | G97B00.K97B00. | L99B00.Y99Y99. | N99B00.H99B00. | 21 | 15 | 18 | 54 | Yes | Yes | Yes |
| | | | GVC | GL | MMF | V99V99.G99B00. | Y99B00.G99B00. | S99B00.M99B00. | | | | | | | |
| | | | S | | | V99V99.C99B00. | L99L99. | M99B00.F99B00. | | | | | | | |
| | | | | | | S99B00. | | | | | | | | | |
| RC | 53 | 141 | KM | LLL | SRY | K98B00.M99M99. | L99L99.L99B00. | S99B00.R99R99. | 21 | 15 | 18 | 54 | Yes | Yes | Yes |
| | | | WR | GT | VSY | W99W99.R99B00. | L99L99.G99G99. | Y99Y99.V99V99. | | | | | | | |
| | | | GLD | | | G99G99.L99L99. | T99T99. | S99S99.Y99B00. | | | | | | | |
| | | | | | | D99B00. | | | | | | | | | |
| RC | 39 | 113 | PMP | NTW | TDL | P99P99.M99M99. | N99N99.T99T99. | T99B00.D99B00. | 21 | 15 | 18 | 54 | Yes | Yes | Yes |
| | | | QVG | AR | RFV | P99P99.Q99B00. | W99W99.A99A99. | L99B00.R98B00. | | | | | | | |
| | | | | | | V99V99.G99G99. | R99R99. | F99F99.V99B00. | | | | | | | |
| | | | | | | V99V99. | | | | | | | | | |
| RC | 7 | 69 | DCC | EWF | TDL | D99D99.C98B00. | E99E99.W99W99. | T99T99.D98B00. | 21 | 15 | 18 | 54 | Yes | Yes | Yes |
| | | | FLG | GR | RFK | C99C99.F99F99. | F99F99.G99G99. | L98B00.R98B00. | | | | | | | |
| | | | K | | | L99L99.G98B00. | R99R99. | F98B00.K98B00. | | | | | | | |
| | | | | | | K98B00. | | | | | | | | | |
| RC | 56 | 57 | YPF | SFD | S | Y99Y99.P99P99. | S99S99.F98B00. | S98B00. | 21 | 15 | 3 | 39 | Yes | Yes | Yes |
| | | | MPF | EA | | F99F99.M99M99. | D99D99.E99E99. | | | | | | | | |
| | | | F | | | P99P99.F98B00. | A99A99. | | | | | | | | |
| | | | | | | F99F99. | | | | | | | | | |
| RC | 27 | 41 | AGC | WVF | SNC | A99A99.G99G99. | W99W99.V99V99. | S92B00.N92B00. | 21 | 15 | 18 | 54 | Yes | Yes | Yes |
| | | | GFM | GS | VLL | C99C99.G95B00. | F99F99.G99G99. | C92B00.V92B00. | | | | | | | |
| | | | R | | | F99F99.M99M99. | S99S99. | L92B00.L92B00. | | | | | | | |
| | | | | | | R99R99. | | | | | | | | | |
| RC | 43 | 37 | PDV | RTF | TNC | P97B00.D94B00. | R97B00.T99T99. | T99T99.N99N99. | 21 | 15 | 18 | 54 | Yes | Yes | Yes |
| | | | THC | NR | YFV | V97B00.T97B00. | F99F99.N99N99. | C97B00.Y97B00. | | | | | | | |
| | | | T | | | H94B00.C97B00. | R99R99. | F99F99.V97B00. | | | | | | | |
| | | | | | | T97B00. | | | | | | | | | |
| RC | 61 | 28 | LKV | RMG | CAT | L99L99.K99K99. | R99R99.M99M99. | C99C99.A99A99. | 12 | 15 | 30 | 57 | Yes | Yes | Yes |
| | | | G | VL | FST | V99V99.G99G99. | G99G99.V99V99. | T99T99.F99F99. | | | | | | | |
| | | | | | CVW | | L99L99. | S99S99.T99T99. | | | | | | | |
| | | | | | L | | | C99C99.V99V99. | | | | | | | |
| | | | | | | | | W99W99.L99L99. | | | | | | | |
| RC | 66 | 26 | TPF | FTW | TSQ | T96B00.P99P99. | F99F99.T99T99. | T99T99.S99S99. | 21 | 15 | 18 | 54 | Yes | Yes | Yes |
| | | | NSY | YR | WFC | F99F99.N99N99. | W99W99.Y99Y99. | Q99Q99.W99W99. | | | | | | | |
| | | | S | | | S99S99.Y99Y99. | R99R99. | F99F99.C99C99. | | | | | | | |
| | | | | | | S99S99. | | | | | | | | | |
| RC | 8 | 26 | AGA | SLG | F | A99A99.G99G99. | S99S99.L99L99. | F99F99. | 21 | 15 | 3 | 39 | Yes | Yes | Yes |
| | | | LRR | HC | | A99A99.L99L99. | G99G99.H99H99. | | | | | | | | |
| | | | S | | | R99R99.R99R99. | C99C99. | | | | | | | | |
| | | | | | | S99S99. | | | | | | | | | |
| RC | 73 | 25 | LYAI | RMG | TTIY | L99L99.Y99Y99. | R99R99.M99M99. | T99T99.T99T99. | 21 | 15 | 30 | 66 | Yes | Yes | Yes |
| | | | ERH | LL | GSC | A99A99.I99I99. | G99G99.L99L99. | I99I99.Y99Y99. | | | | | | | |
| | | | | | FCQ | E99E99.R99R99. | L99L99. | G99G99.S99S99. | | | | | | | |
| | | | | | | H99H99. | | C99C99.F99F99. | | | | | | | |
| | | | | | | | | C99C99.Q99Q99. | | | | | | | |
| RC | 51 | 24 | MW | WW | IDTA | M99M99.W99W99. | W99W99.W99W99. | I58B00.D54B00. | 21 | 15 | 14 | 50 | Yes | Yes | Yes |
| | | | HAF | AAS | TGAI | H99H99.A99A99. | A99A99.A99A99. | T45B00.A45B00. | | | | | | | |
| | | | DT | | FR | F99F99.D99D99. | S99S99. | T45B00.G45B00. | | | | | | | |
| | | | | | | T99T99. | | A45B00.I45B00. | | | | | | | |
| | | | | | | | | F54B00.R54B00. | | | | | | | |
| RC | 67 | 24 | WPL | WFS | FRR | W95B00.P95B00. | W99W99.F99F99. | F99F99.R99R99. | 21 | 15 | 39 | 75 | Yes | Yes | Yes |
| | | | GFY | HD | KYQ | L99L99.G95B00. | S99S99.H99H99. | R99R99.K99K99. | | | | | | | |
| | | | T | | EFG | F95B00.Y95B00. | D99D99. | Y99Y99.Q99Q99. | | | | | | | |
| | | | | | AGS | T91B00. | | E99E99.F99F99. | | | | | | | |
| | | | | | V | | | G99G99.A99A99. | | | | | | | |
| | | | | | | | | G99G99.S99S99. | | | | | | | |
| | | | | | | | | V99V99. | | | | | | | |
| RC | 68 | 22 | CTS | SDS | S | C99C99.T99T99. | S99S99.D99D99. | S99S99. | 21 | 15 | 3 | 39 | Yes | Yes | Yes |
| | | | NIR | AY | | S99S99N99N99. | S99S99.A99A99. | | | | | | | | |
| | | | P | | | I99I99.R99R99. | Y99Y99. | | | | | | | | |
| | | | | | | P99P99. | | | | | | | | | |
| RC | 88 | 22 | WT | CLG | RPL | W99W99.T99T99. | C99C99.L99L99. | R99R99.P99P99. | 6 | 15 | 24 | 45 | Yes | Yes | Yes |
| | | | | HR | SPN | | G99G99.H99H99. | L99L99.S99S99. | | | | | | | |
| | | | | | LH | | R99R99. | P99P99.N99N99. | | | | | | | |
| | | | | | | | | L99L99.H99H99. | | | | | | | |
| RC | 58 | 20 | LAT | EYW | SSD | L99L99.A99A99. | E99E99.Y99Y99. | S99S99.S99S99. | 33 | 15 | 18 | 66 | Yes | Yes | Yes |
| | | | VCC | GR | KFV | T99T99.V99V99. | W99W99.G99G99. | D99D99.K99K99. | | | | | | | |
| | | | GGL | | | C99C99.C99C99. | R99R99. | F99F99.V99V99. | | | | | | | |
| | | | WA | | | G95B00.G99G99. | | | | | | | | | |
| | | | | | | L99L99.W99W99. | | | | | | | | | |
| | | | | | | A99A99. | | | | | | | | | |
| RC | 85 | 20 | PFW | CPF | NNE | P99P99.F99F99. | C99C99.P99P99. | N99N99.N99N99. | 21 | 15 | 18 | 54 | Yes | Yes | Yes |
| | | | TLD | HR | YM | W99W99.T99T99. | F99F99.H99H99. | E99E99.Y99Y99. | | | | | | | |
| | | | K | | W | L95B00.D99D99. | R99R99. | M99M99.W99W99. | | | | | | | |
| | | | | | | K99K99. | | | | | | | | | |
| RC | 82 | 19 | VYV | VAN | RRY | V99V99.Y99Y99. | V99V99.A99A99. | R99R99.R99R99. | 21 | 15 | 27 | 63 | Yes | Yes | Yes |
| | | | GW | DA | CRY | V99V99.G99G99. | N99N99.D99D99. | Y99Y99.C99C99. | | | | | | | |
| | | | HD | | AVV | W99W99.H99H99. | A99A99. | R99R99.Y99Y99. | | | | | | | |
| | | | | | | D99D99. | | A99A99.V99V99. | | | | | | | |
| | | | | | | | | V99V99. | | | | | | | |
| RC | 62 | 16 | DLY | VVT | RFR | D99D99.L99L99. | V99V99.V99V99. | R99R99.F99F99. | 21 | 15 | 39 | 75 | Yes | Yes | Yes |
| | | | LLR | CR | SHN | Y99Y99.L99L99. | T99T99.C99C99. | R93B00.S99S99. | | | | | | | |
| | | | N | | VYC | L99L99.R99R99. | R99R99. | H99H99.N99N99. | | | | | | | |
| | | | | | MDL | N99N99. | | V99V99.Y99Y99. | | | | | | | |
| | | | | | V | | | C99C99.M99M99. | | | | | | | |
| | | | | | | | | D99D99.L99L99. | | | | | | | |
| | | | | | | | | V99V99. | | | | | | | |
| RC | 65 | 16 | LTC | TVF | SDQ | L99L99.T99T99. | T99T99.V99V99. | S93B00.D93B00. | 21 | 15 | 18 | 54 | Yes | Yes | Yes |
| | | | GSD | NV | FMT | C99C99.G99G99. | F99F99N99N99. | Q93B00.F93B00. | | | | | | | |
| | | | R | | | S99S99.D99D99. | V99V99. | M93B00.T93B00 | | | | | | | |
| | | | | | | R99R99. | | | | | | | | | |
| RC | 105 | 14 | YW | WW | TKS | Y99Y99.W99W99. | W99W99.W99W99. | B00 | 21 | 15 | 0 | 36 | Yes | Yes | Yes |
| | | | GVF | HDS | SAL | G99G99.V99V99. | H99H99.D92B00. | | | | | | | | |
| | | | MD | | | F99F99.M99M99. | S99S99. | | | | | | | | |
| | | | | | | D92B00. | | | | | | | | | |
| RC | 41 | 14 | SVL | RTW | TTC | S99S99.V99V99. | R99R99.T99T99. | T99T99.T99T99. | 21 | 15 | 18 | 54 | Yes | Yes | Yes |
| | | | SVT | VR | TFE | L99L99.S99S99. | W99W99.V99V99. | C99C99.T99T99. | | | | | | | |
| | | | A | | | V99V99.T99T99. | R99R99. | F99F99.E99E99. | | | | | | | |
| | | | | | | A99A99. | | | | | | | | | |
| RC | 102 | 13 | LYIA | RCA | ITVV | L99L99.Y99Y99. | R99R99.C99C99. | I99I99.T99T99. | 21 | 15 | 18 | 54 | Yes | Yes | Yes |
| | | | RSR | RY | IA | I99I99.A99A99. | A99A99.R99R99. | V99V99.V99V99. | | | | | | | |
| | | | | | | R99R99.S99S99. | Y99Y99. | I99I99.A99A99. | | | | | | | |
| | | | | | | R99R99. | | | | | | | | | |
| RC | 59 | 13 | MRV | SSL | SNL | M99M99.R92B00. | S99S99.S99S99. | S99S99.N99N99. | 12 | 15 | 39 | 66 | Yes | Yes | Yes |
| | | | N | SS | QLC | V99V99.N99N99. | L99L99.S99S99. | L99L99.Q99Q99. | | | | | | | |
| | | | | | LTW | | S99S99. | L99L99.C99C99. | | | | | | | |
| | | | | | LDI | | | L99L99.T99T99. | | | | | | | |
| | | | | | M | | | W99W99.L99L99. | | | | | | | |
| | | | | | | | | D99D99.I99I99. | | | | | | | |
| | | | | | | | | M99M99. | | | | | | | |
| RC | 106 | 11 | VCS | STA | FM | V99V99.C99C99. | S99S99.T99T99. | F99F99.M99M99. | 21 | 15 | 6 | 42 | Yes | Yes | Yes |
| | | | GVR | VY | | S99S99.G99G99. | A99A99.V99V99. | | | | | | | | |
| | | | G | | | V99V99.R99R99. | Y99Y99. | | | | | | | | |
| | | | | | | G99G99. | | | | | | | | | |
| RC | 37 | 11 | GHS | FVF | TSE | G99G99.H90B00. | F99F99.V99V99. | T99T99.S99S99. | 21 | 15 | 18 | 54 | Yes | Yes | Yes |
| | | | PCW | TG | LMV | S99S99.P99P99. | F99F99.T99T99. | E99E99.L99L99. | | | | | | | |
| | | | S | | | C99C99.W99W99. | G99G99. | M99M99.V99V99. | | | | | | | |
| | | | | | | S99S99. | | | | | | | | | |
| RC | 9 | 11 | TTL | ATC | LAP | T90B00.T99T99. | A99A99.T99T99. | L99L99.A99A99. | 21 | 15 | 30 | 66 | Yes | Yes | Yes |
| | | | PGL | WG | CSM | L99L99.P99P99. | C99C99.W99W99. | P99P99.C99C99. | | | | | | | |
| | | | V | | GW | G99G99.L99L99. | G99G99. | S99S99.M99M99. | | | | | | | |
| | | | | | VM | V99V99. | | G99G99.W99W99. | | | | | | | |
| | | | | | | | | V90B00.M99M99. | | | | | | | |
| RC | 29 | 10 | LYG | SSW | GI | L99L99.Y90B00. | S99S99.S99S99. | G99G99.I99I99. | 21 | 12 | 6 | 39 | Yes | Yes | Yes |
| | | | PRR | R | | G99G99.P99P99. | W99W99.R99R99. | | | | | | | | |
| | | | W | | | R99R99.R99R99. | | | | | | | | | |
| | | | | | | W99W99. | | | | | | | | | |
| RC | 72 | 10 | VPV | FLW | TSD | V99V99.P90B00. | F99F99.L99L99. | T99T99.S99S99. | 21 | 15 | 18 | 54 | Yes | Yes | Yes |
| | | | QLW | MR | RFA | V99V99.Q99Q99. | W99W99.M90B00. | D99D99.R99R99. | | | | | | | |
| | | | S | | | L99L99.W99W99. | R99R99. | F99F99.A99A99. | | | | | | | |
| | | | | | | S90B00. | | | | | | | | | |
| RC | 75 | 10 | LYQ | WFT | DVH | L99L99.Y99Y99. | W99W99.F99F99. | D99D99.V99V99. | 21 | 15 | 30 | 66 | Yes | Yes | Yes |
| | | | RIL | GR | GYY | Q99Q99.R99R99. | T99T99.G99G99. | H99H99.G99G99. | | | | | | | |
| | | | M | | VFP | I99I99.L99L99. | R99R99. | Y99Y99.Y99Y99. | | | | | | | |
| | | | | | N | M90B00. | | V99V99.F99F99. | | | | | | | |
| | | | | | | | | P99P99.N99N99. | | | | | | | |
| RC | 100 | 9 | LSH | TWF | TSL | L99L99.S99S99. | T99T99.W99W99. | T99T99.S99S99. | 21 | 15 | 18 | 54 | Yes | Yes | Yes |
| | | | SVF | HR | EMC | H99H99.S99S99. | F99F99.H99H99. | L99L99.E99E99. | | | | | | | |
| | | | A | | | V99V99.F99F99. | R99R99. | M99M99.C99C99. | | | | | | | |
| | | | | | | A99A99. | | | | | | | | | |
| RC | 107 | 9 | SGV | WYD | VYV | S99S99.G99G99. | W99W99.Y99Y99. | V99V99.Y99Y99. | 21 | 15 | 39 | 75 | Yes | Yes | Yes |
| | | | GCF | | PSH | V99V99.G99G99. | D99D99.L99L99. | V99V99.P99P99. | | | | | | | |
| | | | D | | FNA | C99C99.F99F99. | G99G99. | S99S99.H99H99. | | | | | | | |
| | | | | | W | D99D99. | | F99F99.N99N99. | | | | | | | |
| | | | | | WK | | | A99A99.W99W99. | | | | | | | |
| | | | | | | | | S99S99.W99W99. | | | | | | | |
| | | | | | | | | K99K99. | | | | | | | |
| RC | 19 | 9 | LIGS | TLS | GVL | L99L99.I99I99. | T99T99.L99L99. | G99G99.V99V99. | 21 | 15 | 12 | 48 | Yes | Yes | Yes |
| | | | RHC | ST | T | G99G99.S99S99. | S99S99.S99S99. | L99L99.T99T99. | | | | | | | |
| | | | | | | R99R99.H99H99. | T99T99. | | | | | | | | |
| | | | | | | C99C99. | | | | | | | | | |
| RC | 69 | 9 | IGM | TRA | DSV | I99I99.G99G99. | T99T99.R99R99. | D99D99.S99S99. | 21 | 15 | 18 | 54 | Yes | Yes | Yes |
| | | | CRY | TW | LWL | M99M99.C99C99. | A99A99.T99T99. | V99V99.L99L99. | | | | | | | |
| | | | Y | | | R99R99.Y99Y99. | W99W99. | W99W99.L99L99. | | | | | | | |
| | | | | | | Y99Y99. | | | | | | | | | |
| RC | 74 | 9 | GMN | FTV | HTF | G99G99.M99M99. | F99F99.T99T99. | H99H99.T99T99. | 21 | 15 | 39 | 75 | Yes | Yes | Yes |
| | | | LSR | ED | RAF | N99N99.L99L99. | V99V99.E99E99. | F99F99R99R99. | | | | | | | |
| | | | H | | GS | S99S99.R88B00. | D99D99. | A99A99.F99F99. | | | | | | | |
| | | | | | WVS | H99H99. | | G99G99.S99S99. | | | | | | | |
| | | | | | AS | | | W99W99.V99V99. | | | | | | | |
| | | | | | | | | S99S99.A99A99. | | | | | | | |
| | | | | | | | | S99S99. | | | | | | | |
| RC | 76 | 9 | CYT | WW | ASN | C99C99.Y88B00. | W99W99.W99W99. | A99A99.S99S99. | 21 | 15 | 30 | 66 | Yes | Yes | Yes |
| | | | AFR | HLT | DYD | T99T99.A99A99. | H99H99.L99L99. | N99N99.D99D99. | | | | | | | |
| | | | V | | AISI | F99F99.R99R99. | T99T99. | Y99Y99.D99D99. | | | | | | | |
| | | | | | | V99V99. | | A99A99.I99I99. | | | | | | | |
| | | | | | | | | S99S99.I99I99. | | | | | | | |
| RC | 93 | 9 | QYS | PRG | FNS | Q99Q99.Y99Y99. | P99P99.R99R99. | F99F99.N99N99. | 21 | 15 | 18 | 54 | Yes | Yes | Yes |
| | | | VHT | HW | CVE | S99S99.V99V99. | G99G99.H99H99. | S99S99.C99C99. | | | | | | | |
| | | | T | | | H99H99.T99T99. | W99W99. | V99V99.E99E99. | | | | | | | |
| | | | | | | T99T99. | | | | | | | | | |
| RC | 121 | 8 | ALC | ICH | YTM | A99A99.L99L99. | I99I99.C99C99. | Y99Y99.T99T99. | 21 | 15 | 18 | 54 | Yes | Yes | Yes |
| | | | VIS | DR | RFY | C99C99.V99V99. | H99H99.D99D99. | M99M99.R99R99. | | | | | | | |
| | | | G | | | I99I99.S87B00. | R99R99. | F99F99.Y99Y99. | | | | | | | |
| | | | | | | G99G99. | | | | | | | | | |
| RC | 18 | 8 | TRL | SMC | GV | T99T99.R99R99. | S99S99.M99M99. | G99G99.V99V99. | 21 | 15 | 6 | 42 | Yes | Yes | Yes |
| | | | PSL | RV | | L99L99.P99P99. | C99C99.R99R99. | | | | | | | | |
| | | | T | | | S99S99.L99L99. | V99V99. | | | | | | | | |
| | | | | | | T99T99. | | | | | | | | | |
| RC | 47 | 8 | YYA | PMG | LTH | Y99Y99.Y99Y99. | P99P99.M99M99. | L99L99.T99T99. | 21 | 15 | 27 | 63 | Yes | Yes | Yes |
| | | | CGS | VL | PFG | A99A99.C99C99. | G99G99.V99V99. | H99H99.P99P99. | | | | | | | |
| | | | A | | EDV | G99G99.S99S99. | L99L99. | F99F99.G99G99. | | | | | | | |
| | | | | | | A99A99. | | E99E99.D99D99. | | | | | | | |
| | | | | | | | | V99V99. | | | | | | | |
| RC | 63 | 8 | NFR | SVF | LVG | N99N99.F99F99. | S99S99.V99V99. | L99L99.V99V99. | 21 | 15 | 30 | 66 | Yes | Yes | Yes |
| | | | SFF | SG | SLT | R99R99.S99S99. | F99F99.S99S99. | G99G99.S99S99. | | | | | | | |
| | | | L | | GGL | F99F99.F99F99. | G99G99. | L99L99.T99T99. | | | | | | | |
| | | | | | N | L99L99. | | G99G99.G99G99. | | | | | | | |
| | | | | | | | | L99L99.N99N99. | | | | | | | |
| RC | 89 | 8 | GFD | SLC | LPA | G99G99.F99F99. | S99S99.L99L99. | L99L99.P99P99. | 20 | 15 | 27 | 62 | Yes | Yes | Yes |
| | | | TGF | CS | PIK | D99D99.T99T99. | C99C99.C87B00. | A99A99.P99P99. | | | | | | | |
| | | | L | | MVD | G75B00.F99F99. | S99S99. | I99I99.K99K99. | | | | | | | |
| | | | | | | L99L99. | | M99M99.V99V99. | | | | | | | |
| | | | | | | | | D99D99. | | | | | | | |
| RC | 101 | 7 | GSV | CLR | IPF | G99G99.S99S99. | C99C99.L99L99. | I99I99.P99P99. | 21 | 15 | 30 | 66 | Yes | Yes | Yes |
| | | | RIS | SA | WPF | V99V99.R99R99. | R99R99.S99S99. | F99F99.W99W99. | | | | | | | |
| | | | N | | FST | I99I99.S99S99. | A99A99. | P99P99.F99F99. | | | | | | | |
| | | | | | C | N99N99. | | F99F99.S99S99. | | | | | | | |
| | | | | | | | | T99T99.C99C99. | | | | | | | |
| RC | 122 | 7 | AND | VVF | TNL | A99A99.N99N99. | V99V99.V99V99. | T99T99.N99N99. | 21 | 15 | 18 | 54 | Yes | Yes | Yes |
| | | | RLT | TV | YMS | D99D99.R99R99. | F99F99.T99T99. | L99L99.Y99Y99. | | | | | | | |
| | | | S | | | L99L99.T99T99. | V99V99. | M99M99.S99S99. | | | | | | | |
| | | | | | | S99S99. | | | | | | | | | |
| RC | 15 | 7 | GLR | SLF | GDD | G99G99.L99L99. | S99S99.L99L99. | G99G99.D99D99. | 21 | 15 | 18 | 54 | Yes | Yes | Yes |
| | | | GVR | AQ | YFR | R99R99.G99G99. | F99F99.A99A99. | D99D99.Y99Y99. | | | | | | | |
| | | | S | | | V99V99.R99R99. | Q99Q99. | F99F99.R99R99 | | | | | | | |
| | | | | | | S99S99. | | | | | | | | | |
| RC | 64 | 7 | NPR | LRY | YTC | N99N99.P99P99. | L99L99.R99R99. | Y99Y99.T99T99. | 21 | 15 | 18 | 54 | Yes | Yes | Yes |
| | | | PIGI | GG | TGY | R99R99.P99P99. | Y99Y99.G99G99. | C99C99.T99T99. | | | | | | | |
| | | | | | | I99I99.G99G99. | G99G99. | G99G99.Y99Y99. | | | | | | | |
| | | | | | | I99I99. | | | | | | | | | |
| RC | 91 | 7 | CSE | CVF | CTL | C99C99.S99S99. | C99C99.V99V99. | C99C99.T99T99. | 21 | 15 | 18 | 54 | Yes | Yes | Yes |
| | | | GYT | AV | RMT | E99E99.G99G99. | F99F99.A99A99. | L99L99.R99R99. | | | | | | | |
| | | | L | | | Y99Y99.T99T99. | V99V99. | M99M99.T99T99. | | | | | | | |
| | | | | | | L99L99. | | | | | | | | | |
| RC | 98 | 7 | SMD | KFG | GTS | S99S99.M99M99. | K99K99.F99F99. | G99G99.T99T99. | 21 | 15 | 30 | 66 | Yes | Yes | Yes |
| | | | RRF | VL | APW | D99D99.R99R99. | G99G99.V99V99. | S99S99.A85B00. | | | | | | | |
| | | | T | | SLL | R99R99.F99F99. | L99L99. | P99P99.W99W99. | | | | | | | |
| | | | | | V | T99T99. | | S99S99.L85B00. | | | | | | | |
| | | | | | | | | L99L99.V99V99. | | | | | | | |
| RC | 84 | 6 | FPM | RTW | TTIE | F99F99.P99P99. | R99R99.T99T99. | T99T99.T99T99. | 21 | 15 | 18 | 54 | Yes | Yes | Yes |
| | | | DAG | RR | FC | M99M99.D99D99. | W99W99.R99R99. | I99I99.E99E99. | | | | | | | |
| | | | C | | | A99A99.G99G99. | R99R99. | F99F99.C99C99. | | | | | | | |
| | | | | | | C99C99. | | | | | | | | | |
| RC | 97 | 6 | SLV | VVF | TNL | S83B00.L99L99. | V83B00.V83B00. | T99T99.N66B00. | 21 | 15 | 14 | 50 | Yes | Yes | Yes |
| | | | NFH | SR | CCN | V83B00.N83B00. | F99F99.S83B00. | L66B00.C66B00. | | | | | | | |
| | | | R | | | F83B00.H99H99. | R99R99. | C66B00.N99N99. | | | | | | | |
| | | | | | | R83B00. | | | | | | | | | |
| RC | 108 | 5 | CAS | LTW | TTE | C99C99.A99A99. | L99L99.T99T99. | T99T99.T99T99. | 21 | 15 | 39 | 75 | Yes | Yes | Yes |
| | | | AFH | TV | PCL | S99S99.A99A99. | W99W99.T99T99. | E99E99.P99P99. | | | | | | | |
| | | | E | | EIG | F99F99.H99H99. | V99V99. | C99C99.L99L99. | | | | | | | |
| | | | | | SGF | E99E99. | | E99E99.I99I99. | | | | | | | |
| | | | | | L | | | G99G99.S99S99. | | | | | | | |
| | | | | | | | | G99G99.F99F99. | | | | | | | |
| | | | | | | | | L99L99. | | | | | | | |
| RC | 110 | 5 | RSN | TFG | ELA | R99R99.S99S99. | T99T99.F99F99. | E99E99.L99L99. | 15 | 15 | 38 | 68 | Yes | Yes | Yes |
| | | | SW | LL | THT | N99N99.S99S99. | G99G99.L99L99. | A99A99.T99T99. | | | | | | | |
| | | | | | VDL | W99W99. | L99L99. | H80B00.T99T99. | | | | | | | |
| | | | | | FGF | | | V99V99.D99D99. | | | | | | | |
| | | | | | G | | | L99L99.F99F99. | | | | | | | |
| | | | | | | | | G99G99.F99F99. | | | | | | | |
| | | | | | | | | G99G99. | | | | | | | |
| RC | 111 | 5 | MRS | SFA | QYG | M99M99.R60G40. | S99S99.F99F99. | Q99Q99.Y99Y99. | 20 | 15 | 18 | 53 | Yes | Yes | Yes |
| | | | TRK | AW | PVM | S99S99.T99T99. | A99A99.A99A99. | G99G99.P99P99. | | | | | | | |
| | | | T | | | R99R99.K99K99. | W99W99. | V99V99.M99M99. | | | | | | | |
| | | | | | | T99T99. | | | | | | | | | |
| RC | 115 | 5 | CLG | WW | TNP | C99C99.L99L99. | W99W99.W99W99. | T99T99.N99N99. | 15 | 15 | 33 | 63 | Yes | Yes | Yes |
| | | | YQ | NWS | TAT | G99G99.Y99Y99. | N99N99.W99W99. | P99P99.T99T99. | | | | | | | |
| | | | | | DGV | Q99Q99. | S99S99. | A99A99.T99T99. | | | | | | | |
| | | | | | FG | | | D99D99.G99G99. | | | | | | | |
| | | | | | | | | V99V99.F99F99. | | | | | | | |
| | | | | | | | | G99G99. | | | | | | | |
| RC | 116 | 5 | SHL | YAA | DDS | S99S99.H99H99. | Y99Y99.A99A99. | D99D99.D99D99. | 21 | 15 | 27 | 63 | Yes | Yes | Yes |
| | | | ARG | AF | NCV | L99L99.A99A99. | A99A99.A99A99. | S99S99.N99N99. | | | | | | | |
| | | | C | | YAS | R99R99.G99G99. | F99F99. | C99C99.V99V99. | | | | | | | |
| | | | | | | C99C99. | | Y99Y99.A99A99. | | | | | | | |
| | | | | | | | | S99S99. | | | | | | | |
| RC | 118 | 5 | SVV | LVV | HIN | S99S99.V80B00. | L99L99.V99V99. | H99H99.I99I99. | 20 | 15 | 18 | 53 | Yes | Yes | Yes |
| | | | YVC | NR | RWI | V99V99.Y99Y99. | V99V99.N99N99. | N99N99.R99R99. | | | | | | | |
| | | | Y | | | V99V99.C99C99. | R99R99. | W99W99.I99I99. | | | | | | | |
| | | | | | | Y99Y99. | | | | | | | | | |
| RC | 45 | 5 | EMG | FRC | SWA | E99E99.M99M99. | F99F99.R99R99. | S99S99.W99W99. | 12 | 15 | 39 | 66 | Yes | Yes | Yes |
| | | | V | MY | RQH | G99G99.V99V99. | C99C99.M99M99. | A99A99.R99R99. | | | | | | | |
| | | | | | DPS | | Y99Y99. | Q99Q99.H99H99. | | | | | | | |
| | | | | | CQY | | | D99D99.P99P99. | | | | | | | |
| | | | | | A | | | S99S99.C99C99. | | | | | | | |
| | | | | | | | | Q99Q99.Y99Y99. | | | | | | | |
| | | | | | | | | A99A99. | | | | | | | |
| RC | 52 | 5 | QHS | MW | TSN | Q99Q99.H99H99. | M99M99.W99W99. | T99T99.S99S99. | 21 | 15 | 18 | 54 | Yes | Yes | Yes |
| | | | SFF | GIF | FFV | S99S99.S99S99. | G99G99.I99I99. | N99N99.F99F99. | | | | | | | |
| | | | C | | | F99F99.F99F99. | F99F99. | F99F99.V99V99. | | | | | | | |
| | | | | | | C99C99. | | | | | | | | | |
| RC | 70 | 5 | LVW | WFE | INM | L99L99.V99V99. | W99W99.F99F99. | B00 | 21 | 15 | 0 | 36 | Yes | Yes | Yes |
| | | | ITCP | SR | HGG | W99W99.I99I99. | E99E99.S99S99. | | | | | | | | |
| | | | | | | T99T99.C99C99. | R99R99. | | | | | | | | |
| | | | | | | P99P99. | | | | | | | | | |
| RC | 71 | 5 | EFD | TLLL | NGI | E99E99.F99F99. | T99T99.L99L99. | N99N99.G99G99. | 18 | 15 | 27 | 60 | Yes | Yes | Yes |
| | | | VW | R | TAT | D99D99.V99V99. | L99L99.L99L99. | I99I99.T99T99. | | | | | | | |
| | | | G | | CFC | W99W99.G99G99. | R99R99. | A99A99.T99T99. | | | | | | | |
| | | | | | | | | C99C99.F99F99. | | | | | | | |
| | | | | | | | | C99C99. | | | | | | | |
| RC | 79 | 5 | GNS | PVA | F | G99G99.N99N99. | P99P99.V99V99. | F99F99. | 21 | 15 | 3 | 39 | Yes | Yes | Yes |
| | | | RDR | GR | | S99S99.R99R99. | A99A99.G99G99. | | | | | | | | |
| | | | T | | | D99D99.R99R99. | R99R99. | | | | | | | | |
| | | | | | | T99T99. | | | | | | | | | |
| RC | 86 | 5 | YDS | RGG | NYL | Y99Y99.D99D99. | R99R99.G99G99. | N99N99.Y99Y99. | 21 | 15 | 18 | 54 | Yes | Yes | Yes |
| | | | SVG | LY | SLC | S99S99.S99S99. | G99G99.L99L99. | L99L99.S99S99. | | | | | | | |
| | | | G | | | V99V99.G99G99. | Y99Y99. | L99L99.C99C99. | | | | | | | |
| | | | | | | G99G99. | | | | | | | | | |
| RC | 87 | 5 | MEV | RGR | HTS | M99M99.E99E99. | R99R99.G99G99. | H80B00.T80B00. | 21 | 15 | 12 | 48 | Yes | Yes | Yes |
| | | | VSR | SY | ELS | V99V99.V99V99. | R99R99.S99S99. | S80B00.E80B00. | | | | | | | |
| | | | A | | | S99S99.R99R99. | Y99Y99. | L80B00.S80B00. | | | | | | | |
| | | | | | | A99A99. | | | | | | | | | |
| RC | 92 | 5 | GRA | GHG | CGP | G99G99.R99R99. | G99G99.H99H99. | C99C99.G99G99. | 9 | 15 | 9 | 33 | Yes | Yes | Yes |
| | | | | SV | | A99A99. | G99G99.S99S99. | P99P99. | | | | | | | |
| | | | | | | | V99V99. | | | | | | | | |
| RC | 96 | 5 | HFS | PLG | TLT | H99H99.F99F99. | P99P99.L99L99. | T99T99.L99L99. | 21 | 15 | 39 | 75 | Yes | Yes | Yes |
| | | | SRW | LF | RWY | S99S99.S99S99. | G99G99.L99L99. | T99T99.R99R99. | | | | | | | |
| | | | V | | FYD | R99R99.W99W99. | F99F99. | W99W99.Y99Y99. | | | | | | | |
| | | | | | SDS | V99V99. | | F99F99.Y99Y99. | | | | | | | |
| | | | | | F | | | D99D99.S99S99. | | | | | | | |
| | | | | | | | | D99D99.S99S99. | | | | | | | |
| | | | | | | | | F99F99. | | | | | | | |
| RC | 99 | 5 | LSN | HVF | TDV | L99L99.S99S99. | H99H99.V99V99. | T99T99.D99D99. | 21 | 15 | 18 | 54 | Yes | Yes | Yes |
| | | | TCVI | VR | YFR | N99N99.T99T99. | F99F99.V99V99. | V99V99.Y99Y99. | | | | | | | |
| | | | | | | C99C99.V99V99. | R99R99. | F99F99.R99R99. | | | | | | | |
| | | | | | | I99I99. | | | | | | | | | |
| RC | 2 | 5841 | VLV | ASY | LTS | V99B00.L99B00. | A99B00.S99B00. | B00 | 21 | 15 | 0 | 36 | No | No | Yes |
| | | | CYS | RY | PLS | V99B00.C99B00. | Y99B00.R99B00. | | | | | | | | |
| | | | Y | | DSS | Y99B00.S99B00. | Y99B00. | | | | | | | | |
| | | | | | | Y99B00. | | | | | | | | | |
| RC | 81 | 56 | LVV | ATL | LIPA | L99L99.V99V99. | A99A99.T99T99. | B00 | 21 | 15 | 0 | 36 | No | No | Yes |
| | | | TYE | RG | ESG | V99V99.T99T99. | L99L99.R99R99. | | | | | | | | |
| | | | R | | LVP | Y99Y99.E99E99. | G98B00. | | | | | | | | |
| | | | | | LVD | R99R99. | | | | | | | | | |
| RC | 23 | 53 | VCV | ETW | MRC | V99V99.C99C99. | E99E99.T99T99. | B00 | 21 | 15 | 0 | 36 | No | No | Yes |
| | | | SYT | MH | PPH | V99V99.S99S99. | W99W99.M99M99. | | | | | | | | |
| | | | H | | FFV | Y99Y99.T99T99. | H99H99. | | | | | | | | |
| | | | | | | H99H99. | | | | | | | | | |
| RC | 55 | 37 | ILC | CNA | AHL | I99199.L99L99. | C99C99.N99N99. | B00 | 21 | 15 | 0 | 36 | No | No | Yes |
| | | | MYE | RT | V | C99C99.M99M99. | A99A99.R99R99. | | | | | | | | |
| | | | Q | | | Y99Y99.E99E99. | T99T99. | | | | | | | | |
| | | | | | | Q86B00. | | | | | | | | | |
| RC | 40 | 20 | LLM | GCH | YLIR | L99L99.L99L99. | G99G99.C99C99. | B00 | 21 | 15 | 0 | 36 | No | No | Yes |
| | | | AYE | LV | HA | M95B00.A99A99. | H99H99.L99L99. | | | | | | | | |
| | | | C | | | Y99Y99.E99E99. | V99V99. | | | | | | | | |
| | | | | | | C99C99. | | | | | | | | | |
| RC | 54 | 18 | LRV | ANY | SHY | L99L99.R99R99. | A99A99.N99N99. | B00B00.B00B00. | 21 | 15 | 10 | 46 | No | No | Yes |
| | | | CYT | MN | TAL | V99V99.C99C99. | Y99Y99.M99M99. | B00B00.T44B00. | | | | | | | |
| | | | R | | VCN | Y99Y99.T99T99. | N99N99. | B00B00.B00B00. | | | | | | | |
| | | | | | V | R99R99. | | B00B00.B00B00. | | | | | | | |
| | | | | | | | | N44B00.V38B00. | | | | | | | |
| RC | 17 | 14 | FLC | ANL | LNM | F99F99.L99L99. | A99A99.N99N99. | B00 | 21 | 15 | 0 | 36 | No | No | Yes |
| | | | CYG | NR | PRD | C99C99.C99C99. | L99L99.N99N99. | | | | | | | | |
| | | | | | | Y99Y99.G99G99. | R99R99. | | | | | | | | |
| | | | | | | I99I99. | | | | | | | | | |
| RC | 117 | 7 | CVI | TPW | MCC | C99C99.V99V99. | T99T99.P99P99. | B00 | 21 | 15 | 0 | 36 | No | No | Yes |
| | | | NYH | VM | AAT | I99199.N99N99. | W99W99.V99V99. | | | | | | | | |
| | | | V | | FWD | Y99Y99.H99H99. | M99M99. | | | | | | | | |
| | | | | | P | V99V99. | | | | | | | | | |
| RC | 83 | 7 | DYG | YPG | LLS | D99D99.Y99Y99. | Y99Y99.P99P99. | B00 | 21 | 15 | 0 | 36 | No | No | Yes |
| | | | YCT | CH | RPK | G99G99.Y99Y99. | G99G99.C99C99. | | | | | | | | |
| | | | F | | RCF | C99C99.T99T99. | H99H99. | | | | | | | | |
| | | | | | VMV | F99F99. | | | | | | | | | |
| | | | | | M | | | | | | | | | | |
| RC | 90 | 6 | IPVF | PGF | NHT | I99I99.P99P99. | P99P99.G99G99. | B00 | 21 | 15 | 0 | 36 | No | No | Yes |
| | | | YCI | NL | L | V99V99.F99F99. | F99F99.N99N99. | | | | | | | | |
| | | | | | | Y99Y99.C99C99. | L99L99. | | | | | | | | |
| | | | | | | I99199. | | | | | | | | | |
| RC | 113 | 5 | TKF | YFL | TPS | T99T99.K99K99. | Y99Y99.F99F99. | T60V40.P60L40. | 21 | 15 | 20 | 56 | No | No | Yes |
| | | | EGL | QH | QVA | F99F99.E99E99. | L99L99.Q99Q99. | S60E40.Q60P40. | | | | | | | |
| | | | V | | SNF | G99G99.L99L99. | H99H99. | V60R40.A60V40. | | | | | | | |
| | | | | | Y | V99V99. | | S60T40.N60I40. | | | | | | | |
| | | | | | | | | F60Y40.Y60D40. | | | | | | | |
| RC | 119 | 5 | IYN | CGV | HYS | I99I99.Y99Y99. | C99C99.G99G99. | H99H99.Y99Y99. | 21 | 15 | 18 | 54 | No | No | Yes |
| | | | CKS | PF | DDP | N99N99.C99C99. | V99V99.P99P99. | S99S99.D99D99. | | | | | | | |
| | | | T | | | K99K99.S99S99. | F99F99. | D99D99.P99P99. | | | | | | | |
| | | | | | | T99T99. | | | | | | | | | |
| RC | 1 | 22616 | TRT | LIFI | TDD | T98B00.R99B00. | L99B00.I99B00. | T99B00.D99B00. | 21 | 15 | 18 | 54 | No | No | No |
| | | | ELR | M | FFN | T98B00.E99B00. | F99B00.I99B00. | D99B00.F99B00. | | | | | | | |
| | | | S | | | L99B00.R99B00. | M98B00. | F99B00.N99B00. | | | | | | | |
| | | | | | | S98B00. | | | | | | | | | |
| RC | 11 | 1623 | SSR | GTG | YLM | S97B00.S99B00. | G99B00.T99T99. | Y99B00.L98B00. | 21 | 15 | 18 | 54 | No | No | No |
| | | | SRF | YE | VTG | R99B00.S99B00. | G99B00.Y99B00. | M98B00.V98B00. | | | | | | | |
| | | | N | | | R99B00.F99B00. | E99B00. | T98B00.G98B00. | | | | | | | |
| | | | | | | N98B00. | | | | | | | | | |
| RC | 3 | 1109 | GNV | FHT | WPI | G99B00.N98B00. | F99B00.H99B00. | W99B00.P99B00. | 21 | 15 | 18 | 54 | No | No | No |
| | | | FLC | CG | LSA | V99B00.F99B00. | T99B00.C99B00. | I99B00.L99B00. | | | | | | | |
| | | | | | | L99B00.C99B00. | G99G99. | S99B00.A99B00. | | | | | | | |
| | | | | | | G99B00. | | | | | | | | | |
| RC | 12 | 845 | SYV | GYA | TIYG | S99B00.Y98B00. | G99B00.Y99B00. | T99B00.I99B00. | 21 | 15 | 18 | 54 | No | No | No |
| | | | NVW | IS | VY | V99B00.N99B00. | A99B00.I99B00. | Y99Y99.G99B00. | | | | | | | |
| | | | G | | | V99B00.W99B00. | S99B00. | V99B00.Y99B00. | | | | | | | |
| | | | | | | G99B00. | | | | | | | | | |
| RC | 13 | 553 | LRS | DVV | MTS | L99B00.R99R99. | D99D99.V99B00. | M99B00.T99B00. | 21 | 15 | 18 | 54 | No | No | No |
| | | | RVIT | SF | EVT | S99B00.R99B00. | V99V99.S99B00. | S99B00.E99B00. | | | | | | | |
| | | | | | | V99V99.I99B00. | F99F99. | V99B00.T99B00. | | | | | | | |
| | | | | | | T99B00. | | | | | | | | | |
| RC | 4 | 416 | ATIY | CQS | IINC | A99B00.T99T99. | C99B00.Q99Q99. | C56F43.I99I99. | 21 | 15 | 14 | 50 | No | No | No |
| | | | IYA | VR | LI | I96B00.Y99B00. | S99B00.V99B00. | N99B00.C56D43. | | | | | | | |
| | | | | | | I99B00.Y99B00. | R99R99. | L56D43.I56V43. | | | | | | | |
| | | | | | | A99B00. | | | | | | | | | |
| RC | 10 | 259 | RP | AYG | PSE | R99R99.P99B00. | A99A99.Y99Y99. | P99P99.S99S99. | 6 | 15 | 18 | 39 | No | No | No |
| | | | | CV | VFE | | G99G99.C98B00. | E99B00.V99V99. | | | | | | | |
| | | | | | | | V99V99. | F99F99.E99E99. | | | | | | | |
| RC | 24 | 254 | DRC | SGL | FLS | D99D99.R97B00. | S99S99.G99B00. | F99B00.L99B00. | 21 | 15 | 18 | 54 | No | No | No |
| | | | GTS | vw | AIE | C99B00.G99G99. | L99L99.V99B00. | S99B00.A97B00. | | | | | | | |
| | | | T | | | T99B00.S99B00. | W99B00. | I99B00.E99B00. | | | | | | | |
| | | | | | | T98B00. | | | | | | | | | |
| RC | 34 | 135 | SVC | YSN | QIN | S95B00.V99V99. | Y99Y99.S99S99. | Q99Q99.I99I99. | 21 | 15 | 18 | 54 | No | No | No |
| | | | YVY | LH | PML | C99C99.Y99Y99. | N99N99.L99L99. | N99N99.P99P99. | | | | | | | |
| | | | G | | | V99V99.Y99B00. | H99H99. | M99M99.L99L99. | | | | | | | |
| | | | | | | G99B00. | | | | | | | | | |
| RC | 35 | 124 | MLT | LRA | FQS | M99B00.L99L99. | L99L99.R99B00. | F99F99.Q99Q99. | 21 | 15 | 18 | 54 | No | No | No |
| | | | LSA | PT | SNL | T99T99.L99L99. | A99A99.P99P99. | S99S99.S99S99. | | | | | | | |
| | | | R | | | S99S99.A99A99. | T99T99. | N99N99.L99L99. | | | | | | | |
| | | | | | | R99R99. | | | | | | | | | |
| RC | 21 | 111 | SSIY | NNL | RIN | S99B00.S99S99. | N99N99.N99N99. | R99B00.I99I99. | 21 | 15 | 18 | 54 | No | No | No |
| | | | VYL | NS | CDL | I98B00.Y99B00. | L99L99.N99N99. | N99N99.C99C99. | | | | | | | |
| | | | | | | V99V99.Y99B00. | S99S99. | D99D99.L99L99. | | | | | | | |
| | | | | | | L99L99. | | | | | | | | | |
| RC | 42 | 86 | ITVV | CCG | PLII | I97B00.T99T99. | C99C99.C99C99. | P98B00.L98B00. | 21 | 15 | 27 | 63 | No | No | No |
| | | | VGS | EP | QGC | V99V99.V99V99. | G99G99.E99E99. | I97B00.P98B00. | | | | | | | |
| | | | | | CY | V97B00.G99G99. | P98B00. | Q98B00.G98B00. | | | | | | | |
| | | | | | | S99S99. | | C97B00.C98B00. | | | | | | | |
| | | | | | | | | Y98B00. | | | | | | | |
| RC | 32 | 76 | RCV | GDG | NPF | R99R99.C99C99. | G99G99.D99D99. | N99N99.P99P99. | 21 | 15 | 30 | 66 | No | No | No |
| | | | IVG | FD | LGR | V99V99.I99I99. | G99G99.F99F99. | F98B00.L99L99. | | | | | | | |
| | | | C | | FAG | V99V99.G99G99. | D99D99. | G98B00.R99R99. | | | | | | | |
| | | | | | T | C99C99. | | F99F99.A99A99. | | | | | | | |
| | | | | | | | | G99G99.T99T99. | | | | | | | |
| RC | 36 | 60 | WM | GNV | SGM | W99W99.M99M99. | G99G99.N99N99. | S99S99.G99G99. | 21 | 15 | 27 | 63 | No | No | No |
| | | | FVL | PN | AWI | F99F99.V99V99. | V99V99.P99P99. | M99M99.A99A99. | | | | | | | |
| | | | SS | | YPI | L98B00.S99S99. | N99N99. | W99W99.I99I99. | | | | | | | |
| | | | | | | S99S99. | | Y99Y99.P99P99. | | | | | | | |
| | | | | | | | | I99I99. | | | | | | | |
| RC | 49 | 55 | HLV | ELS | QPS | H99H99.L99L99. | E99E99.L99L99. | Q99Q99.P99P99. | 21 | 15 | 18 | 54 | No | No | No |
| | | | PVA | RW | CYQ | V99V99.P98B00. | S99S99.R98B00. | S99S99.C99C99. | | | | | | | |
| | | | T | | | V98B00.A96B00. | W99W99. | Y99Y99.Q99Q99. | | | | | | | |
| | | | | | | T98B00. | | | | | | | | | |
| RC | 14 | 42 | LLFT | RAA | PCTI | L99L99.L99L99. | R99R99.A99A99. | P99P99.C99C99. | 12 | 15 | 18 | 45 | No | No | No |
| | | | | PS | SG | F99F99.T99T99. | A99A99.P99P99. | T99T99.I99I99. | | | | | | | |
| | | | | | | | S99S99. | S99S99.G99G99 | | | | | | | |
| RC | 16 | 39 | LAL | IGG | DTM | L99L99.A99A99. | I99I99.G99G99. | D99D99.T99T99. | 21 | 15 | 30 | 66 | No | No | No |
| | | | ARV | CL | PNY | L99L99.A99A99. | G99G99.C99C99. | M97B00.P99P99. | | | | | | | |
| | | | S | | YPM | R97B00.V99V99. | L99L99. | N99N99.Y99Y99. | | | | | | | |
| | | | | | | S99S99. | | I99I99.Y99Y99. | | | | | | | |
| | | | | | | | | P99P99.M99M99. | | | | | | | |
| RC | 60 | 39 | ILVG | VRD | QRS | I97B00.L99L99. | V99V99.R99R99. | Q99Q99.R99R99. | 21 | 15 | 27 | 63 | No | No | No |
| | | | IYW | WS | VFG | V99V99.G99G99. | D99D99.W99W99. | S99S99.V99V99. | | | | | | | |
| | | | | | SSG | I99I99.Y97B00. | S99S99. | F99F99.G99G99. | | | | | | | |
| | | | | | | W99W99. | | S99S99.S99S99. | | | | | | | |
| | | | | | | | | G99G99. | | | | | | | |
| RC | 48 | 32 | NIG | GW | FAS | N90B00.I9999. | G99G99.W99W99. | F96B00.A96B00. | 21 | 15 | 18 | 54 | No | No | No |
| | | | PCM | SSS | VLK | G99G99.P96B00. | S99S99.S99S99. | S96B00.V96B00. | | | | | | | |
| | | | C | | | C99C99.M96B00. | S99S99. | L96B00.K96B00. | | | | | | | |
| | | | | | | C99C99. | | | | | | | | | |
| RC | 26 | 31 | ESQ | SVH | SYL | E99E99.S99S99. | S99S99.V99V99. | S99S99.Y99Y99. | 21 | 15 | 27 | 63 | No | No | No |
| | | | ALR | cc | GYIF | Q99Q99.A99A99. | H99H99.C99C99. | L99L99.G99G99. | | | | | | | |
| | | | V | | PE | L99L99.R99R99. | C99C99. | Y99Y99.I99I99. | | | | | | | |
| | | | | | | V99V99. | | F99F99.P99P99. | | | | | | | |
| | | | | | | | | E99E99. | | | | | | | |
| RC | 44 | 27 | AIG | CCF | NAH | A99A99.I99I99. | C99C99.C99C99. | N99N99.A99A99. | 21 | 15 | 18 | 54 | No | No | No |
| | | | CNG | CS | QYF | G99G99.C99C99. | F99F99.C99C99. | H99H99.Q99Q99. | | | | | | | |
| | | | L | | | N99N99.G99G99. | S99S99. | Y99Y99.F99F99. | | | | | | | |
| | | | | | | L99L99. | | | | | | | | | |
| RC | 104 | 26 | VLK | IFQ | YHG | V99V99.L99L99. | I99I99.F99F99. | Y99Y99.H99H99. | 21 | 15 | 15 | 51 | No | No | No |
| | | | SML | NR | PG | K99K99.S99S99. | Q99Q99N99N99. | G99G99.P99P99. | | | | | | | |
| | | | L | | | M99M99.L99L99. | R99R99. | G99G99. | | | | | | | |
| | | | | | | L99L99. | | | | | | | | | |
| RC | 46 | 23 | DTV | LLS | IINC | D99D99.T99T99. | L99L99.L99L99. | I99I99.I99I99. | 21 | 15 | 18 | 54 | No | No | No |
| | | | YLL | SS | TK | V99V99.Y99Y99. | S99S99.S99S99. | N99N99.C99C99. | | | | | | | |
| | | | V | | | L99L99.L99L99. | S99S99. | T99T99.K99K99. | | | | | | | |
| | | | | | | V99V99. | | | | | | | | | |
| RC | 30 | 21 | PEIS | SYS | FAS | P99P99.E99E99. | S99S99.Y99Y99. | F99F99.A99A99. | 21 | 15 | 18 | 54 | No | No | No |
| | | | LIC | LR | SCC | I95B00.S99S99. | S99S99.L99L99. | S99S99S99S99. | | | | | | | |
| | | | | | | L99L99.I95B00. | R99R99. | C99C99.C99C99. | | | | | | | |
| | | | | | | C99C99. | | | | | | | | | |
| RC | 33 | 20 | CHS | PMG | RMR | C99C99.H99H99. | P99P99.M99M99. | R99R99.M99M99. | 21 | 15 | 39 | 75 | No | No | No |
| | | | GAL | VA | TPC | S95B00.G99G99. | G99G99.V99V99. | R99R99.T99T99. | | | | | | | |
| | | | Y | | LML | A95B00.L99L99. | A99A99. | P99P99.C99C99. | | | | | | | |
| | | | | | SGI | Y95B00. | | L99L99.M99M99. | | | | | | | |
| | | | | | S | | | L99L99.S99S99. | | | | | | | |
| | | | | | | | | G99G99.I99I99. | | | | | | | |
| | | | | | | | | S99S99. | | | | | | | |
| RC | 78 | 20 | PLA | FGD | YIQ | P99P99.L99L99. | F99F99.G99G99. | Y99Y99.I70B00. | 18 | 9 | 14 | 41 | No | No | No |
| | | | TSG | | GAC | A99A99.T99T99. | D95B00. | Q70B00.G70B00. | | | | | | | |
| | | | | | | S99S99.G99G99. | | A99A99.C70B00. | | | | | | | |
| RC | 95 | 20 | YG | IITS | SYL | Y99Y99.G99G99 | I99I99.I99I99. | S99S99.Y99Y99. | 6 | 15 | 18 | 39 | No | No | No |
| | | | | G | NSW | | T99T99.S99S99. | L99L99.N99N99. | | | | | | | |
| | | | | | | | G99G99. | S99S99.W99W99. | | | | | | | |
| RC | 28 | 17 | HNV | MHA | NHT | H99H99.N94B00. | M99M99.H99H99. | N99N99.H99H99. | 21 | 15 | 30 | 66 | No | No | No |
| | | | GVG | QS | DHY | V99V99.G99G99. | A94B00.Q99Q99. | T99T99.D99D99. | | | | | | | |
| | | | T | | IFPS | V99V99.G99G99. | S99S99. | H99H99.Y99Y99. | | | | | | | |
| | | | | | | T99T99. | | I99I99.F99F99. | | | | | | | |
| | | | | | | | | P99P99.S99S99. | | | | | | | |
| RC | 25 | 13 | VCY | ANQ | GPD | V99V99.C99C99. | A99A99.N99N99. | G99G99.P99P99. | 21 | 15 | 30 | 66 | No | No | No |
| | | | TGW | PR | ILSF | Y99Y99.T99T99. | Q99Q99.P99P99. | D99D99.I99I99. | | | | | | | |
| | | | D | | YGC | G99G99.W99W99. | R99R99. | L99L99.S99S99. | | | | | | | |
| | | | | | | D99D99. | | F99F99.Y99Y99. | | | | | | | |
| | | | | | | | | G92B00.C99C99. | | | | | | | |
| RC | 77 | 9 | VLIC | YAV | WPD | V99V99.L99L99. | Y99Y99.A99A99. | W99W99.P99P99. | 21 | 15 | 18 | 54 | No | No | No |
| | | | RTA | RF | CCN | I99I99.C99C99. | V99V99.R99R99. | D99D99.C99C99. | | | | | | | |
| | | | | | | R99R99.T99T99. | F99F99. | C99C99.N99N99. | | | | | | | |
| | | | | | | A99A99. | | | | | | | | | |
| RC | 94 | 9 | VHIT | VPG | SGL | V99V99.H99H99. | V99V99.P99P99. | S99S99.G99G99. | 21 | 15 | 26 | 62 | No | No | No |
| | | | RFV | QR | SFG | I99I99.T99T99. | G99G99.Q99Q99. | L99L99.S99S99. | | | | | | | |
| | | | | | AVR | R99R99.F99F99. | R99R99. | F99F99.G99G99. | | | | | | | |
| | | | | | | V99V99. | | A77B00.V99V99. | | | | | | | |
| | | | | | | | | R99R99. | | | | | | | |
| RC | 50 | 8 | RLR | QYG | PDL | R99R99.L99L99. | Q99Q99.Y99Y99. | P99P99.D99D99. | 12 | 15 | 30 | 57 | No | No | No |
| | | | P | RI | VIYL | R99R99.P99P99. | G99G99.R99R99. | L99L99.V99V99. | | | | | | | |
| | | | | | MPN | | I99I99. | I99I99.Y99Y99. | | | | | | | |
| | | | | | | | | L99L99.M99M99. | | | | | | | |
| | | | | | | | | P99P99.N99N99. | | | | | | | |
| RC | 112 | 7 | IDA | NIR | WIT | I99I99.D99D99. | N99N99.I99I99. | W99W99.I99I99. | 21 | 15 | 18 | 54 | No | No | No |
| | | | HDS | RG | CES | A99A99.H99H99. | R99R99.R99R99. | T99T99.C85B00. | | | | | | | |
| | | | V | | | D99D99.S99S99. | G99G99. | E99E99.S99S99. | | | | | | | |
| | | | | | | V99V99. | | | | | | | | | |
| RC | 114 | 6 | VLS | VGA | TFS | V99V99.L83B00. | V99V99.G99G99. | T99T99.F99F99. | 21 | 5 | 18 | 54 | No | No | No |
| | | | SEF | GW | TRY | S99S99.S99S99. | A99A99.G99G99. | S99S99.T99T99. | | | | | | | |
| | | | T | | | E99E99.F99F99. | W99W99. | R99R99.Y99Y99. | | | | | | | |
| | | | | | | T83B00. | | | | | | | | | |
| RC | 120 | 6 | DMY | MFS | YGS | D83B00.M99M99. | M99M99.F99F99. | Y99Y99.G99G99. | 21 | 15 | 30 | 66 | No | No | No |
| | | | GSL | DI | TMT | Y99Y99.G99G99. | S99S99.D99D99. | S99S99.T99T99. | | | | | | | |
| | | | T | | GCH | S99S99.L99L99. | I99I99. | M99M99.T99T99. | | | | | | | |
| | | | | | C | T99T99. | | G99G99.C99C99. | | | | | | | |
| | | | | | | | | H99H99.C99C99. | | | | | | | |
| RC | 103 | 5 | NMV | NWL | ALL | N99N99.M99M99. | N99N99.W99W99. | A99A99.L80B00. | 21 | 12 | 14 | 47 | No | No | No |
| | | | YMK | H | VRE | V99V99.Y99Y99. | L99L99.H99H99. | L99L99.V80B00. | | | | | | | |
| | | | H | | | M99M99.K99K99. | | R80B00.E80B00. | | | | | | | |
| | | | | | | H99H99. | | | | | | | | | |
| RC | 109 | 5 | SDT | YFR | ITF | S99S99.D99D99. | Y99Y99.F99F99. | I99I99.T99T99. | 21 | 15 | 9 | 45 | No | No | No |
| | | | VGL | HS | | T99T99V99V99. | R99R99.H99H99. | F99F99. | | | | | | | |
| | | | V | | | G99G99.L99L99. | S99S99. | | | | | | | | |
| | | | | | | V99V99. | | | | | | | | | |
| RC | 38 | 5 | NCN | RSP | WPD | N99N99.C99C99. | R99R99.S99S99. | W99W99.P99P99. | 21 | 15 | 18 | 54 | No | No | No |
| | | | RVIS | QV | CIV | N99N99.R99R99. | P99P99.Q99Q99. | D99D99.C99C99. | | | | | | | |
| | | | | | | V99V99.I99I99. | V99V99. | I99I99.V99V99. | | | | | | | |
| | | | | | | S99S99. | | | | | | | | | |
| RC | 57 | 5 | VSG | DFC | FLS | V99V99.S99S99. | D99D99.F99F99. | F99F99.L99L99. | 21 | 15 | 18 | 54 | No | No | No |
| | | | FRA | TG | CDA | G99G99.F99F99. | C99C99.T99T99. | S99S99.C99C99. | | | | | | | |
| | | | C | | | R99R99.A99A99. | G99G99. | D99D99.A99A99. | | | | | | | |
| | | | | | | C99C99. | | | | | | | | | |
| RC | 80 | 5 | FDA | VYY | KDM | F99F99.D99D99. | V99V99.Y99Y99. | K99K99.D99D99. | 21 | 15 | 9 | 45 | No | No | No |
| | | | AQA | VA | | A99A99.A99A99. | Y99Y99.V99V99. | M99M99. | | | | | | | |
| | | | W | | | Q99Q99.A99A99. | A99A99. | | | | | | | | |
| | | | | | | W99W99. | | | | | | | | | |

[0054] Applicants also identified amino acid changes that improve potency of the antibodies (see, e.g., FIG. 8). The present invention provides for CDRs and/or framework substitutions that increase potency (e.g., binding and/or neutralizing activity) of the antibodies. In certain embodiments, the VHH frameworks have 80, 85, 90, 95, 96, 97, 98, or 99% identity with the sequences described herein. In certain embodiments, antibodies are generated using one or more of the mutated CDR sequences and/or framework sequences described herein. Applicants specifically identified mutated antibodies having enhanced neutralizing activity (Table 9).

TABLE 9
Amino acid sequences of VHH variants and the mutations they contain.
Amino acid sequences of all VHH variants characterized in this study.

| Variant | | |
|---|---|---|
| Name | Sequence (SEQ ID NOS: 5811-5872) | Contained mutations |
| SR1 | EVQLVESGGGLVQAGDSLRLSCAASGKTGRSVIMGWFRQAPDKEREFVATITRGDDTTNY | NA |
| | ADSVKGRFTISRDDARNTVYLQMNSLKPEDTAVYYCAAVYFVNDCIVDYWGQGTQVTVSS | |
| SR1t2 | EVRLVESGGGLVLAGDSLRLSCAASGKTGRSVIMGWFRQAPDKEREFVATITRGDDTTNY | Q.3.R, Q.13.L |
| | ADSVKGRFTISRDDARNTVYLQMNSLKPEDTAVYYCAAVYFVNDCIVDYWGQGTQVTVSS | |
| SR2 | EVQLVESGGGLVQAGDSLRLSCAASGAFGSNVFMGWFRQAPGKEREFVASITPHHTVTDY | NA |
| | ADSVRGRFSISADSAKNTVYLQMNSLKPEDTAVYYCAAAIYRNASVLDYWGQGTQVTVSS | |
| SR2c3 | EVQLVESGGGLVQAGDSLRLSCAASGAFSSNVFMGWFRQAPGKEREFVASITPHHAVTDY | G.29.S, T.56.A, S.105.T |
| | ADSVRGRFSISADSAKNTVYLQMNSLKPEDTAVYYCAAAIYRNATVLDYWGQGTQVTVSS | |
| SR2c4 | EVQLVESGGGLVQAGDSLRLSCAASGAFSSNVFMGWFRQAPGKEREFVASITPHHAVTDY | G.29.S, T.56.A, R.102.C, S.105.T |
| | ADSVRGRFSISADSAKNTVYLQMNSLKPEDTAVYYCAAAIYCNATVLDYWGQGTQVTVSS | |
| SR2f3 | QVQLVESGGGLVQAGDSLRLSCAASGAFGSNVFMGWFRLAPGKEREFVASITPHHTVTDY | E.1.Q, Q.39.L, S.74.T |
| | ADSVRGRFSISADTAKNTVYLQMNSLKPEDTAVYYCAAAIYRNASVLDYWGQGTQVTVSS | |
| SR2t5 | QVQLVESGGGLVQAGDSLRLSCAASGAFSSNVFMGWFRQAPGKEREFVASITPHHAVTDY | G.29.S, T.56.A, S.105.T, E.1.Q, |
| | ADSVRGRFSISADTAKNTVYLQMNSLKPEDTAVYYCAAAIYRNATVLDYWGQGTQVTVSS | S.74.T |
| SR2t9 | QVQLVESGGGLVQAGDSLRLSCAATGAFSSNVFMGWFRLAPGKEREFVASITPHHAVTDY | E.1.Q, S.25.T, G.29.S, Q.39.L, |
| | ADSVRGRFSISADTAKNTVYLQMNALKPEDTAVYYCAAAIYCNATVLDYWGQGTQVTVSS | T.56.A, S.74.T, S.85.A, R.102.C, |
| | | S.105.T |
| SR4 | EVQLVESGGGLVQAGDSLRLSCAASGFQLSCYCMGWFRQAPGKEREFVASITQHAFRTYY | NA |
| | ADSVKGRFTISRDDARNTVYLQMNSLKPEDTAVYYCAAAETPNILVYENYWGQGTQVTVS | |
| | S | |
| SR4c1 | EVQLVESGGGLVQAGDSLRLSCAASGFQLSCYCMGWFRQAPGKEREFVASITQHAFRTYY | Y.107.H |
| | ADSVKGRFTISRDDARNTVYLQMNSLKPEDTAVYYCAAAETPNILVHENYWGQGTQVTVS | |
| | S | |
| SR4f3 | EVQLVVSGRGLVQAGDSLRLSCAASGFQLSCYCVGWFRQAPGKEREFVASITQHAFRTYY | E.6.V, G.9.R, M.34.V |
| | ADSVKGRFTISRDDARNTVYLQMNSLKPEDTAVYYCAAAETPNILVYENYWGQGTQVTVS | |
| | S | |
| SR4t4 | EVQLVVSGRGLVQAGDSLRLSCAASGFQLSCYCVGWFRQAPGKEREFVASITQHAFRTYY | Y.107.H, E.6.V, G.9.R, M.34.V |
| | ADSVKGRFTISRDDARNTVYLQMNSLKPEDTAVYYCAAAETPNILVHENYWGQGTQVTVS | |
| | S | |
| SR4t5 | EVQLVVSGRVLVQAGDSLRLSCAASGFQLSCYCVGWFRQAPGKEREFVASITQHAFRTYY | Y.107.H, E.6.V, G.9.R, M.34.V, |
| | ADSVKGRFTISRDDARNTVYLQMNSLKPEDTAVYYCAAAETPNILVHENYWGQGTQVTVS | G.10.V |
| | S | |
| SR4t6 | EVQLVVSGRVLVQAGDSLRLSCAASGFQLSCYCVGWFRQAPGKEREFVASITQHAFRTYY | Y.107.H, E.6.V, G.9.R, M.34.V, |
| | ADSVKGRFTISRDDARNTVYLQMNSLKPEDTAVYYCAAAETPNILVHESYWGQGTQVTVS | G.10.V, N.109.S |
| | S | |
| SR4t9 | KVQLVVSGRVLVQAGDSLRLSCAATGFQLSCYCVGWFRQAPGKELEFVASITQHAFRTYY | E.6.V, G.9.R, M.34.V, G.10.V, |
| | ADSVKGRFTISRDDARNTVYLQMNSLKPEDTAVYYCAAAETPNILVHESYWGQGTQVTVS | N.109.S, R.45.L, S.25.T, Y.107.H, |
| | S | E.1.K |
| SR4t13 | KVQLVVTGRVLVQAGDSLRLSCVATGFQLSCYCVGWFRQAPGKELEFVASITQHAFRTYY | E.1.K, E.6.V, S.7.T, G.9.R, |
| | ADSVKGRFTISRDDAQNTVYLQMNSLEPEDTAVYYCAAAETPNILVHESYWGQGTQVTVS | G.10.V, A.23.V, S.25.T, M.34.V, |
| | S | R.45.L, R.76.Q, K.87.E, Y.107.H, |
| | | N.109.S |
| SR6 | EVQLVESGGGLVQAGDSLRLSCAASGDCHVLWRMGWFRQAPGKEREFVAAISLDGLFTNY | NA |
| | ADSVRGRFSISADSAKNTVYLQMNSLKPEDTAVYYCAAMPFFDYWGQGTQVTVSS | |
| SR6c3 | EVQLVESGGGLVQAGDSLRLSCAASGDCHVLWRMGWFRQAPGKEREFVAAISLDGQFTNY | L.56.Q, M.99.L, F.102.L |
| | ADSVRGRFSISADSAKNTVYLQMNSLKPEDTAVYYCAALPFLDYWGQGTQVTVSS | |
| SR6f3 | QVQLVVSGGGLVQAGDSLRLSCAASGDCHVLWRMGWFRQAPGKEREFVAAISLDGLFTNY | E.1.Q, E.6.V, K.76.E |
| | ADSVRGRFSISADSAENTVYLQMNSLKPEDTAVYYCAAMPFFDYWGQGTQVTVSS | |
| SR6t4 | QVQLVESGGGLVQAGDSLRLSCAASGDCHVLWRMGWFRQAPGKEREFVAAISLDGQFTNY | L.56.Q, M.99.L, F.102.L, E.1.Q |
| | ADSVRGRFSISADSAKNTVYLQMNSLKPEDTAVYYCAALPFLDYWGQGTQVTVSS | |
| SR6t5 | QVQLVVSGGGLVQAGDSLRLSCAASGDCHVLWRMGWFRQAPGKEREFVAAISLDGQFTNY | L.56.Q, M.99.L, F.102.L, E.1.Q, |
| | ADSVRGRFSISADSAKNTVYLQMNSLKPEDTAVYYCAALPFLDYWGQGTQVTVSS | E.6.V |
| SR6t6 | QVQLVVSGGGLVQAGDSLRLSCAASGDCHVLWRMGWFRQAPGKEREFVAAISLDGQFTNY | L.56.Q, M.99.L, F.102.L, E.1.Q, |
| | ADSVRGRFSISADSAENTVYLQMNSLKPEDTAVYYCAALPFLDYWGQGTQVTVSS | E.6.V, K.76.E |
| SR6t9 | QVQLVVSGGGLVQAGDSLRLSCTASGDCHVLWRMGWFRQAPGKELEFVAAISLDGQFANY | E.1.Q, E.6.V, F.102.L, K.76.E, |
| | ADSVRGRFSISADSAENTVYLQMNSLKPEDTAVYYCAALPFLDYWGQGTQVTVSS | R.45.L, M.99.L, A.23.T, T.58.A, |
| | | L.56.Q |
| SR6t12 | QVQLVVSGGGLVRAGDSLRLSCTASGDCHVLWRMGWFRQASGKELEFVAAISLDGQFANY | E.1.Q, E.6.V, Q.13.R, A.23.T, |
| | ADSVRGRFSISADSAENTVYLQMNSLEPEDTAVYYCAALPFLDYWGQGTQVTVSS | P.41.S, R.45.L, L.56.Q, T.58.A, |
| | | K.76.E, K.87.E, M.99.L, F.102.L |
| SR8 | EVQLVESGGGLVQAGDSLRLSCAASGDYCMDCFMGWFRQAPGKEREFVAAITPYSFKTYY | NA |
| | ADSVKGRFTISRDDARNTVYLQMNSLKPEDTAVYYCAANPLDPNWTNSDYWGQGTQVTVS | |
| | S | |
| SR8c2 | EVQLVESGGGLVQAGDSLRLSCAASGDYCMDCFMGWFRQAPGKEREFVAAITPYGFKTYY | S.55.G, N.107.H |
| | ADSVKGRFTISRDDARNTVYLQMNSLKPEDTAVYYCAANPLDPNWTHSDYWGQGTQVTVS | |
| | S | |
| SR8t5 | EVQLVESGGGLVQAGDSLRLSCAASGDYCMDCFMGWFRQAPGKEREFVAAITPYGFKTYY | S.55.G, N.107.H, W.111.R, K.87.R, |
| | ADSVKGRFTFSRDDARNTVYLQMNSLRPEDTAVYYCAANPLDPNWTHSDYRGQGTQVTVS | I.70.F |
| | S | |
| SR12 | EVQLVESGGGLVQAGDSLRLSCAASGAIVHVFAMGWFRQAPGKEREFVASINLDNDATNY | NA |
| | ADSVKGRFTISRDDARNTVYLQMNSLKPEDTAVYYCNATIFMDSDLGDYWGQGTQVTVSS | |
| SR12c3 | EVQLVESGGGLVQAGDSLRLSCAASGAIVHVFAMGWFRQAPGKEREFVASINLDNDVTNY | A.57.V, M.102.T, D.105.G |
| | ADSVKGRFTISRDDARNTVYLQMNSLKPEDTAVYYCNATIFTDSGLGDYWGQGTQVTVSS | |
| SR12c5 | EVQLVESGGGLVQAGDSLRLSCAASGAIVHVFAMGWFRQAPGKEREFVASINLDNDVTNY | A.57.V, F.101.L, M.102.T, |
| | ADSVKGRFTISRDDARNTVYLQMNSLKPEDTAVYYCNATILTVSGLGDYWGQGTQVTVSS | D.103.V, D.105.G |
| SR12f3 | QVQLVVSGGGLVQAGDSLRLSCAASGAIVHVFAMGWFRQAPGKEREFVASINLDNDATNY | E.1.Q, E.6.V, Q.112.R |
| | ADSVKGRFTISRDDARNTVYLQMNSLKPEDTAVYYCNATIFMDSDLGDYWGRGTQVTVSS | |
| SR12t6 | QVQLVVSGGGLVQAGDSLRLSCAASGAIVHVFAMGWFRQAPGKEREFVASINLDNDVTNY | A.57.V, M.102.T, D.105.G, E.1.Q, |
| | ADSVKGRFTISRDDARNTVYLQMNSLKPEDTAVYYCNATIFTDSGLGDYWGRGTQVTVSS | E.6.V, Q.112.R |
| SR12t9 | QVQLVVSGRGLVQAGDSLRLSCVASGAIVHVFAMGWFRQAPGEEREFVASINLDNDATIY | E.1.Q, E.6.V, M.102.T, Q.112.R, |
| | ADSVKGRFTISRGDARNTVYLQMNSLKPEDTAVYYCNATIFTDSDLGDYWGRGTQVTVSS | G.9.R, D.73.G, K.43.E, A.23.V, |
| | | N.59.1 |
| SR15 | EVQLVESGGGLVQAGDSLRLSCAASGIGERCLFMGWFRQAPGKEREFVAAITAFSFRTYY | NA |
| | ADSVKGRFTISRDDARNTVYLQMNSLKPEDTAVYYCAALDTAALFPEFDYWGQGTQVTVS | |
| | S | |
| SR16 | EVQLVESGGGLVQAGDSLRLSCAASTFKLPCLMGWFRQTPGKEREFVAAISDHGGRTDYA | NA |
| | DSVKGRFTISRDDARNTVYLQMNSLKPEDTAVYYCNAVFIVKYEEELLVEAYWGQGTQVT | |
| | VSS | |
| SR17 | QVQLQESGGGLVQVGGSLRLSCTASGIWMGTRVMGWFRQAPGKEREFVATINGCYGTTDY | NA |
| | ADSVKGRFTISRDDARNTVYLQMNSLKPEDTAVYYCAALTRPPFDPLWDYWGQGTQVTVS | |
| | S | |
| SR18 | EVQLVESGGGLVQAGDSLRLSCAASGIMIGTQSMGWFRQAPGKEREFVASITANEMFTYY | NA |
| | ADSVRGRFSISADSAKNIVYLQMNSLKPEDTAVYYCAAITAMGWDYWGQGTQVTVSS | |
| SR19 | EVQLVESGGGLVQAGDSLRLSCAASGALCRRVYMGWFRQAPGKEREFVAAITCAGWRTDY | NA |
| | ADSVKGRFTISRDDARNTVYLQMNSLKPEDTAVYYCNAAVFASDGNVVGYWGQGTQVTVS | |
| | S | |
| SR20 | EVQLVESGGGLVQAGDSLRLSCAASGLCLSVLAMGWFRQAPGKEREFVAAINGSAAATYY | NA |
| | ADSVKGRFTISRDDARNTVYLQMNSLKPEDTAVYYCNAWLLTYSHDVMDYWGQGTQVTVS | |
| | S | |
| SR21 | QVQLQESGGGLVQAGDSLRLSCAASGRARGKVFMGWFRQAPGKEREFVASISCSGVDTNY | NA |
| | ADSVRGRFSISADSAKNTVYLQMNSLKPEDTAVYYCAAIFYDRTDRLSEYWGQGTQVTVS | |
| | S | |
| SR22 | EVQLVESGGGLVQAGDSLRLSCAASGTVIPYSMGWYRQAPGKEREFVAAINCMFLHTYYA | NA |
| | DSVKGRFTISRDDARNTVYLQMNSLKPEDTAVYYCNAPVPIPEESITDYWGQGTQVTVSS | |
| SR23 | EVQLVESGGGLVQAGDSLRLSCAASGSCIRWLSMGWFRQAPGKEREFVASITEYVKFTDY | NA |
| | ADSVRGRFSISADSAKNTVYLQMNSLKPEDTAVYYCAALENPHIASKYDYWGQGTQVTVS | |
| | S | |
| SR24 | EVQLVESGGGLVQAGDSLRLSCAASGIYLEAYGMGWFRQAPGKEREFVASISLYSFRTYY | NA |
| | ADSVKGRFTISRDDARNTVYLQMNSLKPEDTAVYYCAALQPTPSGWREAYWGQGTQVTVS | |
| | S | |
| SR25 | EVQLVESGGGLVQAGDSLRLSCAASGRLMNEVFMGWFRQAPGKEREFVASINRSAGTTDY | NA |
| | ADSVKGRFTISRDNAKNTVYLQMNSLKPEDTAVYYCAAAFYISFMVYDYWGQGTQVTVSS | |
| SR26 | EVQLVESGGGLVQAGDSLRLSCAASGLESLCGMGWFRQAPGKEREFVASISVGAIRTYYA | NA |
| | DSVRGRFSISADSAKNTVYLQMNSLKPEDTAVYYCAAWNYDCLGISDYWGQGTQVTVSS | |
| SR27 | EVQLVESGGGLVQAGDSLRLSCAASGGLHLALTMGWFRQAPGKEREFVASISQVLKVTNY | NA |
| | ADSVKGRFTISRDDARNTVYLQMNSLKPEDTAVYYCAAQILSHFDIVSGYWGQGTQVTVS | |
| | S | |
| SR28 | EVHLVESGGGLVQAGDSLRLSCAASGHARCSVIMGWFRQAPGKEREFVASINLAESVTYY | NA |
| | ADSVKGRFTISRDNAKNTVYLQMNSLKPEDTAVYYCAAVLPAMRLRYDYWGQGTQVTVSS | |
| SR29 | EVQLVESGGGLVQAGDSLRLSCAASGRADIYWMMGWFRQAPGKEREFVATINWRTSDTYY | NA |
| | ADSVRGRFSISADSAKNTVYLQMNSLKPEDTAVYYCNAVYLAGGVGYDSWGQGTQVTVSS | |
| SR30 | QVQLQESGGGLVQAGGSLRLSCAASGALSCGVFMGWFRQAPGKEREFVAAISGLGVDTDY | NA |
| | ADSVKGRFTISRDDARNTVYLQMNSLKPEDTAVYYCARAFFSSTGTVENYWGQGTQVTVS | |
| | S | |
| SR31 | EVQLVESGGGLVQAGDSLRLSCAASGFASDLCFMGWFRQAPGKEREFVATINCLGWTNYV | NA |
| | DSVKGRFTISRDDARNTVYLQMNSLKPEDTAVYYCAAYSHDLNSVVRDYWGQGTQVTVSS | |
| SR32 | EVQLVESGGGLVQAGDSLRLSCAASGFEQFDWRMGWYRQAPGKEREFVAAISSAYSTTNY | NA |
| | ADSVKGRFTISRDDARNTVYLQMNSLKPEDTAVYYCNAGTFLEDYFYRNYWGQGTQVTVS | |
| | S | |
| SR33 | EVQLVESGGGLVQAGDSLRLSCAASGNWSCVFQMGWFRQAPGKEREFVAAITQSPAVTDY | NA |
| | ADSVKGRFTISRDNAKNTVYLQMNSLKPEDTAVYYCAALACSLTGICNYWGQGTQVTVSS | |
| SR34 | EVQLVESGGGLVQAGDSLRLSCAASGRSHDCINMGWFRQAPGKEREFVAAINGFPIITYY | NA |
| | ADSVKGRFTISRDDARNTVYLQMNSLKPEDTAVYYCNAPVVLRRNIINYWGQGTQVTVSS | |
| SR35 | QVQLQESGGGLVQAGGSLRLSCAASGVSFHVFYMGWFRQAPGKEREFVASINNSGTHTYY | NA |
| | ADSVRGRFSISADSAKNTVYLQMNSLKLEDTAVYYCNAVSIVQGTTGDSWGQGTQVTVSS | |
| SR36 | EVQLVESGGGLVQAGDSLRLSCAASGGHWCSLTMGWFRQAPGKERELVAAINLAQYGTYY | NA |
| | ADSVKGRFTISRDDARNTVYLQMNSLKPEDTAVYYCAAAYATYNLDRGYSMGYWGQGTQV | |
| | TVSS | |
| SR37 | EVQLVESGGGLVQAGGSLRLSCAASGNPDPCVVMGWFRQAPGKEREFVASITAYSAVTYY | NA |
| | ADSVKGRFTISRDNAKNTVYLQMNSLKPEDTAVYYCAATYVSHPCHLYDYWGQGTQVTVS | |
| | S | |
| SR38 | EVQLVESGGGLVQAGDSLRLSCAASGSLYAVVWMGWFRQAPGKEREFVATISLCGYDTYY | NA |
| | ADSVKGRFTISRDDAHNTVYLQMNSLKPEDTAVYYCAVTCFVNHMKISEYWGQGTQVTVS | |
| | S | |
| SR6v1 | EVQLVESGGGLVQAGDSLRLSCAASGDSHVLWRMGWFRQAPGKEREFVAAISLDGQFTNY | C.28.S |
| | ADSVRGRFSISADSAKNTVYLQMNSLKPEDTAVYYCAALPFLDYWGQGTQVTVSS | |
| SR6v7 | EVQLVESGGGLVQAGDSLRLSCAASGDSYILWRMGWFRQAPGKEREFVAAISLDGQFTNY | C.28.S, H.29.Y, V.30.I |
| | ADSVRGRFSISADSAKNTVYLQMNSLKPEDTAVYYCAALPFLDYWGQGTQVTVSS | |
| SR6v9 | EVQLVESGGGLVQAGDSLRLSCAASGDSHVLWRMGWFRQAPGKEREFVAAISLDGQFTNY | C.28.S, N.77.Y |
| | ADSVRGRFSISADSAKYTVYLQMNSLKPEDTAVYYCAALPFLDYWGQGTQVTVSS | |
| SR6v10 | EVQLVESGGGLVQAGDSLRLSCAASGDSHVLWRMGWFRQAPGKELEFVAAISLDGQFTNY | C.28.S, R.45.L |
| | ADSVRGRFSISADSAKNTVYLQMNSLKPEDTAVYYCAALPFLDYWGQGTQVTVSS | |
| SR6v15 | EVQLVESGGGLVQAGDSLRLSCAASGDSYILWRMGWFRQAPGKEREFVAAISLDGQFTNY | C.28.S, N.77.Y, H.29.Y, V.30.I |
| | ADSVRGRFSISADSAKYTVYLQMNSLKPEDTAVYYCAALPFLDYWGQGTQVTVSS | |

[0055] In certain embodiments, antibodies prepared according to the present invention are substantially free of non-antibody protein. As used herein, a preparation of antibody protein having less than about 50% of non-antibody protein (also referred to herein as a “contaminating protein”), or of chemical precursors, is considered to be “substantially free.” 40%, 30%, 20%, 10% and more preferably 5% (by dry weight), of non-antibody protein, or of chemical precursors is considered to be substantially free. When the antibody protein or biologically active portion thereof is recombinantly produced, it is also preferably substantially free of culture medium, i.e., culture medium represents less than about 30%, preferably less than about 20%, more preferably less than about 10%, and most preferably less than about 5% of the volume or mass of the protein preparation.

[0056] In preferred embodiments, the antibodies of the present invention are monoclonal antibodies. As used herein, the term “monoclonal antibody” refers to a single antibody produced by any means, such as recombinant DNA technology. As used herein, the term “monoclonal antibody” also refers to an antibody derived from a clonal population of antibody-producing cells (e.g., B lymphocytes or B cells) which is homogeneous in structure and antigen specificity. The term “polyclonal antibody” refers to a plurality of antibodies originating from different clonal populations of antibody-producing cells which are heterogeneous in their structure and epitope specificity but which recognize a common antigen. Monoclonal and polyclonal antibodies may exist within bodily fluids, as crude preparations, or may be purified, as described herein.

[0057] The term “binding portion” of an antibody (or “antibody portion”) includes one or more complete domains, e.g., a pair of complete domains, as well as fragments of an antibody that retain the ability to specifically bind to a target molecule. It has been shown that the binding function of an antibody can be performed by fragments of a full-length antibody. Binding fragments are produced by recombinant DNA techniques, or by enzymatic or chemical cleavage of intact immunoglobulins. Binding fragments include Fab, Fab′, F(ab′)2, Fabc, Fd, dAb, Fv, single chains, VHH, single-chain antibodies, e.g., scFv, and single domain antibodies.

[0058] In certain embodiments, “humanized” forms of non-human antibodies contain amino acid residues in frame regions that resemble human antibody frame regions. In certain embodiments, frame regions of camelid antibodies or heavy chain antibodies are modified. In certain embodiments, humanized residues can be found in any human IGHV gene. In certain embodiments, the humanized residues are located in frame 2 or frame 4. In preferred embodiments, the humanized residues are located in frame 2 position 4, frame 2 position 11, frame 2 position 12, frame 2 position 14, frame 4 position 8. Humanized frames can be based on well characterized VHHs (Kirchhofer et al., 2010; Turner et al., 2014). These frames share high homology with the human IGHV3-23 or IGHJ4, but can be altered further as described herein (e.g., Frames 2 and 4).

[0059] In certain embodiments, “humanized” forms of non-human antibodies are chimeric antibodies that contain minimal sequence derived from non-human immunoglobulin (e.g., camelid). For the most part, humanized antibodies are human immunoglobulins (recipient antibody) in which residues from a hypervariable region of the recipient are replaced by residues from a hypervariable region of a non-human species (donor antibody) such as mouse, rat, rabbit or nonhuman primate having the desired specificity, affinity, and capacity. In some instances, FR residues of the human immunoglobulin are replaced by corresponding non-human residues. Furthermore, humanized antibodies may comprise residues that are not found in the recipient antibody or in the donor antibody. These modifications are made to further refine antibody performance. In general, the humanized antibody will comprise substantially all of at least one, and typically two, variable domains, in which all or substantially all of the hypervariable regions correspond to those of a non-human immunoglobulin and all or substantially all of the FR regions are those of a human immunoglobulin sequence. The humanized antibody optionally also will comprise at least a portion of an immunoglobulin constant region (Fc), typically that of a human immunoglobulin.

[0060] Examples of portions of antibodies or epitope-binding proteins encompassed by the present definition include: (i) the Fab fragment, having VL, CL, VH and CH1 domains; (ii) the Fab′ fragment, which is a Fab fragment having one or more cysteine residues at the C-terminus of the CH1 domain; (iii) the Fd fragment having VH and CH1 domains; (iv) the Fd′ fragment having VH and CH1 domains and one or more cysteine residues at the C-terminus of the CHI domain; (v) the Fv fragment having the VL and VH domains of a single arm of an antibody; (vi) the dAb fragment (Ward et al., 341 Nature 544 (1989)) which consists of a VH domain or a VL domain that binds antigen; (vii) isolated CDR regions or isolated CDR regions presented in a functional framework; (viii) F(ab′)2 fragments which are bivalent fragments including two Fab′ fragments linked by a disulphide bridge at the hinge region; (ix) single chain antibody molecules (e.g., single chain Fv; scFv) (Bird et al., 242 Science 423 (1988); and Huston et al., 85 PNAS 5879 (1988)); (x) “diabodies” with two antigen binding sites, comprising a heavy chain variable domain (VH) connected to a light chain variable domain (VL) in the same polypeptide chain (see, e.g., EP 404,097; WO 93/11161; Hollinger et al., 90 PNAS 6444 (1993)); (xi) “linear antibodies” comprising a pair of tandem Fd segments (VH-Ch1-VH-Ch1) which, together with complementary light chain polypeptides, form a pair of antigen binding regions (Zapata et al., Protein Eng. 8(10):1057-62 (1995); and U.S. Pat. No. 5,641,870).

[0061] In certain embodiments, the antibodies and CDRs of the present invention can be transferred to another antibody type (e.g., to the heavy chain of antibodies having heavy and light chains) to generate chimeric antibodies. It is intended that the term “antibody type” encompass any Ig class or any Ig subclass (e.g. the IgG1, IgG2, IgG3, and IgG4 subclasses of IgG) obtained from any source (e.g., humans and non-human primates, and in rodents, lagomorphs, caprines, bovines, equines, ovines, etc.).

[0062] The term “Ig class” or “immunoglobulin class”, as used herein, refers to the five classes of immunoglobulin that have been identified in humans and higher mammals, IgG, IgM, IgA, IgD, and IgE. The term “Ig subclass” refers to the two subclasses of IgM (H and L), three subclasses of IgA (IgA1, IgA2, and secretory IgA), and four subclasses of IgG (IgG1, IgG2, IgG3, and IgG4) that have been identified in humans and higher mammals. The antibodies can exist in monomeric or polymeric form; for example, IgM antibodies exist in pentameric form, and IgA antibodies exist in monomeric, dimeric or multimeric form.

[0063] The term “IgG subclass” refers to the four subclasses of immunoglobulin class IgG-IgG1, IgG2, IgG3, and IgG4 that have been identified in humans and higher mammals by the heavy chains of the immunoglobulins, V1-γ4, respectively. The term “single-chain immunoglobulin” or “single-chain antibody” (used interchangeably herein) refers to a protein having a two-polypeptide chain structure consisting of a heavy and a light chain, said chains being stabilized, for example, by interchain peptide linkers, which has the ability to specifically bind antigen. The term “domain” refers to a globular region of a heavy or light chain polypeptide comprising peptide loops (e.g., comprising 3 to 4 peptide loops) stabilized, for example, by β pleated sheet and/or intrachain disulfide bond. Domains are further referred to herein as “constant” or “variable”, based on the relative lack of sequence variation within the domains of various class members in the case of a “constant” domain, or the significant variation within the domains of various class members in the case of a “variable” domain. Antibody or polypeptide “domains” are often referred to interchangeably in the art as antibody or polypeptide “regions”. The “constant” domains of an antibody light chain are referred to interchangeably as “light chain constant regions”, “light chain constant domains”, “CL” regions or “CL” domains. The “constant” domains of an antibody heavy chain are referred to interchangeably as “heavy chain constant regions”, “heavy chain constant domains”, “CH” regions or “CH” domains). The “variable” domains of an antibody light chain are referred to interchangeably as “light chain variable regions”, “light chain variable domains”, “VL” regions or “VL” domains). The “variable” domains of an antibody heavy chain are referred to interchangeably as “heavy chain constant regions”, “heavy chain constant domains”, “VH” regions or “VH” domains).

[0064] The term “region” can also refer to a part or portion of an antibody chain or antibody chain domain (e.g., a part or portion of a heavy or light chain or a part or portion of a constant or variable domain, as defined herein), as well as more discrete parts or portions of said chains or domains. For example, light and heavy chains or light and heavy chain variable domains include “complementarity determining regions” or “CDRs” interspersed among “frame regions” or “FRs”, as defined herein.

[0065] The term “conformation” refers to the tertiary structure of a protein or polypeptide (e.g., an antibody, antibody chain, domain or region thereof). For example, the phrase “light (or heavy) chain conformation” refers to the tertiary structure of a light (or heavy) chain variable region, and the phrase “antibody conformation” or “antibody fragment conformation” refers to the tertiary structure of an antibody or fragment thereof.

[0066] “Specific binding” of an antibody means that the antibody exhibits appreciable affinity for a particular antigen or epitope and, generally, does not exhibit significant cross reactivity. “Appreciable” binding includes binding with an affinity of at least 25 μM. Antibodies with affinities greater than 1×10⁷ M⁻¹ (or a dissociation coefficient of 1 μM or less or a dissociation coefficient of 1 nm or less) typically bind with correspondingly greater specificity. Values intermediate of those set forth herein are also intended to be within the scope of the present invention and antibodies of the invention bind with a range of affinities, for example, 100 nM or less, 75 nM or less, 50 nM or less, 25 nM or less, for example 10 nM or less, 5 nM or less, 1 nM or less, or in embodiments 500 pM or less, 100 pM or less, 50 pM or less or 25 pM or less. An antibody that “does not exhibit significant crossreactivity” is one that will not appreciably bind to an entity other than its target (e.g., a different epitope or a different molecule). For example, an antibody that specifically binds to a target molecule will appreciably bind the target molecule but will not significantly react with non-target molecules or peptides. An antibody specific for a particular epitope will, for example, not significantly crossreact with remote epitopes on the same protein or peptide. Specific binding can be determined according to any art-recognized means for determining such binding. Preferably, specific binding is determined according to Scatchard analysis and/or competitive binding assays.

[0067] As used herein, the term “affinity” refers to the strength of the binding of a single antigen-combining site with an antigenic determinant. Affinity depends on the closeness of stereochemical fit between antibody combining sites and antigen determinants, on the size of the area of contact between them, on the distribution of charged and hydrophobic groups, etc. Antibody affinity can be measured by equilibrium dialysis or by the kinetic BIACORE™ method. The dissociation constant, Kd, and the association constant, Ka, are quantitative measures of affinity.

[0068] In certain embodiments, the antibodies described herein or identified according to the methods described herein are blocking antibodies. As used herein, a “blocking” antibody or an antibody “antagonist” is one which inhibits or reduces biological activity of the antigen(s) it binds. In certain embodiments, the blocking antibodies or antagonist antibodies or portions completely inhibit the biological activity of the antigen(s).

[0069] Antibodies may act as agonists or antagonists of the recognized polypeptides. For example, the present invention includes antibodies which disrupt receptor/ligand interactions either partially or fully. The invention features both receptor-specific antibodies and ligand-specific antibodies. The invention also features receptor-specific antibodies which do not prevent ligand binding but prevent receptor activation. Receptor activation (i.e., signaling) may be determined by techniques described herein or otherwise known in the art. For example, receptor activation can be determined by detecting the phosphorylation (e.g., tyrosine or serine/threonine) of the receptor or of one of its down-stream substrates by immunoprecipitation followed by western blot analysis. In specific embodiments, antibodies are provided that inhibit ligand activity or receptor activity by at least 95%, at least 90%, at least 85%, at least 80%, at least 75%, at least 70%, at least 60%, or at least 50% of the activity in absence of the antibody.

[0070] The invention also features receptor-specific antibodies which both prevent ligand binding and receptor activation as well as antibodies that recognize the receptor-ligand complex. Likewise, encompassed by the invention are neutralizing antibodies which bind the ligand and prevent binding of the ligand to the receptor, as well as antibodies which bind the ligand, thereby preventing receptor activation, but do not prevent the ligand from binding the receptor. Further included in the invention are antibodies which activate the receptor. These antibodies may act as receptor agonists, i.e., potentiate or activate either all or a subset of the biological activities of the ligand-mediated receptor activation, for example, by inducing dimerization of the receptor. The antibodies may be specified as agonists, antagonists or inverse agonists for biological activities comprising the specific biological activities of the peptides disclosed herein. The antibody agonists and antagonists can be made using methods known in the art. See, e.g., U.S. Pat. No. 5,811,097; Deng et al., Blood 92(6):1981-1988 (1998); Chen et al., Cancer Res. 58(16):3668-3678 (1998); Harrop et al., J. Immunol. 161(4):1786-1794 (1998); Zhu et al., Cancer Res. 58(15):3209-3214 (1998); Yoon et al., J. Immunol. 160(7):3170-3179 (1998); Prat et al., J. Cell. Sci. III (Pt2):237-247 (1998); Pitard et al., J. Immunol. Methods 205(2):177-190 (1997); Liautard et al., Cytokine 9(4):233-241 (1997); Carlson et al., J. Biol. Chem. 272(17):11295-11301 (1997); Taryman et al., Neuron 14(4):755-762 (1995); Muller et al., Structure 6(9):1153-1167 (1998); Bartunek et al., Cytokine 8(1):14-20 (1996).

### Therapeutic Antibody Modifications

[0071] In certain example embodiments, the therapeutic antibodies of the present invention may be modified, such that they acquire advantageous properties for therapeutic use (e.g., stability and specificity), but maintain their biological activity. Therapeutic antibodies may be modified to increase stability or to provide characteristics that improve efficacy of the antibody when administered to a subject in vivo. As used herein in reference to therapeutic antibodies, the terms “modified”, “modification” and the like refer to one or more changes that enhance a desired property of the therapeutic antibody. “Modification” includes a covalent chemical modification that does not alter the primary amino acid sequence of the therapeutic antibody itself. Such desired properties include, for example, prolonging the in vivo half-life, increasing the stability, reducing the clearance, altering the immunogenicity or allergenicity, or cellular targeting. Changes to a therapeutic antibody that may be carried out include, but are not limited to, conjugation to a carrier protein, conjugation to a ligand, conjugation to another antibody, PEGylation, polysialylation HESylation, recombinant PEG mimetics, Fc fusion, albumin fusion, nanoparticle attachment, nanoparticulate encapsulation, cholesterol fusion, iron fusion, acylation, amidation, glycosylation, side chain oxidation, phosphorylation, biotinylation, the addition of a surface active material, the addition of amino acid mimetics, or the addition of unnatural amino acids. Modified therapeutic antibodies also include analogs. By “analog” is meant a molecule that is not identical, but has analogous functional or structural features. For example, a therapeutic antibody analog retains the biological activity of a corresponding antibody, while having certain biochemical modifications that enhance the analog's function relative to another antibody. Such biochemical modifications could increase the analog's protease resistance, membrane permeability, or half-life, without altering, for example, antigen binding. An analog may include an unnatural amino acid.

[0072] The recitation of a listing of chemical groups in any definition of a variable herein includes definitions of that variable as any single group or combination of listed groups. The recitation of an embodiment for a variable or aspect herein includes that embodiment as any single embodiment or in combination with any other embodiments or portions thereof.

[0073] Modified antibodies (e.g., fusion proteins) may include a spacer or a linker. The terms “spacer” or “linker” as used in reference to a fusion protein refers to a peptide that joins the proteins comprising a fusion protein. Generally, a spacer has no specific biological activity other than to join or to preserve some minimum distance or other spatial relationship between the proteins. However, in certain embodiments, the constituent amino acids of a spacer may be selected to influence some property of the molecule such as the folding, net charge, or hydrophobicity of the molecule. Suitable linkers for use in an embodiment of the present invention are well known to those of skill in the art and include, but are not limited to, straight or branched-chain carbon linkers, heterocyclic carbon linkers, or peptide linkers. The linker is used to separate two peptides by a distance sufficient to ensure that, in a preferred embodiment, each peptide properly folds. Preferred peptide linker sequences adopt a flexible extended conformation and do not exhibit a propensity for developing an ordered secondary structure. Typical amino acids in flexible protein regions include Gly, Asn and Ser. Virtually any permutation of amino acid sequences containing Gly, Asn and Ser would be expected to satisfy the above criteria for a linker sequence. Other near neutral amino acids, such as Thr and Ala, also may be used in the linker sequence. Still other amino acid sequences that may be used as linkers are disclosed in Maratea et al. (1985), Gene 40: 39-46; Murphy et al. (1986) Proc. Nat'l. Acad. Sci. USA 83: 8258-62; U.S. Pat. Nos. 4,935,233; and 4,751,180.

[0074] The clinical effectiveness of protein therapeutics (e.g., antibodies) is often limited by short plasma half-life and susceptibility to protease degradation. Studies of various therapeutic proteins (e.g., filgrastim) have shown that such difficulties may be overcome by various modifications, including conjugating or linking the polypeptide sequence to any of a variety of non-proteinaceous polymers, e.g., polyethylene glycol (PEG), polypropylene glycol, or polyoxyalkylenes (see, for example, typically via a linking moiety covalently bound to both the protein and the nonproteinaceous polymer, e.g., a PEG).

[0075] It is well known that the properties of certain proteins can be modulated by attachment of polyethylene glycol (PEG) polymers, which increases the hydrodynamic volume of the protein and thereby slows its clearance by kidney filtration. (See, e.g., Clark et al., J. Biol. Chem. 271: 21969-21977 (1996)). Such PEG-conjugated biomolecules have been shown to possess clinically useful properties, including better physical and thermal stability, protection against susceptibility to enzymatic degradation, increased solubility, longer in vivo circulating half-life and decreased clearance, reduced immunogenicity and antigenicity, and reduced toxicity. Therefore, it is envisioned that certain agents can be PEGylated (e.g., on peptide residues) to provide enhanced therapeutic benefits such as, for example, increased efficacy by extending half-life in vivo. In certain embodiments, PEGylation of the agents may be used to extend the serum half-life of the agents and allow for particular agents to be capable of crossing the blood-brain barrier. Thus, in one embodiment, PEGylating antibodies improve the pharmacokinetics and pharmacodynamics of the antibodies.

[0076] In regard to peptide PEGylation methods, reference is made to Lu et al., Int. J. Pept. Protein Res.43: 127-38 (1994); Lu et al., Pept. Res. 6: 140-6 (1993); Felix et al., Int. J. Pept. Protein Res. 46: 253-64 (1995); Gaertner et al., Bioconjug. Chem. 7: 38-44 (1996); Tsutsumi et al., Thromb. Haemost. 77: 168-73 (1997); Francis et al., hit. J. Hematol. 68: 1-18 (1998); Roberts et al., J. Pharm. Sci. 87: 1440-45 (1998); and Tan et al., Protein Expr. Purif. 12: 45-52 (1998). Polyethylene glycol or PEG is meant to encompass any of the forms of PEG that have been used to derivatize other proteins, including, but not limited to, mono-(C1-10) alkoxy or aryloxy-polyethylene glycol. Suitable PEG moieties include, for example, 40 kDa methoxy poly(ethylene glycol) propionaldehyde (Dow, Midland, Mich.); 60 kDa methoxy poly(ethylene glycol) propionaldehyde (Dow, Midland, Mich.); 40 kDa methoxy poly(ethylene glycol) maleimido-propionamide (Dow, Midland, Mich.); 31 kDa alpha-methyl-w-(3-oxopropoxy), polyoxyethylene (NOF Corporation, Tokyo); mPEG2-NHS-40k (Nektar); mPEG2-MAL-40k (Nektar), SUNBRIGHT GL2-400MA ((PEG)240 kDa) (NOF Corporation, Tokyo), SUNBRIGHT ME-200MA (PEG20 kDa) (NOF Corporation, Tokyo). The PEG groups are generally attached to the peptide (e.g., RBD) via acylation or alkylation through a reactive group on the PEG moiety (for example, a maleimide, an aldehyde, amino, thiol, or ester group) to a reactive group on the peptide (for example, an aldehyde, amino, thiol, a maleimide, or ester group).

[0077] The PEG molecule(s) may be covalently attached to any Lys, Cys, or K(CO(CH2)2SH) residues at any position in a peptide. In certain embodiments, the antibodies described herein can be PEGylated directly to any amino acid at the N-terminus by way of the N-terminal amino group. A “linker arm” may be added to a peptide to facilitate PEGylation. PEGylation at the thiol side-chain of cysteine has been widely reported (see, e.g., Caliceti & Veronese, Adv. Drug Deliv. Rev. 55: 1261-77 (2003)). If there is no cysteine residue in the peptide, a cysteine residue can be introduced through substitution or by adding a cysteine to the N-terminal amino acid. In certain embodiments, proteins are PEGylated through the side chains of a cysteine residue added to the N-terminal amino acid.

[0078] In exemplary embodiments, the PEG molecule(s) may be covalently attached to an amide group in the C-terminus of a peptide. In certain embodiments, the PEG molecule used in modifying an agent of the present invention is branched while in other embodiments, the PEG molecule may be linear. In particular aspects, the PEG molecule is between 1 kDa and 100 kDa in molecular weight. In further aspects, the PEG molecule is selected from 10, 20, 30, 40, 50, 60, and 80 kDa. In further still aspects, it is selected from 20, 40, or 60 kDa. Where there are two PEG molecules covalently attached to the agent of the present invention, each is 1 to 40 kDa and in particular aspects, they have molecular weights of 20 and 20 kDa, 10 and 30 kDa, 30 and 30 kDa, 20 and 40 kDa, or 40 and 40 kDa. In particular aspects, the antibodies contain mPEG-cysteine. The mPEG in mPEG-cysteine can have various molecular weights. The range of the molecular weight is preferably 5 kDa to 200 kDa, more preferably 5 kDa to 100 kDa, and further preferably 20 kDa to 60 kDA. The mPEG can be linear or branched.

[0079] The present disclosure also contemplates the use of PEG Mimetics. Recombinant PEG mimetics have been developed that retain the attributes of PEG (e.g., enhanced serum half-life) while conferring several additional advantageous properties. By way of example, simple polypeptide chains (comprising, for example, Ala, Glu, Gly, Pro, Ser and Thr) capable of forming an extended conformation similar to PEG can be produced recombinantly already fused to the antibodies (e.g., Amunix' XTEN technology; Mountain View, CA). This obviates the need for an additional conjugation step during the manufacturing process. Moreover, established molecular biology techniques enable control of the side chain composition of the polypeptide chains, allowing optimization of immunogenicity and manufacturing properties.

[0080] Glycosylation can dramatically affect the physical properties of proteins and can also be important in protein stability, secretion, and subcellular localization (see, e.g., Solá and Griebenow, Glycosylation of Therapeutic Proteins: An Effective Strategy to Optimize Efficacy. BioDrugs. 2010; 24(1): 9-21). Proper glycosylation can be essential for biological activity. In fact, some genes from eukaryotic organisms, when expressed in bacteria (e.g., E. coli) which lack cellular processes for glycosylating proteins, yield proteins that are recovered with little or no activity by virtue of their lack of glycosylation. For purposes of the present disclosure, “glycosylation” is meant to broadly refer to the enzymatic process that attaches glycans to proteins, lipids or other organic molecules. The use of the term “glycosylation” in conjunction with the present disclosure is generally intended to mean adding or deleting one or more carbohydrate moieties (either by removing the underlying glycosylation site or by deleting the glycosylation by chemical and/or enzymatic means), and/or adding one or more glycosylation sites that may or may not be present in the original sequence.

[0081] Addition of glycosylation sites can be accomplished by altering the amino acid sequence. The alteration to the polypeptide may be made, for example, by the addition of, or substitution by, one or more serine or threonine residues (for O-linked glycosylation sites) or asparagine residues (for N-linked glycosylation sites). The structures of N-linked and O-linked oligosaccharides and the sugar residues found in each type may be different. One type of sugar that is commonly found on both is N-acetylneuraminic acid (hereafter referred to as sialic acid). Sialic acid is usually the terminal residue of both N-linked and O-linked oligosaccharides and, by virtue of its negative charge, may confer acidic properties to the glycoprotein. A particular embodiment of the present disclosure comprises the generation and use of N-glycosylation variants.

[0082] The present disclosure also contemplates the use of polysialylation, the conjugation of peptides and proteins to the naturally occurring, biodegradable a-(2→8) linked polysialic acid (“PSA”) in order to improve their stability and in vivo pharmacokinetics. PSA is a biodegradable, non-toxic natural polymer that is highly hydrophilic, giving it a high apparent molecular weight in the blood which increases its serum half-life. In addition, polysialylation of a range of peptide and protein therapeutics has led to markedly reduced proteolysis, retention of activity in vivo activity, and reduction in immunogenicity and antigenicity (see, e.g., G. Gregoriadis et al., Int. J. Pharmaceutics 300(1-2): 125-30). As with modifications with other conjugates (e.g., PEG), various techniques for site-specific polysialylation are available (see, e.g., T. Lindhout et al., PNAS 108(18)7397-7402 (2011)).

[0083] Additional suitable components and molecules for conjugation include, for example, thyroglobulin; albumins such as human serum albumin (HAS); tetanus toxoid; Diphtheria toxoid; polyamino acids such as poly(D-lysine:D-glutamic acid); VP6 polypeptides of rotaviruses; influenza virus hemaglutinin, influenza virus nucleoprotein; Keyhole Limpet Hemocyanin (KLH); and hepatitis B virus core protein and surface antigen; or any combination of the foregoing.

[0084] Fusion of albumin to one or more antibodies of the present disclosure can, for example, be achieved by genetic manipulation, such that the DNA coding for HSA, or a fragment thereof, is joined to the DNA coding for the one or more antibodies. Albumin itself may be modified to extend its circulating half-life. Fusion of the modified albumin to one or more polypeptides can be attained by the genetic manipulation techniques described above or by chemical conjugation; the resulting fusion molecule has a half-life that exceeds that of fusions with non-modified albumin. (See WO2011/051489).

[0085] Several albumin-binding strategies have been developed as alternatives for direct fusion, including albumin binding through a conjugated fatty acid chain (acylation). Because serum albumin is a transport protein for fatty acids, these natural ligands with albumin-binding activity have been used for half-life extension of small protein therapeutics. For example, insulin determir (LEVEMIR), an approved product for diabetes, comprises a myristyl chain conjugated to a genetically-modified insulin, resulting in a long-acting insulin analog.

[0086] Another type of modification is to conjugate (e.g., link) one or more additional components or molecules at the N- and/or C-terminus of a polypeptide sequence, such as another protein, or a carrier molecule. Thus, an exemplary polypeptide sequence can be provided as a conjugate with another component or molecule. A conjugate modification may result in a polypeptide sequence that retains activity with an additional or complementary function or activity of the second molecule. For example, a polypeptide sequence may be conjugated to a molecule, e.g., to facilitate solubility, storage, in vivo or shelf half-life or stability, reduction in immunogenicity, delayed or controlled release in vivo, etc. Other functions or activities include a conjugate that reduces toxicity relative to an unconjugated polypeptide sequence, a conjugate that targets a type of cell or organ more efficiently than an unconjugated polypeptide sequence, or a drug to further counter the causes or effects associated with a disorder or disease as set forth herein.

[0087] The present disclosure contemplates the use of other modifications, currently known or developed in the future, of the polypeptides to improve one or more properties. One such method for prolonging the circulation half-life, increasing the stability, reducing the clearance, or altering the immunogenicity or allergenicity of a polypeptide of the present disclosure involves modification of the polypeptide sequences by hesylation, which utilizes hydroxyethyl starch derivatives linked to other molecules in order to modify the molecule's characteristics. Various aspects of hesylation are described in, for example, U.S. Patent Appln. Nos. 2007/0134197 and 2006/0258607.

[0088] In particular embodiments, the antibodies include a protecting group covalently joined to the N-terminal amino group. In exemplary embodiments, a protecting group covalently joined to the N-terminal amino group of the proteins reduces the reactivity of the amino terminus under in vivo conditions. Amino protecting groups include —C1-10 alkyl, —C1-10 substituted alkyl, C2-10 alkenyl, —C2-10 substituted alkenyl, aryl, —C1-6 alkyl aryl, —C(O)—(CH2)1-6-COOH, —C(O)—C1-6 alkyl, —C(O)-aryl, —C(O)—O—C1-6 alkyl, or —C(O)—O-aryl. In particular embodiments, the amino terminus protecting group is selected from the group consisting of acetyl, propyl, succinyl, benzyl, benzyloxycarbonyl, and t-butyloxycarbonyl. In other embodiments, deamination of the N-terminal amino acid is another modification that may be used for reducing the reactivity of the amino terminus under in vivo conditions.

[0089] Chemically modified compositions of the antibodies wherein the antibody is linked to a polymer are also included within the scope of the present invention. The polymer selected is usually modified to have a single reactive group, such as an active ester for acylation or an aldehyde for alkylation, so that the degree of polymerization may be controlled. Included within the scope of polymers is a mixture of polymers. Preferably, for therapeutic use of the end-product preparation, the polymer will be pharmaceutically acceptable. The polymer or mixture thereof may include but is not limited to polyethylene glycol (PEG), monomethoxy-polyethylene glycol, dextran, cellulose, or other carbohydrate-based polymers, poly-(N-vinyl pyrrolidone) polyethylene glycol, propylene glycol homopolymers, a polypropylene oxide/ethylene oxide co-polymer, polyoxyethylated polyols (for example, glycerol), and polyvinyl alcohol.

[0090] In other embodiments, the antibodies are modified by PEGylation, cholesterylation, or palmitoylation. The modification can be to any amino acid residue. In preferred embodiments, the modification is to the N-terminal amino acid of the antibodies, either directly to the N-terminal amino acid or by way coupling to the thiol group of a cysteine residue added to the N-terminus or a linker added to the N-terminus such as trimesoyl tris(3,5-dibromosalicylate (Ttds). In certain embodiments, the N-terminus of the antibodies comprise a cysteine residue to which a protecting group is coupled to the N-terminal amino group of the cysteine residue and the cysteine thiolate group is derivatized with N-ethylmaleimide, PEG group, cholesterol group, or palmitoyl group. In other embodiments, an acetylated cysteine residue is added to the N-terminus of the agents, and the thiol group of the cysteine is derivatized with N-ethylmaleimide, PEG group, cholesterol group, or palmitoyl group. In certain embodiments, the antibodies of the present invention consist of an amino acid sequence which is bound with a methoxypolyethylene glycol(s) via a linker.

[0091] Substitutions of amino acids may be used to modify an antibody of the present invention. The phrase “substitution of amino acids” as used herein encompasses substitution of amino acids that are the result of both conservative and non-conservative substitutions. Conservative substitutions are the replacement of an amino acid residue by another similar residue in a polypeptide. Typical but not limiting conservative substitutions are the replacements, for one another, among the aliphatic amino acids Ala, Val, Leu and Ile; interchange of Ser and Thr containing hydroxy residues, interchange of the acidic residues Asp and Glu, interchange between the amide-containing residues Asn and Gln, interchange of the basic residues Lys and Arg, interchange of the aromatic residues Phe and Tyr, and interchange of the small-sized amino acids Ala, Ser, Thr, Met, and Gly. Non-conservative substitutions are the replacement, in a polypeptide, of an amino acid residue by another residue which is not biologically similar. For example, the replacement of an amino acid residue with another residue that has a substantially different charge, a substantially different hydrophobicity, or a substantially different spatial configuration.

[0092] One of skill in the art from this disclosure and the knowledge in the art will appreciate that there are a variety of ways in which to produce such therapeutic antibodies. In general, such therapeutic antibodies may be produced either in vitro or in vivo. Therapeutic antibodies may be produced in vitro as peptides or polypeptides, which may then be formulated into a pharmaceutical composition and administered to a subject. Such in vitro production may occur by a variety of methods known to one of skill in the art such as, for example, peptide synthesis or expression of a peptide/polypeptide from a DNA or RNA molecule in any of a variety of bacterial, eukaryotic, or viral recombinant expression systems, followed by purification of the expressed antibodies (e.g., with protein A or G). Alternatively, antibodies may be produced in vivo by introducing molecules (e.g., DNA, RNA, viral expression systems, and the like) that encode antibodies into a subject, whereupon the encoded therapeutic antibodies are expressed.

[0093] In certain embodiments, the antibodies as defined for the present invention include derivatives that are modified, i.e., by the covalent attachment of any type of molecule to the antibody such that covalent attachment does not prevent the antibody from generating an anti-idiotypic response. For example, but not by way of limitation, the antibody derivatives include antibodies that have been modified, e.g., by glycosylation, acetylation, pegylation, phosphylation, amidation, derivatization by known protecting/blocking groups, proteolytic cleavage, linkage to a cellular ligand or other protein, etc. Any of numerous chemical modifications may be carried out by known techniques, including, but not limited to specific chemical cleavage, acetylation, formylation, metabolic synthesis of tunicamycin, etc. Additionally, the derivative may contain one or more non-classical amino acids.

[0094] Simple binding assays can be used to screen for or detect antibodies that bind to a target protein, or disrupt the interaction between proteins (e.g., a receptor and a ligand). Because certain targets of the present invention are transmembrane proteins, assays that use the soluble forms of these proteins rather than full-length protein can be used, in some embodiments. Soluble forms include, for example, those lacking the transmembrane domain and/or those comprising the IgV domain or fragments thereof which retain their ability to bind their cognate binding partners. Further, agents that inhibit or enhance protein interactions for use in the compositions and methods described herein, can include recombinant peptido-mimetics.

[0095] Detection methods useful in screening assays include antibody-based methods, detection of a reporter moiety, detection of cytokines as described herein, and detection of a gene or gene signature.

[0096] Another variation of assays to determine binding of a receptor protein to a ligand protein is through the use of affinity biosensor methods. Such methods may be based on the piezoelectric effect, electrochemistry, or optical methods, such as ellipsometry, optical wave guidance, and surface plasmon resonance (SPR).

### Administration of Therapeutic Antibodies

[0097] For therapeutic uses, the antibodies described herein may be administered systemically, for example, formulated in a pharmaceutically-acceptable buffer such as physiological saline. Preferable routes of administration include, for example, subcutaneous, intravenous, interperitoneal, intramuscular, or intradermal injections that provide continuous, sustained levels of the antibody in the patient. Treatment of human patients or other animals will be carried out using a therapeutically effective amount of a therapeutic identified herein in a physiologically-acceptable carrier. Suitable carriers and their formulation are described, for example, in Remington's Pharmaceutical Sciences by E. W. Martin. The amount of the therapeutic agent to be administered varies depending upon the manner of administration, the age and body weight of the patient, and with the clinical symptoms of the neoplasia. Generally, amounts will be in the range of those used for other agents used in the treatment of other diseases associated with neoplasia, although in certain instances lower amounts will be needed because of the increased specificity of the compound. For example, a therapeutic compound is administered at a dosage that is cytotoxic to a neoplastic cell.

[0098] Human dosage amounts can initially be determined by extrapolating from the amount of antibody used in mice, as a skilled artisan recognizes it is routine in the art to modify the dosage for humans compared to animal models. Of course, this dosage amount may be adjusted upward or downward, as is routinely done in such treatment protocols, depending on the results of the initial clinical trials and the needs of a particular patient.

[0099] The therapeutic regimens disclosed herein comprise administration of antibodies of the invention or pharmaceutical compositions thereof to the patient in a single dose or in multiple doses (e.g., 1, 2, 3, 4, 5, 6, 7, 8, 10, 15, 20, or more doses). In one aspect, the therapeutic regimens comprise administration of the antibodies of the invention or pharmaceutical compositions thereof in multiple doses. When administered in multiple doses, the antibodies are administered with a frequency and in an amount sufficient to treat SARS-CoV-2. For example, the frequency of administration ranges from once a day up to about four times a day. In another example, the frequency of administration ranges from about once a week up to about once every six weeks.

[0100] Significant progress has been made in understanding pharmacokinetics (PK), pharmacodynamics (PD), as well as toxicity profiles of therapeutic antibodies in animals and humans, which have been in commercial development for more than three decades (see, e.g., Vugmeyster et al., Pharmacokinetics and toxicology of therapeutic proteins: Advances and challenges, World J Biol Chem. 2012 Apr. 26; 3(4): 73-92). In certain embodiments, therapeutic antibodies are administered by parenteral routes, such as intravenous (IV), subcutaneous (SC) or intramuscular (IM) injection. Molecular size, hydrophilicity, and gastric degradation are the main factors that preclude gastrointestinal (GI) absorption of therapeutic proteins (see, e.g., Keizer, et al., Clinical pharmacokinetics of therapeutic monoclonal antibodies. Clin Pharmacokinet. 2010 August; 49(8):493-507). Pulmonary delivery with aerosol formulations or dry powder inhalers has been used for selected proteins, e.g., exubera™ (see, e.g., Scheuch and Siekmeier, Novel approaches to enhance pulmonary delivery of proteins and peptides. J Physiol Pharmacol. 2007 November; 58 Suppl 5(Pt 2):615-25). Intravitreal injections have been used for peptides and proteins that require only local activity (see, e.g., Suresh, et al., Ocular Delivery of Peptides and Proteins. In: Van Der Walle C., editor. Peptide and Protein Delivery. London: Academic Press; 2011. pp. 87-103). In certain embodiments, SC administration of therapeutic antibodies is often a preferred route. In particular, the suitability of SC dosing for self-administration translates into significantly reduced treatment costs.

[0101] The pharmaceutical composition may be administered parenterally by injection, infusion or implantation (subcutaneous, intravenous, intramuscular, intraperitoneal, or the like) in dosage forms, formulations, or via suitable delivery devices or implants containing conventional, non-toxic pharmaceutically acceptable carriers and adjuvants. The formulation and preparation of such compositions are well known to those skilled in the art of pharmaceutical formulation. Formulations can be found in Remington: The Science and Practice of Pharmacy, supra.

[0102] As indicated above, the pharmaceutical compositions according to the invention may be in the form suitable for sterile injection. To prepare such a composition, the suitable antibodies are dissolved or suspended in a parenterally acceptable liquid vehicle. Among acceptable vehicles and solvents that may be employed are water, water adjusted to a suitable pH by addition of an appropriate amount of hydrochloric acid, sodium hydroxide or a suitable buffer, 1,3-butanediol, Ringer's solution, and isotonic sodium chloride solution and dextrose solution. The aqueous formulation may also contain one or more preservatives (e.g., methyl, ethyl or n-propyl p-hydroxybenzoate).

### Vector Delivery

[0103] The invention also provides a delivery system comprising one or more vectors or one or more polynucleotide molecules, the one or more vectors or polynucleotide molecules comprising one or more polynucleotide molecules encoding an antibody of the present invention.

[0104] In general, and throughout this specification, the term “vector” refers to a nucleic acid molecule capable of transporting another nucleic acid to which it has been linked. Vectors include, but are not limited to, nucleic acid molecules that are single-stranded, double-stranded, or partially double-stranded; nucleic acid molecules that comprise one or more free ends, no free ends (e.g., circular); nucleic acid molecules that comprise DNA, RNA, or both; and other varieties of polynucleotides known in the art. One type of vector is a “plasmid,” which refers to a circular double stranded DNA loop into which additional DNA segments can be inserted, such as by standard molecular cloning techniques. Another type of vector is a viral vector, wherein virally-derived DNA or RNA sequences are present in the vector for packaging into a virus (e.g., retroviruses, replication defective retroviruses, adenoviruses, replication defective adenoviruses, and adeno-associated viruses). Viral vectors also include polynucleotides carried by a virus for transfection into a host cell. Certain vectors are capable of autonomous replication in a host cell into which they are introduced (e.g., bacterial vectors having a bacterial origin of replication and episomal mammalian vectors). Other vectors (e.g., non-episomal mammalian vectors) are integrated into the genome of a host cell upon introduction into the host cell, and thereby are replicated along with the host genome. Moreover, certain vectors are capable of directing the expression of genes to which they are operatively-linked. Such vectors are referred to herein as “expression vectors.” Vectors for and that result in expression in a eukaryotic cell can be referred to herein as “eukaryotic expression vectors.” Common expression vectors of utility in recombinant DNA techniques are often in the form of plasmids.

### Use of Antibodies for Detection

[0105] In certain embodiments, the antibody or antibody fragment is capable of use for detecting SARS-CoV-2 or variants thereof using an immunoassay. Immunoassay methods are based on the reaction of an antibody to its corresponding target or analyte and can detect the analyte in a sample depending on the specific assay format. Immunoassays have been designed for use with a wide range of biological sample matrices. Immunoassay formats have been designed to provide qualitative, semi-quantitative, and quantitative results.

[0106] Numerous immunoassay formats have been designed. ELISA or EIA can be quantitative for the detection of an analyte/biomarker. This method relies on attachment of a label to either the analyte or the antibody and the label component includes, either directly or indirectly, an enzyme. ELISA tests may be formatted for direct, indirect, competitive, or sandwich detection of the analyte. Other methods rely on labels such as, for example, radioisotopes (I¹²⁵) or fluorescence. Additional techniques include, for example, agglutination, nephelometry, turbidimetry, Western blot, immunoprecipitation, immunocytochemistry, immunohistochemistry, flow cytometry, Luminex assay, and others (see ImmunoAssay: A Practical Guide, edited by Brian Law, published by Taylor & Francis, Ltd., 2005 edition).

[0107] Exemplary assay formats include enzyme-linked immunosorbent assay (ELISA), radioimmunoassay, fluorescent, chemiluminescence, and fluorescence resonance energy transfer (FRET) or time resolved-FRET (TR-FRET) immunoassays. Examples of procedures for detecting biomarkers include biomarker immunoprecipitation followed by quantitative methods that allow size and peptide level discrimination, such as gel electrophoresis, capillary electrophoresis, planar electrochromatography, and the like.

[0108] In certain embodiments, the antibody or antibody fragment is conjugated to a detectable label. Methods of detecting and/or quantifying a detectable label or signal generating material depend on the nature of the label. The products of reactions catalyzed by appropriate enzymes (where the detectable label is an enzyme; see above) can be, without limitation, fluorescent, luminescent, or radioactive or they may absorb visible or ultraviolet light. Examples of detectors suitable for detecting such detectable labels include, without limitation, x-ray film, radioactivity counters, scintillation counters, spectrophotometers, colorimeters, fluorometers, luminometers, and densitometers.

[0109] Any of the methods for detection can be performed in any format that allows for any suitable preparation, processing, and analysis of the reactions. This can be, for example, in multi-well assay plates (e.g., 96 wells or 384 wells) or using any suitable array or microarray. Stock solutions for various agents can be made manually or robotically, and all subsequent pipetting, diluting, mixing, distribution, washing, incubating, sample readout, data collection and analysis can be done robotically using commercially available analysis software, robotics, and detection instrumentation capable of detecting a detectable label.

### Platforms and Methods for Generating Antibodies

[0110] In one aspect, the present invention provides a platform for generating antibodies. The platform is entirely in vitro and allows for efficiently screening and identification of CDRs capable of binding an antigen of interest. The platform provides for libraries of DNA sequences encoding antibodies and methods of generating said libraries. The platform provides for screening the library by ribosome display. The platform provides for identifying families of antibodies capable of binding to an antigen of interest. The platform provides for affinity maturation by mutating selected antibodies. The platform provides for validation of antibodies.

[0111] In certain embodiments, the platform utilizes a VHH library obtained by methods described further herein. In certain embodiments, the platform utilizes VHH frameworks randomized at all CDRs in the framework (e.g., CDR1, CDR2, and CDR3). Libraries can include a varying number of members, such as up to about 100 members, such as up to about 1,000 members, such as up to about 5,000 members, such as up to about 10,000 members, such as up to about 100,000 members, such as up to about 500,000 members, or even more than 500,000 members. In one example, the methods can involve providing a VHH library containing a large number of potential antibodies. Such libraries are then screened by the methods disclosed herein to identify those library members that display a desired characteristic activity (e.g., binding).

[0112] In certain embodiments, the library is generated by analyzing naturally occurring antibody frameworks (e.g., camelid heavy chain antibodies). Templates are then generated with selected frameworks. In certain embodiments, CDR regions are chosen having the most variation between different antibody frameworks. Sets of primer pairs are generated to randomly mutate each CDR sequence in each framework. Each CDR is randomized with a set of two pairs of primers corresponding to the entire framework sequence. For example, the first pair of primers amplifies a first half of the framework and the second pair of primers amplifies the second half of the framework directly adjacent to the start of the first amplicon. The set of primers for the first CDR can include primers hybridizing to each end of the framework (i.e., the first pair and second pair of primers each includes a primer specific to one end). The primers specific to the ends of the framework are preferably blocked from being ligated. In certain embodiments, the primers are blocked by including a hairpin sequence. The primers for randomizing in each primer pair (i.e., not the primers hybridizing to the ends) hybridize to a region that is not mutagenized and include a randomized sequence. The region for hybridization is selected such that the primer hybridizes under the PCR annealing conditions (e.g., 50-70° C.). The primers also include a randomized sequence corresponding to the number of amino acids in the region of the CDR to be mutagenized. Randomization schemes may include NNN, which uses all 64 codons; NNB, which uses 48 codons; NNK, which uses 32 codons; and MAX, which assigns equal probabilities to each of the 20 amino acids (where N=A/C/G/T, B=C/G/T, S=C/G, and K=G/T) (see, e.g., Nov, Y., Appl Environ Microbiol. 2012 January; 78(1): 258-262). In certain embodiments, randomization schemes are used that avoid stop codons.

[0113] In certain embodiments, the library is generated by using PCR and ligation for each CDR in the framework. In certain embodiments, the PCR primer pairs in each set generate two amplicons capable of being ligated in only one orientation due to the ends of the amplicon being blocked. The ligated PCR product from the previous step is used as the template for the successive CDR randomization steps. The randomized sequence may be present in one or both of the primer pairs for a CDR sequence (e.g., CDR3). In certain embodiments, the PCR for each randomization step is performed using a DNA polymerase without or having extremely weak strand displacement activity (e.g., Phusion® High-Fidelity DNA Polymerase, New England Biolabs). The term strand displacement describes the ability to displace downstream DNA encountered during synthesis, such as a downstream double stranded region (e.g., hairpin). The terms “weak” and “strong” relate to the strength of displacement as compared to an average activity. In certain embodiments, weak refers to an activity that is only slightly greater than no activity. In certain embodiments, weak displacement activity refers to less than 95% or 99% of an encountered DNA strand is displaced and strong displacement activity refers to greater than 95% or 99% of encountered DNA is displaced under normal reaction conditions. In certain embodiments, the CDR with the shortest sequence is randomized in the first or second cycle and the CDR with the longest sequence is randomized in the last step (e.g., CDR3).

[0114] In certain embodiments, the framework sequence includes a promoter sequence. The promoter sequence is preferably compatible with in vitro transcription/translation systems (e.g., T7 promoter). Thus, in certain embodiments, the library is transcribed into mRNAs encoding for each antibody framework. The mRNA can then be translated to generate the antibody polypeptide. In certain embodiments, library members are cloned into vectors including the promoter sequence.

[0115] In certain embodiments, the framework sequence does not include a stop codon, whereby the mRNA and translated protein is not released by ribosomes. In certain embodiments, the platform includes ribosome display (see, e.g., Zahnd, et al., Ribosome display: selecting and evolving proteins in vitro that specifically bind to a target. Nat Methods 4, 269-279 (2007)). As used herein ribosome display refers to an in vitro selection and evolution technology for proteins and peptides from large libraries. In certain embodiments, the antigen of interest (e.g., viral spike protein) is immobilized to a solid surface (i.e., surface-immobilized target), such as magnetic particles, latex beads, nanoparticles, macro-beads, membranes, microplates, array surfaces, dipsticks and a host of other devices that facilitate the capture of specific biomolecules. The solid surface is then used to select for translated antibody frameworks capable of binding the antigen of interest. The solid surface can be washed and mRNA can be isolated. The mRNA can be converted to cDNA by reverse transcription PCR (RT-PCR). In preferred embodiments, the PCR reaction in the RT-PCR is performed using a mixture of two DNA polymerases, wherein one type is a DNA polymerase without or having extremely weak strand displacement activity (e.g., Phusion® High-Fidelity DNA Polymerase, New England Biolabs) and the other type is a DNA polymerase with strong strand displacement activity (e.g., Deep Vent® DNA Polymerase, New England Biolabs). The cDNA can then be used as input for successive rounds of ribosome display. In preferred embodiments, 3 rounds are performed, however 1, 2, 3, 4, 5, 6, 7, 8, 9 or 10 or more rounds can be performed. In certain embodiments, the number of rounds is saturated when the same library members are isolated at each round.

[0116] In certain embodiments, the stringency of the washing and binding steps is adjusted to increase binding stringency. In certain embodiments, stringency is increased by increasing the ionic strength of the buffers. In certain embodiments, stringency is increased by adding or increasing the concentration of detergent in the buffers. The binding and washing is preferably performed at about 4° C., however stringency can be changed by increasing the temperature. In certain embodiments, binding time is adjusted. In certain embodiments, binding time in initial cycles of ribosome display may be longer and in successive cycles decreased to increase stringency. For example, antibodies that bind overnight can be identified in an early round. In certain embodiments, binding is performed overnight (about 12 hours), 4 hours, 3, hours, 2 hours, 1 hour or less than 1 minute. In certain embodiments, binding is performed in buffers containing Mg²⁺ ons at concentrations of 5 mM or less.

[0117] In certain embodiments, the framework includes a sequence encoding for an epitope tag in frame with the antibody sequence and at the C-terminus of the antibody. In certain embodiments, library members are cloned into vectors including the epitope tag sequence. Non-limiting examples of epitope tags includes poly-histidine, HA-tag, c-myc tag, and FLAG-tag. In certain embodiments, the epitope tag can be used to enrich for full length mRNA sequences. For example, the entire antibody with the epitope tag is encoded by only a full length mRNA. Thus, enriching for ribosomes expressing an antibody framework fused to an epitope tag will enrich for full-length mRNAs. In certain embodiments, enrichment is performed for one or more rounds. In certain embodiments, full length mRNA are enriched during the step of generating the library. In certain embodiments, the first or first and second CDRs are randomized. The randomized frameworks are then used in ribosome display followed by enrichment using a solid surface specific for binding to the epitope tag. The enriched mRNA are then converted to cDNA and used as input for randomizing the last CDR sequence.

[0118] The platform also includes computational steps capable of clustering antibodies having similar CDRs. In certain embodiments, clustering allows for families of related antibodies to be identified, such that one or a few representative antibodies from each family can be further assayed or validated to determine binding or neutralizing activity of different families. In certain embodiments, every family identified is further validated. In certain embodiments, 1, 2, 3, 4, 5, 6, 7, 8, 9, 10 or 20 or more antibodies clustered in a family are validated.

[0119] In certain embodiments, antibody frameworks identified using a randomized library are further mutated by one or more rounds of affinity maturation. Affinity maturation refers to the introduction of random mutations across the full length of selected VHH DNA sequences (i.e., also including frame regions) and performing ribosome display with the antigen of interest. In certain embodiments, binding during ribosome display is performed for 1 minute or less.

[0120] In certain embodiments, the platform includes assays capable of validating antibody binding and neutralization activity. In certain embodiments, the validation assay is an immunoassay as described further herein (e.g., ELISA, radioimmunoassay, fluorescent, chemiluminescence, fluorescence resonance energy transfer (FRET) or time resolved-FRET (TR-FRET) immunoassays, Western blot, immunoprecipitation, immunocytochemistry, immunohistochemistry, or flow cytometry). These immunoassay formats have been designed to provide qualitative, semi-quantitative, and quantitative results. Quantitative results may be generated by determining the concentration of analyte detected by an antibody. Quantitative results may be generated through the use of a standard curve created with known concentrations of the specific analyte to be detected. The response or signal from an unknown sample is plotted onto the standard curve, and a quantity or value corresponding to the target in the unknown sample is established.

[0121] Viral neutralizing assays can be used to validate identified antibody frameworks. In certain embodiments, the assay uses live virus. In certain embodiments, the assay uses pseudotyped virus particles (see, e.g., Gentili, 2015). In certain embodiments, the neutralizing assay is performed without live virus (see, e.g., Tan, C. W., Chia, W. N., Qin, X. et al. A SARS-CoV-2 surrogate virus neutralization test based on antibody-mediated blockage of ACE2—spike protein—protein interaction. Nat Biotechnol 38, 1073-1078 (2020).

[0122] Further embodiments are illustrated in the following Examples which are given for illustrative purposes only and are not intended to limit the scope of the invention.

### EXAMPLES

### Example 1—a Cell-Free Antibody Engineering Platform Rapidly Generates SARS-CoV-2 Neutralizing Antibodies

[0123] Here, Applicants developed an integrated platform for in vitro VHH domain antibody engineering distinct from previous systems that integrates a novel design and generation method for CDR-randomized VHH libraries, optimized ribosome display and selection cycle with built-in background reduction, and a computational approach to perform global binder prediction from post-selection libraries. Applicants named this platform CeVICA (Cell-free VHH Identification using Clustering Analysis). CeVICA enabled Applicants to rapidly generate a list of more than 800 predicted binder families targeting SARS-CoV-2 spike receptor binding domain and engineer potent neutralizing antibodies against SARS-CoV-2 in response to an ongoing global pandemic caused by the virus (Cohen, 2020; Zhou et al., 2020).

### Development of CeVICA

[0124] To leverage the advantages of cell-free display, Applicants developed CeVICA (Cell-free VHH Identification using Clustering Analysis) (FIG. 1), an integrated platform for in vitro VHH domain antibody engineering, distinct from previous systems^{7,8,14} in that it combines a new design and generation method for CDR-randomized VHH/nanobody libraries, optimized ribosome display based selection cycle with built-in background reduction, and a computational approach to perform global binder prediction from post-selection libraries. CeVICA first takes a linear DNA library as input, in which each sequence is unique and encodes for an artificial nanobody with three fully randomized CDRs, and where the 5′ and 3′ ends of the DNA molecules contain elements required for in vitro ribosome display (FIG. 1a, Methods). Next, CeVICA uses ribosome display to link genotype (RNAs transcribed from DNA input library that are stop codon free, and stall ribosome at the end of the transcript) and phenotype (folded nanobody protein tethered to ribosomes due to the lack of stop codon in the RNA) (FIG. 1b, Methods). In each selection cycle (FIG. 1c, Methods), the displaying ribosomes bind to an immobilized target, followed by RT-PCR of the RNA attached to the bound ribosomes, which leads to double stranded DNA, which is then in vitro transcribed/translated in a new round of ribosome display. The double stranded DNA in any chosen round is sequenced to obtain full-length nanobody sequences (FIG. 1d, Methods). CeVICA then groups the sequences into clusters based on similarity of their CDR sequences, such that each cluster represents a unique binding family (FIG. 1e, Methods). Finally, one representative sequence from each cluster is synthesized and characterized for specific downstream applications (FIG. 1f, Methods). The combination of linear DNA libraries (FIG. 1a), ribosome display (FIG. 1b) and selection cycles (FIG. 1c) allow display of libraries with much larger diversity (>10¹⁰) than methods depending on cells¹⁵ at similar experimental scale. As selection increases the representation of sequences encoding binders, each binder sequence leads to a cluster of sequences in the output library. Computational clustering following high throughput sequencing identifies them efficiently, promising a more comprehensive view of the landscape of binder potential. as compared to methods that rely on the analysis of individual colonies or sequences (Huo et al., 2020; McMahon et al., 2018).

[0125] Applicants made VHH libraries containing highly random CDRs, based on analysis of natural VHH sequences and using a three-stage PCR and ligation process (FIG. 1g). First, to guide the VHH library sequence design, Applicants analyzed the sequence characteristics of 298 unique camelid VHHs (representing natural VHHs) from the Protein Data Bank (PDB298) (Table 10A, Methods), highlighting three CDR regions, CDR1-3⁹, separated by four regions of low diversity, frame1-4 (analysis of a larger dataset containing 1,030 sequences from abYsis showed the same sequence features (FIG. 2a, Table 10B). The four frames share high homology with human IGHV3-23 or IGHJ4 (FIG. 3a,b), and most of the remaining non-identical residues are present in other human IGHV genes (FIG. 3c). Applicants used consensus sequences extracted from this profile to design VHH DNA templates encoding the four frames (FIG. 1g), and included additional frames to the final mixture of frame templates (Methods), based on well-characterized nanobodies^{10,16}. The mixture of VHH frames serves as templates in PCR reactions, where DNA oligonucleotides with a 5′ NNB sequence were used to introduce randomization in CDRs, while hairpin DNA oligonucleotides were used to block ligation of one end of the PCR product (FIG. 1g and FIG. 4, Methods). Applicants introduced 7 random amino acids for CDR1, 5 for CDR2, and 6, 9, 10 or 13 for CDR3 to match the most commonly observed CDR lengths in natural VHHs. CDR3s longer than 13 amino acids only account for a minority of natural VHHs (36%, FIG. 2a, Table 11) and were not included in the VHH library. CDRs randomized in earlier stages are subject to duplication in later stages that reduces their diversity. Applicants thus chose to randomize CDR2 first, followed by CDR1, and then CDR3, imposing a diversity hierarchy of CDR3>CDR1>CDR2, because this is the overall ranking of diversity Applicants observed in CDRs in natural VHHs (FIG. 2a,c). The sequence profile of the resulting randomized VHH library met the design objectives, and largely mirrored the sequence features of natural VHHs (FIG. 2 and Table 11). Notably, the library design differs from pervious synthetic nanobody library designs⁶⁻⁸ in several key ways: Applicants defined CDR boundaries and length differently (based on the analysis of natural nanobodies (Table 11, methods), for example, in CDR2 (FIG. 5), and Applicants performed complete randomization of all CDR positions with NNB codons (and do not avoid, for example, cysteines in these positions) to maximize amino acid sequence possibilities. Finally, the VHH DNA library contains an upstream T7 promoter to allow transcription of VHH RNA, a 3×Myc tag, and a spacer downstream of the VHH coding region that stalls peptide release, to enable ribosome display (FIG. 1h).

[0126] To test the performance of the library in ribosome display, and to reduce unproductive sequences, such as VHHs that contain frame shifts or early stops, Applicants ribosome displayed a library only with randomized CDR1 and CDR2 and performed one round of anti-Myc selection. Functional VHH sequences will express Myc tag at the C-terminal of VHH and are expected to be enriched after anti-Myc selection. Indeed, there was a large decrease of unproductive sequences and an increase of full-length VHHs (from 25.3% to 51.9%) after anti-Myc enrichment (FIG. 1i). At the DNA level, there was an increase of all in-frame CDR1 DNA lengths and decrease of frame-shift lengths (FIG. 1j, arrows). Applicants used the resulting full-length enriched CDR1 and 2 randomized library as PCR template for randomization of CDR3. The final library with all three CDRs randomized (hereafter, “the input library”) contained 27.5% full-length sequences, and 3.68×10¹¹ full-length diversity per μg of library DNA.

### Binder Selection for RBD and EGFP

[0127] Applicants performed in vitro selection from the input library for sequences that encode binders to two target proteins: EGFP and the receptor binding domain (RBD) of the spike protein of SARS-CoV-2¹⁷ (FIG. 6). Applicants fused each of the two proteins with a 3×Flag tag and immobilized them on beads coated with protein G and anti-Flag antibody (FIG. 6a). For each screen, Applicants used input library DNA corresponding to ˜1×10¹¹ full-length diversity, and performed 3 rounds of selection. After round 3, with an optimized PCR approach that minimized loop shuffling¹⁸ (Methods), RNA yield markedly increased in both screens (FIG. 7a) and the recovered sequences were primarily composed of E. coli ribosomal RNAs and VHH library RNA (e.g., FIG. 7b). Comparing the input and output library sequences shows a 2.3-fold increase in the proportion of stop-free VHH sequences after 3 rounds of selection (FIG. 6c), fitting the expectation that successful binding to targets depends on intact VHH structure.

[0128] Applicants identified target specific binders by clustering CDR sequences enriched after selection into families, while accounting for sequencing errors (Methods). First, Applicants examined the distribution of the sequence match scores (Methods) between randomly selected pairs of sequences within a CDR in a library, and compared these distributions for each CDR between the input and output libraries (FIG. 6b, Methods). In the pre-selection input libraries, the mean match score is low and the distribution is unimodal, as expected given the randomization; whereas after selection, there is a multi-modal distribution, with one low mode (similar to input) and at least one high mode (FIG. 6b), which is further distinguished when combining the CDR1 and CDR2 match scores (FIG. 6b). This high mode should reflect binders enriched by the selection rounds. Notably, sequences with a high match score in one CDR are more likely to have a higher match score in other CDRs (FIG. 7c-f). Applicants clustered the likely binder sequences exceeding a combined (CDR1+2) match score threshold (FIG. 6b, dashed horizontal line), yielding 862 unique clusters for RBD and 71 for EGFP, with 52 clusters shared by the two targets (FIG. 6d, Table 7 and 8). The shared clusters represent background binders and are excluded from further analysis due to them not showing specific binding to either EGFP or RBD. Notably, RBD unique clusters span a wide range of cluster sizes (FIG. 6e). Conversely, the shared clusters represent background binders and are excluded from further analysis, because they do not show specific binding to either EGFP or RBD.

[0129] Focusing on RBD binders, Applicants chose one representative VHH gene from each of the 14 top-ranking (ranked by cluster size) RBD unique clusters and validated it for spike RBD binding and SARS-CoV-2 pseudovirus neutralization (FIG. 6f-h, Methods). RBD binding ELISA assays of the 14 tested VHHs (SR1-14) showed 3 strong binders (SRL 2, 12), 8 weak binders (SR3, 4, 6, 7, 8, 11, 13, 14) and 3 non-binders (FIG. 6f,g). SARS-CoV-2 S pseudotyped lentivirus neutralization assays revealed 6 VHHs inhibiting infection above 30% at 1 μM (FIG. 6h), which included the 3 strong binders and three of the weak binders (SR4, 6, 8).

### Validation of NNB Codon Fitness for Binder Selection

[0130] Applicants next compared input, output and natural CDR sequence distributions to assess whether starting with a fully random CDR amino acid profile could be generally detrimental to the fitness of binders, and whether selection output mimics a natural amino acid distribution. In natural VHHs (PDB298 sequences, table 11), CDR1 and CDR2 are less diverse than CDR3 with an amino acid profile that favors certain residues (FIG. 2a,c), and previous synthetic nanobody library designs sought to recapitulate the CDR1 and CDR2 amino acid preferences of natural nanobodies⁶⁻⁸. Conversely, Applicants used fully-randomized NNB codons to encode all CDR positions. In principle, such a design might not be ideal if the natural CDR1 and CDR2 amino acid profile is required for functional nanobodies; alternatively, it may allow us to recover possibilities not captured by libraries pre-biased by natural sequence distributions.

[0131] To determine whether the fully random CDR amino acid profile is detrimental to the fitness of binders, Applicants compared the CDR amino acid profile of 932 representative sequences across all unique clusters from both the EGFP and RBD output libraries (“output binders”) (FIG. 9, table 11) to the sequence profiles of either the input library or natural VHHs (FIG. 2a,b). Applicants reasoned that if the amino acid profile in the input library leads to a distribution of proteins that are less fit in binding, the binder selection process should shift this distribution to a more fit profile in the output library, such that there is a low correlation between the amino acid profiles of the input library and output binders. Surprisingly, there was an overall smaller shift in CDR1 and CDR2 compared to CDR3, as indicated by higher Spearman correlation coefficients (FIG. 8a-c, mean Spearman correlation=0.73, 0.73, and 0.64 respectively), and shorter distances (as the RMSE relative to y=x line, Methods, FIG. 8d,e, mean RMSE=2.96, 2.40 and 3.51 respectively), implying that a fully random profile at CDR1 and CDR2 may not have had a substantial binding fitness cost at most positions, whereas CDR3 not only shifted away from the input profile, it was even further shifted from the natural profile (FIG. 8d,e). Moreover, correlation of amino acid profiles between output binders and natural VHHs are significantly less than between output binders and input library at most CDR positions (FIG. 8). A few positions (CDR1 position 7 and CDR3 position 1-3) had much lower input-output binders Spearman correlation coefficients and higher RMSE than most positions. This suggests that these positions may benefit from specifically-designed amino acid profiles (to adjust off diagonal amino acids percentages (FIG. 8b) accordingly), even though their input distributions were not particularly distinct from the natural sequence distribution compared to other positions (FIG. 8a,d). Applicants observed similar results when they used a larger collection of 1,030 natural nanobody collection from abYsis (www.abysis.org, abYsis1030) to calculate the natural profile (FIG. 10). Thus, the output binder CDR profile is predominantly influenced by the input library rather than by selection towards a natural VHH profile, a natural VHH CDR amino acid profile is not required for VHH binding properties, and a fully random CDR design offers high diversity without a major binding fitness cost (although may have other fitness drawbacks in vivo).

### Affinity Maturation Effectively Improves VHH Function

[0132] To perform affinity maturation, a critical stage in antibody development in animals, Applicants designed and performed an affinity maturation strategy based on CeVICA to increase the affinity of RBD binding VHHs (FIG. 11a, Methods). Applicants used error-prone PCR to introduce random mutations across the full-length sequence of six selected VHHs (SR1, 2, 4, 6, 8, 12) and generated the mutagenized library. A library size of 4.18×10¹⁰ diversity (sufficient to cover the full diversity of VHHs with three mutations per sequence) was used as input and three rounds of stringent selection were performed. Applicants sequenced the libraries pre- and post-affinity maturation, and observed about 3 mutations in the pre-library and about 2 mutations in the post-library per sequence (FIG. 11a). Applicants calculated their position-wise amino acid profiles, and determined, for each VHH, the change in each amino acid proportion at each position, generating a percent point change table. Applicants defined putative beneficial mutations as those with a percent point increase above a set threshold (FIG. 11b, Methods and Table 13), highlighting between 8 to 25 putative beneficial mutations for each of the selected VHHs. Finally, Applicants assembled a list of identified putative beneficial mutations for each VHH and incorporated different combinations of them into each VHH parental sequence to generate multiple mutated variants of each VHH for final assessment (Table 9).

[0133] Variants in the SR4 and SR6 families had both increased binding and neutralization, while the SR2 and SR12 family variants had only increased neutralization but not binding, based on an ELISA binding assay and a pseudotyped virus neutralization assay (FIG. 11c,d). Multiple nanobody variants outperformed VHH72, a previously described nanobody that neutralizes SARS-CoV-2 pseudoviruses¹⁹, in binding (e.g., SR12c3), neutralization (e.g., SR4t6), or both (e.g., SR6c3) (FIG. 11c,d and Table 14). Neutralization and binding performance were poorly correlated across variants (r²=0.07), as previously reported²⁰. However, when considering each nanobody family separately, trends were stronger, and neutralization and affinity were more highly correlated for SR4 and SR6 nanobodies (FIG. 11e). This may be because variants within the same family share the same binding site and orientation. One intriguing hypothesis is that the slope of each VHH family's linear trend reflects the sensitivity of the virus to the blocking of the family's binding site. A dose response curve of selected VHHs showed SR6c3 as the most potent neutralizer (FIG. 11f) with an IC50 of 62.7 nM (FIG. 11g), comparable to potent SARS-CoV-2 neutralizing antibody Fab domains²¹ and monoclonal antibodies²² identified from human patients. Importantly, the original SR6 cluster contained only 679 sequences, representing 0.67% of the 101,674 sequences from the initial selection output, highlighting the power of CeVICA in rapidly identifying high performance antibodies among a vast number of potential candidates.

[0134] Next, Applicants examined the potential impact that the VHH sequences may have on immunogenicity in humans, as a major concern related to the therapeutic use of VHH antibodies is the possibility that, as camelid proteins, they would elicit an immune response. In particular, VHH hallmark residues in frame2 constitute a major difference between camelid VHHs and human VHs (FIG. 3). Applicants used the affinity maturation data to identify potential conversion options for these VHH hallmark residues. In three of the four VHH hallmark residues Applicants found VHHs where the residues were converted to the corresponding human residue as a result of affinity maturation (FIG. 12, arrows). These data imply that at least some of the VHH hallmark residues can be converted to human residues without loss of binding fitness. Such conversions may serve as frame features of future VHH library designs and improve tolerance of in vitro engineered VHHs by humans. Notably, single domain antibody frames containing all four human hallmark residues have been successfully used for in vitro engineering of single domain antibodies without light chain²³, demonstrating the feasibility of converting VHH hallmark residues to human residues. Overall, the extension of CeVICA for affinity maturation offers a strategy for improving antibody function.

### True Binders and Neutralizers Identified Across the CeVICA Predicted List.

[0135] Applicants next asked whether true binders and/or neutralizers can be identified from lower ranked clusters across the full list of 862 clusters. To this end, Applicants cloned and purified 24 additional VHHs representing 24 clusters selected from various locations on the list of clusters ranked by cluster size (SR15-38, with their respective original cluster size ranging from 156 to 5, FIG. 13). These VHHs were assayed by both ELISA and pseudovirus neutralization against wild type RBD/spike along with the recently emerged RBD/spike variants N501Y and E484K²⁴. 19 VHHs showed positive ELISA readings (back ground subtracted OD 450 nm >0.02, FIG. 13a,b) and 5 VHHs (SR15, 18, 25, 30, 38) showed greater than 20% inhibition at 1 μM for at least one RBD/spike variant (FIG. 13c). Notably, SR38, representing a cluster with cluster size of 5 that ranked at the bottom of the list of 862 clusters, binds N501Y RBD strongly and showed stronger inhibition of pseudoviruses carrying N501Y and E484K mutations compared to two previously identified nanobodies of animal origin, Ty125 and Nb2126 (FIG. 13c). Taken together, Applicants identified 30 positive binders among a total of 38 tested VHHs (78.9% positive rate), further validating the efficacy of the CDR-directed clustering approach for selection of binders.

### Engineering Potent and Stable VHHs for Virus Neutralization.

[0136] To engineer more potent virus neutralizing agent, Applicants performed a second affinity maturation using SR6c3 as the baseline template. Applicants identified mutation combinations that greatly enhanced binding affinity (SR6v1, SR6v7, SR6v9 and SR6v15) compared to SR6c3 (FIG. 14a, Table 9 and 14). SR6v15, the variant with the highest binding shown by ELISA, has a K_{D} of 2.18 nM as measured by biolayer interferometry (FIG. 14b) and inhibited pseudovirus infection more potently than SR6c3 (FIG. 14c). Applicants further converted SR6v15 (SR6v15.m) into tandemly linked dimer (SR6v15.d) and trimer (SR6v15.t), and compared them to Nb21′ based agents (monomer: Nb21.m, dimer: Nb21.d, trimer: Nb21.t) in pseudovirus neutralization assay (FIG. 14d). The most potent SR6v15 based agent, SR6v15.d had a IC50 of 0.329 nM, while the most potent Nb21 based agent, Nb21.t, had a IC50 of 0.244 nM (FIG. 14d). These results demonstrate CeVICA's capability to produce highly potent virus neutralizing agents through iterative optimization.

[0137] CeVICA Selected Nanobodies have Desirable Biophysical Characteristics and are Stable

[0138] CeVICA uses NNB codons to randomize CDRs, which may cause over-representation of certain amino acids that could contribute to poor biophysical properties in the output VHHs. Applicants evaluated the extent of such potential undesired effects by several biophysical assays. First, Applicants performed size exclusion chromatography analysis of three nanobodies (SR12, SR18, SR6c3) and found that for each of them >90% of the molecules exist as monomers (FIG. 15). Second, Applicants investigated the impact of cysteines in CDRs on nanobody biophysical properties and function because cysteine occurs at much higher frequencies in the library CDRs (5.8% in input library and 6.0% in unique output binders (Table 11) than in natural VHH CDRs (averaging 2.1% in CDR3 positions 7-12, Table 11. Non-reducing SDS-PAGE gel analysis of VHHs with 0-2 cysteines in their CDRs (using samples stored at 4° C. for at least 4 weeks) revealed that VHHs with no CDR cysteine (SR12, SR18) only had one monomer band (FIG. 16a), while VHHs with 1 or 2 CDR cysteine either had a single monomer band (SR4, SR15, SR38) or a monomer and a dimer band (SR6c3, SRL SR20, SR26) (FIG. 16a). Using SR6c3 samples that has been stored for varying lengths of time, Applicants found dimers were not detected in freshly purified samples and appeared overtime at relatively low rate (FIG. 16b). Thus, presence of cysteine in CDRs do not always cause VHH dimers due to disulfide bond formation. Applicants next evaluated the functional consequences of CDR cysteine mediated dimer formation. 7 months old SR6c3 sample showed increased signal in ELISA compared to fresh sample and the signal increase is suppressed by treating with reducing reagent that breaks up disulfide bond (FIG. 16c). 7 months old SR6c3 sample also inhibited pseudovirus infection greater than fresh sample (FIG. 16d), consistent with ELISA data and indicates that disulfide bond formation via CDR cysteine does not adversely affect the function of SR6c3.

[0139] Finally, Applicants assessed the thermal stability of VHHs produced by CeVICA. Both SR6c3 and SR6v15 showed good resistance to thermal denaturation and had a melting temperature of 72° C. (FIG. 17a), which is comparable to VHHs generated by other methods 23. Applicants then tested different VHH's ability to refold after complete thermal denaturation by comparing ELISA readings of VHH samples before and after heating at 98° C. for 10 minutes. SR6v15 showed higher refolding with a heated/non heated ratio of 0.72 compared to that of VHH7219 (0.33) and Nb2126 (0.57) (FIG. 17b). Surprisingly, SR6c3 had a heated/non heated ratio greater than 1, indicating increased binding affinity after complete thermal denaturation and refolding. Applicants hypothesized that this increase may result from expedited disulfide bond formation that increased the percentage of dimers in SR6c3 samples subjected to heating. This hypothesis is supported by the observation that SR6c3 samples heated and refolded in the presence of reducing reagent had a heated/non heated ratio of 1 (FIG. 17b). Thus, VHHs produced by CeVICA has good thermal stability and can efficiently refold after complete thermal denaturation.

### DISCUSSION

[0140] The CeVICA platform offers a generalizable solution for in vitro VHH antibody engineering that integrates all the components necessary to generate VHH binder sequences in a cell-free process (FIG. 1a). CeVICA VHH library is designed to contain only the essential features for robust VHH structure, revealed by the diversity profile across the length of natural VHHs (FIG. 2a,c). Importantly, Applicants validated that fully random NNB encoded codons in all CDR positions does not adversely affect binder selection (FIG. 8) nor does it impact biophysical stability of individual VHHs produced by the platform (FIG. 15, FIG. 16, FIG. 17). A linear DNA library of such design can be efficiently produced by a method of successive PCR and ligation (FIG. 1g), yielding large libraries with their library size directly quantifiable. This library generation method is highly adaptable, for example, oligos containing alternative base mix ratios can be used to achieve different amino acid profiles for specific CDR positions, alternative frame template sequences can be used to enrich for unique biophysical properties encoded in the frame regions of VHHs. Lastly, these linear libraries perform well when used as input to an optimized ribosome display based selection protocol, which suppresses sequence segment shuffling that could break up CDR pairing (Methods), a challenging problem often associated with cell free systems¹⁸.

[0141] A key feature of CeVICA is binder sequence recover using CDR-directed clustering. This approach fully utilizes all sequences in the output library to provide a comprehensive view of all binders contained in the output (FIG. 1d-f, FIG. 6b-e) and, in effect, reduces the VHH characterization screen space (e.g., From 19,223 VHH sequences in RBD output library to 862 in the list of VHH clusters) (FIG. 6b,d,e). This feature makes CeVICA particularly suited for applications where large numbers of antibodies need to be screened to isolate ones with unique traits (e.g., virus neutralization, receptor activation, targeting hard-to-target epitopes) in addition to binding the target. Indeed, when Applicants applied CeVICA to engineer SARS-CoV-2 neutralizing VHHs, Applicants were able to identify SR38, a VHH with a rare ability to strongly favor binding of N501Y containing RBD and neutralizes N501Y containing pseudovirus more potently than pseudovirus not carrying N501Y (FIG. 13), making SR38 a potential candidate for the development of N501Y variant specific detection reagents and cross-variant neutralization agents. Importantly, SR38's cluster only contain 5 sequences, representing ˜0.03% of total, making it difficult to recover by random sampling without computational clustering.

[0142] Previous synthetic nanobody library designs sought to randomize CDR positions using an amino acid profile that recapitulates the profile observed in the corresponding positions in natural nanobodies; however, to the best of Applicants' knowledge, whether the natural profile represents an ideal profile for the purpose of in vitro antibody engineering has not been thoroughly investigated experimentally. The large number of nanobody clusters Applicants generated using CDR-directed clustering offered the opportunity to test the fitness of randomized amino acid profile in binder selection (FIG. 8). Applicants found that in many positions, the output binder profile highly resembles the input library profile, while the similarity between the output profile and the natural profile is lower. For positions where the output profile moved significantly away from the input profile (e.g., CDR1 position 7), the distance between output and natural profiles is greater than that between output and input, and also greater than the distance between input and natural, indicating that the output profile is not moving closer to a natural profile in these positions (FIG. 8d,e). Thus, Applicants did not find evidence indicating that the amino acid profiles observed in natural nanobodies are more fit than an NNB profile for binder selection (although they may be more fit for other features). These data also suggest a strategy to improve the fitness of an input library by incorporating amino acid profiles that matches the output profile, which can be achieved by using specifically defined (non-equal) base mix ratios for the three base positions of a randomizing codon. Such a strategy could provide future improvements on synthetic nanobody library design.

[0143] VHHs produced by CeVICA showed good biophysical properties that are comparable to VHHs of animal origin (FIG. 15, FIG. 16, FIG. S17). Notably, Applicants saw robust refolding after complete thermal denaturation up to 100% (SR6c3) (FIG. 17b). Such high refolding capability may be partly explained by the use of ribosome display for the selection of these VHHs, during which VHHs need to fold into their functional confirmation while tethered to ribosomes in a minimally reconstituted protein synthesis environment that lacks factors normally found inside cells to aid protein folding such as chaperons, thus enriching for VHHs with strong inherent folding stability. This hypothesis could be tested further as CeVICA gets applied to more cases. The most potent nanobody generated in this study, SR6v15, outperformed two of the previously reported nanobodies generated through animal immunization, Ty125 and VHH7219, in both the binding affinity to RBD and the potency of pseudovirus infection (FIG. 14a,c). A dimeric form of SR6v15, SR6v15.d, had a more than 10-fold increase in pseudovirus neutralization potency compared to the monomeric SR6v15. SR6v15.d's IC50 is comparable to that of Nb21.t, a previously reported nanobody with high virus neutralization potency²⁶ (FIG. 14d). Together, these data demonstrate CeVICA's suitability for engineering high affinity VHH antibodies with comparable biophysical properties as VHHs produced by animals, making it a valuable addition to in vitro antibody engineering technologies.

[0144] In conclusion, CeVICA is a new system for synthetic VHH based antibody library design, in vitro selection optimization, post-selection screening, and affinity maturation. Using CeVICA, Applicants generated a large collection of antibodies that can bind the RBD domain of the SARS-CoV-2 spike protein and can neutralize pseudotyped virus infection, thus providing an important resource. Given its seamlessly integrated procedure, CeVICA is amenable to automation and could provide an important tool for antibody generation in a rapid, reliable and scalable manner. CeVICA further provides a technology framework for incorporation of future refinements that could overcome limitations of in vivo fitness of in vitro generated antibodies and the overall efficiency of cell-free antibody engineering.

### Example 2—Materials and Methods

[0145] Constructs. DNA encoding VHHs were obtained by gene synthesis (IDT) and cloned into pET vector in frame with a C-terminal 6×His tag or GST tag by Gibson assembly (NEBuilder® HiFi DNA Assembly Master Mix, New England Biolabs). DNA encoding SARS-CoV-2 S RBD (S a.a. 319-541) were obtained by gene synthesis and cloned into pcDNA3 with an N-terminal SARS-CoV-2 S signal peptide (S a.a. 1-16) and a C-terminal 3×Flag tag by Gibson assembly. EGFP was cloned into pcDNA3 with a C-terminal 3×Flag tag by Gibson assembly. SARS-CoV-2 S was amplified by PCR (Q5 High-Fidelity 2× Master Mix, New England Biolabs) from pUC57-nCoV-S(kind gift from Jonathan Abraham lab). SARS-CoV-2 S was deleted of the 27 a.a. at the C-terminal and fused to the NRVRQGYS sequence of HIV-1, a strategy previously described for retroviruses pseudotyped with SARS-CoV S²⁵. Truncated SARS-CoV-2 S fused to gp41 was cloned into pCMV by Gibson assembly to obtain pCMV-SARS2ΔC-gp41. psPAX2 and pCMV-VSV-G were previously described²⁶. pTRIP-SFFV-EGFP-NLS was previously described²⁷ (a gift from Nicolas Manel; Addgene plasmid #86677; http://n2t.net/addgene:86677; RRID:Addgene_86677). cDNA for human TMPRSS2 and Hygromycin resistance gene was obtained by synthesis (IDT). pTRIP-SFFV-Hygro-2A-TMPRSS2 was obtained by Gibson assembly.

[0146] Cell culture. HEK293T cells were cultured in DMEM, 10% FBS (ThermoFisher Scientific), PenStrep (ThermoFisher Scientific). HEK293T ACE2 were a kind gift of Michael Farzan. HEK293T ACE2 cells were transduced with pTRIP-SFFV-Hygro-TMPRSS2 to obtain HEK293T ACE2/TMPRSS2 cells. The transduced cells were selected with 320 μg/ml of Hygromycin (Invivogen) and used as a target in SARS-CoV-2 S pseudotyped lentivirus neutralization assays. Transient transfection of HEK293T cells was performed using TransIT®-293 Transfection Reagent (Minis Bio, MIR 2700).

[0147] Amino acid profile construction and analysis of natural VHHs. VHH protein sequences were downloaded from the Protein Data Bank (only entries deposited prior to Sep. 2^{nd}, 2020 were included; Table 10) or abYsis (www.abysis.org/abysis, date 2021-05-01, Table 10). Nanobodies (VHHs) were separated into CDRs and frames (segments) by finding regions of continuous sequence in each VHH that best matched to the following standard frame sequences:

frame1 standard:
(SEQ ID NO: 15158)
EVQLVESGGGLVQAGDSLRLSCTASG,
frame2 standard:
(SEQ ID NO: 15159)
MGWFRQAPGKEREFVAAIS,
frame3 standard:
(SEQ ID NOS: 15160)
AFYADSVRGRFSISADSAKNTVYLQMNSLKPEDTAVYYCAA,
frame4 standard:
(SEQ ID NOS: 15161)
DYWGQGTQVTVSS,

[0148] Each matched region is the corresponding frame of the VHH, the region between frame1 and frame2 is CDR1, the region between frame2 and frame3 is CDR2, the region between frame3 and frame4 is CDR3 (FIG. 1g). Only nanobody sequences with at least one unique CDR were selected to represent natural nanobodies and used for constructing amino acid profile (a.a. profile). 298 sequences from Protein Data Bank (PDB298) and 1,030 sequences from abYsis (abYsis1030) fit this selection criteria (Table 10). The amino acid (a.a.) profile at each position within each segment was calculated by finding the percentage of each of the 20 universal proteinogenic amino acid at that position among all selected VHHs, all frame lengths were set to the same length as frame standards. CDR lengths were manually set to accommodate different CDR lengths, CDR1 and CDR2 lengths was set to 10, CDR3 length was set to 30. VHHs with CDR lengths shorter than the corresponding set length had their CDR filled from the C-terminal end with empty position holders up to the set length. Numbers in amino acid profile table are the percentage of each amino acid. CDR boundaries were defined by the position where the combined frequency of the top two most abundant amino acids dropped sharply.

[0149] Applicants compared their annotation method to Kabat and Chothia annotation (www.abysis.org/abysis/sequence_input/key_annotation/key_annotation.cgi) and found all three methods (Kabat, Chothia and Applicants) showed frame regions with the same core sequence, and with 1-2 amino acid differences in the exact CDR boundaries between the three methods. The performance of Applicants' library suggests their annotation faithfully captured the domain structure of nanobodies.

[0150] Applicants used 1—Gini index to measure the level of diversity at each amino acid position. The Gini index measures the degree of inequality among individuals in a population, ranging from 0, when resources are uniformly (equally) distributed across individuals, and 1, when one member has all the resources. Applicants' diversity index of 1-Gini takes 0 when there is no diversity (one amino acid has an abundance of 100%) and 1 for the highest diversity (all amino acids have the same abundance). The diversity index is calculated for 8 positions for CDR1, 6 positions for CDR2 and 18 positions for CDR3 for all sequence groups, when no sequence in the group contain a certain CDR position, the diversity index will be 0. For example, in CDR2, both the natural nanobody collection and Applicants' input library contained a very small percentage of nanobodies having CDR2 with 6 a.a., while the output binder collection has no nanobody having CDR2 with 6 a.a., hence the diversity index has a value of 0 for the output binder plot in FIG. 9b but a non-zero value for natural nanobodies and input library in FIG. 2c,d.

[0151] VHH library construction. Nanobody library sequence is designed to recapitulate the sequence structure of frames and CDRs observed from analyzing natural nanobodies (PDB298, abYsis1030, Table 11). The design differs from prior designs⁶⁻⁸ in both the length of CDRs, the positions selected for randomization and randomization strategy. Such differences likely arise from differences in the size of natural nanobody collection retrieved from databases (93 in McMahon et al.⁶ versus 298/1030 in this study) and/or in how the nanobodies are annotated and analyzed (Amino acid profile construction and analysis of natural nanobodies). For example, the analysis showed the percentage of nanobodies containing CDR2 with lengths 4, 5, or 6 amino acids (a.a). are 32%, 61%, and 1.7% respectively, Applicants thus chose to use CDR2 with a length of 5 a.a. to recapitulate the most prevalent CDR2 length. In contrast, McMahon et al.₆ used an equivalent CDR2 length of 4 a.a., while Moutel et al.⁷ used an equivalent length of 6 a.a. (FIG. 5).

[0152] VHH libraries were constructed by ligation of PCR products in three stages, with each stage randomizing one of the three CDRs. Primers used and PCR cycling conditions for each primer pair are listed in Table 12. Primers were synthesized by IDT (www.idtdna.com) using the standard DNA oligo synthesis and purified by desalting without PAGE purification, Applicants find the level of synthesis errors with standard oligo synthesis and desalting purification do not have significant impact on the functionality of the nanobody library. At each stage, PCR was performed using a high-fidelity DNA polymerase without strand displacement activity, using Phusion DNA polymerase (New England Biolabs, M0530L). Importantly, 65° C. was used as the elongation temperature to avoid hairpin opening during DNA elongation. PCR products with correct size were purified by DNA agarose gel extraction. Ligation and phosphorylation of PCR products were performed simultaneously using T4 DNA ligase (New England Biolabs, M0202L) and T4 Polynucleotide Kinase (New England Biolabs, M0201L). Ligation products with the correct size were purified by DNA agarose gel extraction using NucleoSpin Gel and PCR Clean-Up Kit (Takara, 740609.250, this kit was used for all DNA agarose gel extraction steps in this study). Purified ligation products were quantified with Qubit 1× dsDNA HS Assay Kit (ThermoFisher Scientific, Q33230, this kit was used for all Qubit measurements in this study) using Qubit 3 Fluorometer.

[0153] CDR2 was randomized in stage one, PCR templates at this stage were equal molar mixtures of plasmids carrying DNA encoding frames, including three frame1 versions, one frame2, three frame3 versions and one frame4. The three versions of frame1 and frame3 were derived from consensus sequence extracted from natural VHH a.a. profile, the A3 VHH′ and a GFP binding VHH¹⁶. Amino acid sequences of the frames are shown in FIG. 2.

[0154] CDR1 was randomized in stage two, 200 ng of ligation product from the first stage were digested by NotI-HF (New England Biolabs, R3189S) and heat denatured, the entire digestion product was used as template for PCR in stage two. Ligation product of stage two was subject to one round of ribosome display and anti-Myc selection (below), the entire recovered RNA was reverse transcribed and PCR amplified and purified.

[0155] 270 ng of this RT-PCR product was used as template for PCR in stage three to randomize CDR3. Ligation product of stage three was purified by DNA agarose gel extraction. The purified ligation product was then digested by DraI (New England Biolabs, R0129S) and a fragment of ˜680 bp in size was purified by DNA agarose gel extraction to get the final VHH library, referred to as the input library.

[0156] High throughput full-length sequencing of VHH library. Sequencing libraries from VHH DNA libraries were prepared by two PCR steps using primers and PCR cycling conditions listed in Table 12. Equal mixtures of Phusion DNA polymerase (New England Biolabs, M0530L) and Deep Vent DNA polymerase (New England Biolabs, M0258L) were used for both PCRs to ensure efficient amplification. PCR cycle number was chosen to avoid over-amplification and typically falls between 5 to 15.

[0157] In the first PCR, Illumina universal library amplification primer binding sequence and a stretch of variable lengths of random nucleotides were introduced to the 5′ end of library DNA. And similarly, Illumina universal library amplification primer binding sequence and a stretch of variable lengths of index sequence are introduced to the 3′ end of library DNA. Eight different lengths were used for both random nucleotides and index to create staggered VHH sequences in the sequencing library, this arrangement is required for high quality sequencing of single amplicon libraries on an Illumina Miseq instrument. The product of the first PCR was purified by column clean-up using NucleoSpin Gel and PCR Clean-Up Kit and the entire sample was used as template for the second PCR.

[0158] In the second PCR, Illumina universal library amplification primers were used to generate sequencing library. Sequencing libraries were purified by DNA agarose gel extraction, quantified using Qubit 3 Fluorometer, and sequenced on an Illumina Miseq instrument using MiSeq Reagent Nano Kit v2 (500-cycles) (Illumina, MS-103-1003), no PhiX control library spike-in was used. Sequencing run setup was: paired end 2×258 with no index read. Index in the library was designed as inline index, so a separate index read was not required. Raw reads are separated by index, trimmed to remove N bases and bases with a quality score of less than 10 prior to downstream analysis.

[0159] Ribosome display. VHH DNA library containing a specified amount of diversity was first amplified using a DNA recovery primer pair listed in Table 12. Equal mixtures of Phusion DNA polymerase (New England Biolabs, M0530L) and Deep Vent DNA polymerase (New England Biolabs, M0258L) were used for the PCR. PCR cycle number was chosen to avoid over-amplification and typically falls between 5 and 15. In a standard preparation, 200-500 ng of the purified PCR product was used as DNA template in 25 μl of coupled in vitro transcription and translation reaction using PURExpress In Vitro Protein Synthesis Kit (New England Biolabs, E6800L). The reaction was incubated at 37° C. for 30 minutes, then placed on ice, and 200 μl ice cold stop buffer (10 mM HEPES pH 7.4, 150 mM KCl, 2.5 mM MgCl₂, 0.4 μg/μl BSA (New England Biolabs, B9000S), 0.4 U/μl SUPERase•In (ThermoFisher Scientific, AM2696), 0.05% TritonX-100) was then added to stop the reaction. This stopped ribosome display solution was used for binding to immobilized protein targets during in vitro selection. The amount of DNA template, volume of coupled in vitro transcription and translation reaction, and volume of stop buffer were scaled proportionally when different volumes of stopped ribosome display solution was needed. 1 to 8× standard preparations were used for each selection round with the first round using 8× standard preparations, second round using 2× standard preparations and third round using 1× standard preparation.

[0160] In vitro selection. Target proteins were immobilized to magnetic beads by first coating protein G magnetic beads (ThermoFisher Scientific, 10004D) with anti-Flag antibody (Sigma-Aldrich, F1804), then incubating antibody-coated beads with cell lysate or cell media containing 3×Flag tagged target proteins at 4° C. for 2 hours. For anti-Myc selection, magnetic beads were coated by anti-Myc antibody (ThermoFisher Scientific, 13-2500) only. 100 μl of beads was used for the first round of selection, and 50 μl of beads was used for subsequent rounds. The beads were washed three times with PBST (PBS, ThermoFisher Scientific, with 0.02% TritonX-100). Stopped ribosome display solutions were first incubated with antibody-coated beads (without targets) at 4° C. for 30 minutes for pre-clearing of non-specific and off-target binders, the solution were then transferred to target immobilized beads and incubated at 4° C. for 1 hour, the target immobilized beads were then washed 4 times with wash buffer (10 mM HEPES pH 7.4, 150 mM KCl, 5 mM MgCl₂, 0.4 μg/μl BSA (New England Biolabs), 0.1 U/μl SUPERase•In (ThermoFisher Scientific), 0.05% TritonX-100). After washing, beads were resuspended in TRIzol Reagent (ThermoFisher Scientific, 15596026), and RNA was extracted from the beads, 25 μg of linear acrylamide (ThermoFisher Scientific, AM9520) were used as co-precipitant during RNA extraction. Reverse transcription of extracted RNA was performed using Maxima H Minus Reverse Transcriptase (ThermoFisher Scientific) and primer as described in Table 12, row 64. The reverse transcription reaction was purified using SPRIselect Reagent (Beckman Coulter) to obtain purified cDNA. Purified cDNA was amplified by PCR using equal mixtures of Phusion High-Fidelity DNA polymerase and Deep Vent DNA polymerase. PCR cycle number (Table 12) was chosen to avoid over-amplification and typically falls between 10 to 25. This PCR condition ensures efficient full-length product synthesis at each cycle and is required to faithfully amplify nanobody genes without CDR shuffling, a phenomenon¹⁸ that could otherwise cause selection failure. The PCR product was purified by DNA agarose gel extraction. The purified PCR product was used for library generation for high throughput full-length sequencing or as DNA input for ribosome display reaction (coupled in vitro transcription and translation) to perform additional rounds of in vitro selection.

[0161] One round of anti-Myc selection was performed on the nanobody library with CDR1 and 2 randomized to enrich for correct-frame sequences. Several factors can in principle contribute to the presence of out-of-frame sequences after anti-Myc selection: (1) Non-specific binding of RNA or protein to magnetic beads; (2) translation through alternative start codons downstream of areas containing out-of-frame errors; and/or (3) inefficient binding of anti-Myc antibody to the expressed Myc peptide that is located between the VHH protein and ribosome. Applicants disfavor (1), because although their input library contained 27.5% full-length sequences, the remaining sequences that contained errors do not interfere with full-length sequences and are reduced to <10% after three rounds of RBD selection (FIG. 6c), suggesting that these erroneous sequences or their encoded peptides do not non-specifically stick to beads at significant levels to impact binder selection.

[0162] A control experiment was performed to demonstrate the efficiency of the ribosome display and selection protocol: SR6c3 sequence was linked with 5′ and 3′ sequence elements for ribosome display and serves as control input DNA, 100 ng of control input DNA was displayed by ribosome display in a reaction volume of 10 μl, and bond to 500 μl RBD coated beads, washed and total RNA was extracted from the beads. 7,910 ng total RNA was recovered, among which 989 ng is estimated to be SR6c3 RNA (⅛ of total, calculated by mass ratio of VHH RNA, 649 nt, to E. Coli. ribosomal RNAs, 4,568 nt), representing a coverage rate of 19× in the output.

[0163] CDR-directed clustering analysis. Computational analysis for CDR-directed clustering was performed using custom python scripts. Paired end sequences were merged to form full-length VHH sequences. Merged VHH sequences were quality trimmed and translated into VHH protein sequence, which were separated into CDRs and frames (segments) as described in the Amino Acid Profile Construction section. Two VHHs were determined to have similar CDRs via the following steps. First, the ungapped sequence alignment score (match score) was calculated for each CDR of the two VHHs as the sum of BLOSUM62³⁰ amino acid pair scores at each aligned position. (If two CDRs have different lengths, their sequence alignment score was set to −5 by default.) The alignment scores of any two pairs of CDRs were summed to yield three scores, and if at least one of the three was larger than 35 (FIG. 6b), the two VHHs were defined as having similar CDRs. Next, VHHs with similar CDRs were grouped by a two-step process. In the first step, Applicants chose as VHH cluster-forming “seeds” those VHHs that were called as similar to at least 5 other VHHs (all remaining VHHs were not considered for clustering). In the second step, Applicants iteratively selected a seed VHH with at least 5 other similar (>35 match score) seed VHHs, and grouped all of them into one cluster, removing them from the seed VHH pool, and iterated this procedure until no seed VHHs remained. For RBD, there were 83,433 seeds in the first step, and 83,392 were grouped in clusters in the second step. For EGFP, 71,210 of 71,220 seeds were grouped in clusters (Table 15). This heuristic was fast in a standard computing environment with multiprocessing capabilities.

[0164] A representative sequence to illustrate each CDR in each cluster was chosen as the most frequent CDR sequence in the cluster (the chose representatives for CDR1,2, and 3 may not necessarily be from the same sequence, and are used only for illustrative purposes for each cluster as in Table 7 and 8; whole VHH sequences were used for gene synthesis and all downstream experiments). A consensus sequence was generated for each CDR, where each position in the CDR was represented by a 6 character string, such that the first and fourth character were the single letter code for the top and the second most abundant amino acid at the position, respectively, and the following two characters (second and third for the most abundant; fifth and sixth for the second most abundant), were their frequency, respectively (ranging from 00 for <34% to 99 for 100%). The consensus sequence for a CDR was recorded as a single “BOO” when the standard deviation of the lengths of all CDRs was greater than 1. CDR scores were calculated by summing a score for each position in the CDR consensus sequence, with scores of 3, 2, 1 for positions where the most abundant amino acid had frequencies greater than 80%, 50%, or less, respectively, and a score of 0 for CDRs with a consensus sequence of a single “BOO” (Table 7 and Table 8). Representative whole nanobody sequence for each cluster was selected as the one with the maximal sum (max-sum) of all CDR similarity score between the nanobody and all other nanobodies in the cluster. This max-sum representative nanobody sequence selection process minimizes the impact of random errors introduced during NGS library preparation and sequencing by imposing a scoring penalty on sequences containing random errors.

[0165] Mean distance to diagonal was calculated based on squares of residuals, where the residual=y−x, the distance to diagonal (the half diagonal length of the square of residual)=\sqrt{square of residual/2}. The mean distance to diagonal represents the average distance of data points to the diagonal line in a scatter plots of two amino acid profiles and is a measure of the difference between the two amino acid profiles.

[0166] Protein expression and purification. Target proteins used for in vitro selection and ELISA were prepared by transiently transfecting HEK293T cells with plasmids carrying either spike RBD with C-terminal 3×Flag tag and N-terminal signal peptide of spike (RBD-3×Flag), or EGFP with C-terminal 3×Flag tag (EGFP-3×Flag). Cell culture media (for RBD-3×Flag) or lysate of cell pellet (for EGFP-3×Flag) were used for coating magnetic beads or plates. VHHs with C-terminal 6×His tag (VHH-6×His) were purified by expressing in E. coli., followed by purification using HisPur Cobalt Resin (ThermoFisher Scientific, 89964). Briefly, VHH-6×His plasmids were transformed into T7 Express E. Coli. (New England Biolabs, C25661), single colonies were transferred into 10 ml LB media and grown at 37° C. for 2-4 hours (until OD reached 0.5-1), the culture was chilled on ice, then IPTG was added to a final concentration of 10 μM. The culture was then incubated on an orbital shaker at room temperature (RT) for 16 hours. Bacterial cells were pelleted by centrifugation and lysed in B-PER Bacterial Protein Extraction Reagent (ThermoFisher Scientific, 78248) supplemented with rLysozyme (Sigma-Aldrich, 71110), DNase I (New England Biolabs, M0303S), 2.5 mM MgCl₂ and 0.5 mM CaCl₂. Bacterial lysates were cleared by centrifugation and mixed with wash buffer (50 mM Sodium Phosphate pH 7.4, 300 mM Sodium Chloride, 10 mM imidazole) at 1:1 ratio, and then incubated with 40 μl HisPur Cobalt Resin for 2 hours at 4° C. The resins were then washed 4 times with wash buffer. Proteins were eluted by incubating resin in elution buffer (50 mM Sodium Phosphate pH 7.4, 300 mM Sodium Chloride, 150 mM imidazole) at RT for 5 minutes. Purified protein samples were quantified by measuring absorbance at 280 nm on a NanoDrop Spectrophotometer.

[0167] ELISA assay for VHH binding to RBD. Maxisorp plates (BioLegend, 423501) were coated with 1 μg/ml anti-Flag antibody (Sigma Aldrich, F1804) in coating buffer (BioLegend, 421701) at 4° C. overnight. Plates were washed once with PBST (PBS, ThermoFisher Scientific, with 0.02% TritonX-100), a 1:1 mixture of HEK293T cell culture media containing secreted RBD-3×Flag and blocking buffer (PBST with 1% nonfat dry milk) was added to the plates and incubated at RT for 1 hour. RBD coated plates were then blocked with blocking buffer at RT for 1 hour. Plates were washed twice with wash buffer and purified VHHs-6×His diluted in blocking buffer were added to the plates and incubated at RT for 1 hour. Plates were washed three times with wash buffer, HRP conjugated anti-His tag secondary antibody (BioLegend, 652503) diluted 1:2000 in blocking buffer was then added to the plates and incubated at RT for 1 hour. Plates were washed three times with wash buffer and TMB substrate (BD, 555214) was added to the plate and incubate at RT for 10 to 20 minutes. Stop buffer (1N Sulfuric Acid) was added to the plates once enough color developed. Quantification of plates was performed by measuring absorbance at 450 nm on a BioTek synergy H1 microplate reader. Data reported were background subtracted. Two levels of background subtraction were performed: (1) subtracting absorbance measured from wells incubated with blocking buffer only (without purified VHHs-6×His) from sample measurements (reflecting background absorbance by plates); and (2) subtracting absorbance from each VHH incubated wells coated only with anti-flag antibody and without RBD (reflecting non-specific binding of each VHH).

[0168] Pseudotyped SARS-CoV-2 lentivirus production and lentiviral production for transductions. Lentivirus production was performed as previously described (Gentili et al., 2015). Briefly, HEK293T cells were seeded at 0.8×10⁶ cells per well in a 6 well plate and were transfected the same day with TransIT®-293 Transfection Reagent and a mix of DNA containing 1 μg psPAX, 1.6 μg pTRIP-SFFV-EGFP-NLS and 0.4 μg pCMV-SARS2ΔC-gp41. Medium was changed after overnight transfection. SARS-CoV-2 S pseudotyped lentiviral particles were collected 30-34 hours post medium change and filtered on a 0.45 μm syringe filter. To transduce HEK293T ACE2 the same protocol was followed, with a mix containing 1 μg psPAX, 1.6 μg pTRIP-SFFV-Hygro-2A-TMPRSS2 and 0.4 μg pCMV-VSV-G.

[0169] SARS-CoV-2 S pseudotyped lentivirus neutralization assay. The day before the experiment, 5×10³ HEK293T ACE2/TMPRSS2 cells per well were seeded in 96 well plates in 100 μl. On the day of lentivirus harvest, SARS-CoV-2 S pseudotyped lentivirus was incubated with VHHs or VHH elution buffer in 96 well plates for 1 hour at RT (100 μl virus+50 μl of VHH at appropriate dilutions). Medium was then removed from HEK293T ACE2/TMPRSS2 cells and replaced with 150 μl of the VHH+pseudotyped lentivirus solution. Wells in the outermost rows of the 96 well plate were excluded from the assay. After overnight incubation, medium was changed to 100 μl of fresh medium. Cells were harvested 40-44 hours post infection with TrypLE (Thermo Fisher), washed in medium, and fixed in FACS buffer containing 1% PFA (Electron Microscopy Sciences). Percentage GFP was quantified on a Cytoflex LX (Beckman Coulter) and data were analyzed with FlowJo. During development of the pseudotyped lentivirus neutralization assay, Applicants found HEK293T ACE2/TMPRSS2 cells were highly susceptible to pseudovirus infection and produced consistent inhibition measurements, while Vero E6 and Caco-2 cells showed lower susceptibility in Applicants' GFP detection-based assays.

[0170] Affinity maturation. Error-prone PCR was used to introduce random mutations across the full length of selected VHH DNA sequences. 0.1 ng of plasmid carrying DNA sequence encoding each selected VHH were used as template in PCR reactions using Taq DNA polymerase with reaction buffer (10 mM Tris-HCl pH 8.3, 50 mM KCl, 7 mM MgCl₂, 0.5 mM MnCl₂, 1 mM dCTP, 1 mM dTTP, 0.2 mM dATP, 0.2 mM dGTP) suitable for causing mutations in PCR products. Mutagenized library for input to CeVICA was made by ligating PCR products of error-prone PCR that carries VHH to DNA fragment containing the remaining elements required for ribosome display. Three rounds of ribosome display and in vitro selection were performed on the mutagenized library (pre-affinity maturation, after error-prone PCR) as described in the In vitro selection section, during which the incubation time of the binding step was kept between 5 seconds to 1 minute to impose a stringent selection condition, additional error-prone PCR was not performed during the selection cycles. The output library (post-affinity maturation) was sequenced along with the pre-affinity maturation library as described in the High throughput full-length sequencing of VHH library section.

[0171] Identification and ranking of beneficial mutations. To identify potential beneficial mutations for each selected VHH Applicants built an amino acid profile (a.a. profile) table for each VHH family in the pre- and post-affinity maturation library, and identified amino acids with increased frequency in the post-affinity maturation population compared to their pre-maturation frequency. For each VHH parental sequence, an a.a. profile was built of the percent of each a.a. across all VHH sequences originated from one parental VHH in the pre-affinity maturation library (“pre-a.a. profile”) and in the post-affinity maturation library (“post-a.a. profile”). A percent point change table was generated by subtracting the pre-a.a. profile from the post-a.a. profile, describing the change of frequency of each observed amino acid at each position of the VHH protein following affinity maturation.

[0172] Applicants defined a putative beneficial mutation as either (1) the non-parental amino acid with the biggest increase in frequency if its increase is at least 0.5 percentage points; the score is the difference from the parental amino acid frequency; or (2) the non-parental amino acid with the biggest increase after the parental amino acid if the increase is at least 1.5 percentage points; the score is the percent point change of the beneficial mutation. To avoid too many proximal putative beneficial mutations (which may cause structural incompatibility), a putative beneficial mutation was discarded if it (1) is outside the CDRs; (2) is less than 3 positions away from another beneficial mutation (“nearby mutation) and has a smaller beneficial mutation score than the nearby mutation; and (3) co-occurs less than twice with the nearby mutation. From this final list of putative beneficial mutations, different combinations were picked and incorporated into each VHH parental sequence that include one combination of all beneficial mutations in CDRs, one combination of the top-3 ranked (by beneficial mutation score) mutations in frames, and at least one combination of both CDR mutations and frame mutations (Table 9).

[0173] Biolayer Interferometry. Biolayer Interferometry assays were performed on the Octet RED384 instrument (sartorius) using anti-GST biosensors (sartorius, 18-5096). Assays were performed in sample buffer (PBS with 0.05% Tween-20, 0.5 mg/ml BSA). VHHs were loaded on anti-GST biosensors in sample buffer containing bacteria lysates of E. Coli. expressing GST tagged VHHs (100-fold dilution), loading level of 1 nm to 1.2 nm were achieved. VHH loaded sensors were dipped in sample buffer containing recombinant RBD (ThermoFisher, RP-87678) for 200 seconds to record association, then dipped in sample buffer for 1200 seconds to record dissociation. VHH loaded sensors dipped in sample buffer containing no RBD were used as reference sample sensors for background subtraction, no signal increase was observed for reference sample sensors which indicates no non-specific binding to loaded VHHs. Non-specific binding of RBD to anti-GST biosensors were tested by dipping anti-GST biosensors not loaded with VHHs in 20 nM RBD, no signal increase was observed during the incubation indicating that RBD does not non-specifically bind to anti-GST biosensors. Data analysis were performed using the Octet Data analysis software 10.0, Savitzky-Golay Filtering was used to remove noise and curves were fitted using 1:1 binding model.

[0174] Size exclusion chromatography. Size-exclusion chromatography were performed on an AKTA Pure 25M system with a Superdex increase 75 10/300 GL column (cytiva). 50 μg to 100 ug VHHs were loaded onto the column in running buffer (20 mM HEPES, 150 mM NaCl, PH 7.5), a flow rate of 0.5 ml/min was used and UV280 readings were recorded for 1.25 column volumes. Peak analysis was performed using the UNICORN 7 software (cytiva).

[0175] Thermal stability assays. Protein thermal shift assays were performed using the Protein Thermal Shift Dye Kit (ThermoFisher, 4461146) according to the manufacturer's instructions. 4 μg of VHHs were diluted in 1× reaction buffer and measurements were performed on a Bio-Rad CFX384 real-time PCR system using a melt curve protocol (30° C.-98° C., 1° C. increment, hold for 20 seconds then read plates using FRET channel). 98° C. heat denaturation was performed by diluting VHH sample to 1 μM in PBS containing 100 ng/ul BSA, then heating at 98° C. for 10 minutes then holding at 4° C. using a PCR machine. ELISA assay of VHH samples prior to and after complete thermal denaturation were performed as previously described (ELISA assay for VHH binding to RBD).

### Tables

[0176] Table 10A-10B. natural nanobody (VHH) sequences selected for calculating natural VHH amino acid profile. Table 10A. Amino acid sequences of 298 unique nanobodies selected from Protein Data Bank to represent natural nanobodies (PDB298, sheet: unique_VHH_PDB) and Table 10B. amino acid sequences of 1,030 unique nanobodies selected from abYsis to represent natural nanobodies (abYsis1030, sheet: unique_VHH_abYsis). The sequences were separated into 4 frames and 3 CDRs. (SEQ ID NOS: 5873-15101)

TABLE 10A

| | | SEQ | | SEQ | | | SEQ | |
|---|---|---|---|---|---|---|---|---|
| | | ID | | ID | | | ID | |
| | | NOS: | SEQ | NOS: | | | NOS: | |
| | SEQ ID NOS: | 6171- | ID NOS: | 6767- | SEQ ID NOS: | SEQ ID NOS: | 7647- | |
| PDB | 5873-6170 | 6468 | 6469-6766 | 7058 | 7059-7356 | 7357-7646 | 7944 | Source |
| ID | Frame1 | CDR1 | Frame2 | CDR2 | Frame3 | CDR3 | Frame4 | Organism |
| 3G9A | DVQLQESGGGSVQA | DTFS | MAWFRQAPGK | RDGT | TTYAGSVKGRFTISRDDAK | DSGTQLGYV | DYWGKGT | Camelus |
| | GGSLRLSCAASG | SYS | ECELVSNIL | | NTVYLQMVNLKSEDTARYY | GAVGLSCLD | QVTVSS | Dromedarius |
| | | | | | CAA | YVM | | (9838) |
| 4I0C | QVQLQESGGGSVQA | LSTTV | MAWFRQAPGK | TGDG | PYYADSVKGRFTISQDNAK | KTGAFSYGS | NHWGQG | Camelus |
| | GGSLRLSCEASG | | EREGVAAIY | F | NRMYLQMNSLEPEDTAMY | LWWMSRAY | TQVTVSS | Dromedarius |
| | | | | | YCAA | | | (9838) |
| 2X6M | GQLVESGGGSVQAG | IDSSS | MGWFRQRPGK | GLGG | TAYADSVKDRFTISRDNAE | KFSPGYCGG | GYWGQG | Camelus |
| | GSLRLSCAASG | YC | EREGVARIN | VK | NTVYLQMNSLKPEDTAIYY | SWSNF | TQVTVSS | Dromedarius |
| | | | | | CAA | | | (9838) |
| 2X89 | QVQLQESGGGSVQA | YTDS | MAWFRQAPGK | SGRDI | TYYADSVKGRFTFSQDNA | DIPLRCRDIV | RYWGQGT | Camelus |
| | GGSLRLSCAASG | RYC | EREWVARIN | | KNTVYLQMDSLEPEDTATY | AKGGDGF | QVTVSS | Dromedarius |
| | | | | | YCAT | | | (9838) |
| 3JBC | QVQLQESGGGSVQT | YTQS | MGWFRQAPGK | RFFGT | AYYADSVKGRFTISQDKAK | GQGCLTTIQA | NAWGQGT | Camelus |
| | GGSLRLSCAASE | SAC | EREGVAGIS | | NTVYLQMNSLKPEDTAIYY | LGGAYGY | QVTVSS | Dromedarius |
| | | | | | CAA | | | (9838) |
| 3JBD | QVQLQESGGGSAQT | FTFS | MAWFRQAPEK | TSGV | AYYADSVLGRFTISQDNAK | TSISCSSGY | MFWGQG | Camelus |
| | GGSLRLSCAASG | HGY | EREWVACVR | S | STLYLQMNNLKPEDTAMYY | | TQVTVSS | Dromedarius |
| | | | | | CAA | | | (9838) |
| 3JBE | QVQLQESGGGSVQA | YQYS | MAWFRQVLGE | TYNG | MRYADTVKGRFTVSQDKD | GRWRFGDIC | NYWGQGT | Camelus |
| | GGSLRLSCAASG | LLC | GREGVAFIT | A | KNTVYLQMNSLKPEDTAIY | HEGSGY | QVTVSS | Dromedarius |
| | | | | | YCAA | | | (9838) |
| 3JBF | QVQLQESGGGSVQA | ITYC | MGWYRQVRGK | TNDG | TDYADSVKGRFTISQNHAT | TWRWSCPLD | QYWGQG | Camelus |
| | GGSLTLSCAASG | | EREGVAFIK | T | KTVYLQMNSLKPEDTAAYY | PEGY | TQVTVSS | Dromedarius |
| | | | | | CAA | | | (9838) |
| 3JBG | QVQLQESGGGSVQA | YIPSA | CMRWFRQAPK | RGGY | TWHADSVKGRFTISGDNA | SNTCPGASA | RSWGQGT | Camelus |
| | GGSLRLSCAASE | N | EREWVASVL | | KTAAYLQMNSLKPEDTAIY | DF | QVTVSS | Dromedarius |
| | | | | | YCAY | | | (9838) |
| 3OGO | QVQLVESGGALVQP | FPVN | MRWYRQAPGK | SAGD | SSYEDSVKGRFTISRDDAR | NVGF | EYWGQGT | Camelus |
| | GGSLRLSCAASG | RYS | EREWVAGMS | R | NTVYLQMNSLKPEDTAVYY | | QVTVSS | Dromedarius |
| | | | | | CNV | | | (9838) |
| 3DWT | QVQLVESGGGSVQA | GSEY | LGWFRQAPGQ | SMGG | TYYADSVKGRFTISRDNAK | VRGYFMRLP | RYWGQGT | Camelus |
| | GGSLRLSCTASG | SYST | EREAVAAIA | L | NTVTLQMNNLKPEDTAIYY | SSHNF | QVTVSS | Dromedarius |
| | | FS | | | CAA | | | (9838) |
| 5C2U | QVQLQESGGGLVQP | DYYA | IGWFRQAPGK | SRDG | TYYPDAVKGRFTISRDNAK | DRRQRWGP | VYWGQGT | Camelus |
| | GGSLRLSCVVSG | | EREGVAAIS | S | NTVYLQMNSLKPEDTAVYY | YYYLSALEY | QVTVSS | Dromedarius |
| | | | | | CAA | | | (9838) |
| 5KWL | QVQLQESGGGSVQP | YAVS | MGWFRQAPGK | SSGV | TTYADSVKGRFTISRDNAK | GFGLSLSRYT | AYWGQGT | Camelus |
| | GGSLTLSCAASG | RYS | ENEGVAAID | G | DTVYLRMNSLKPEDTAIYY | Y | QVTVSS | Dromedarius |
| | | | | | CAS | | | (9838) |
| 5KU2 | QVQLQESGGGSVQT | YAVS | MGWFRQAPGK | SSGV | TTYADSVKGRFTISRDNAK | GFGLSLSRYT | AHWGQGT | Camelus |
| | GGSLTLSCAASG | LYS | ELEGVAGIS | D | DTMYLQMNSPKPEDTAIYR | Y | QVTVSS | Dromedarius |
| | | | | | CAA | | | (9838) |
| 5HGG | QVQLQESGGGLVQA | FTLDS | IGWFRQAPGK | ASGG | TNYADSVKGRFTISRDNAK | DHPGLCTSE | EVWGQGT | Vicugna |
| | GGSLRLSCAASG | YA | EREGVSCIS | S | NTVYLQMNSLKSEDTAVYY | SGRRRYL | QVTVSS | Pacos |
| | | | | | CAA | | | (30538) |
| 5MY6 | QVQLQESGGGSVQA | YIFNS | MGWYRQSPGR | GDGD | TWHKESVKGRFTISQDNVK | CYNLE | TYWGQGT | Camelus |
| | GGSLKLTCAASG | CG | ERELVSRIS | | KTLYLQMNSLKPEDTAVYF | | QVTVSS | Dromedarius |
| | | | | | CAV | | | (9838) |
| 3QSK | QVQLVESGGGLVQA | YHHP | MGWFRQAPGK | SGGG | TLYADSVKGRFTISRDKGK | GGHHLRDHT | GQWGQG | Camelus |
| | GGSLRLSCAASG | YIY | EREGVAAMD | G | NTVYLQMDSLKPEDTATYY | Y | TQVTVSS | Dromedarius |
| | | | | | CAA | | | (9838) |
| 1RI8 | DVQLVESGGGSVQA | YKDR | MGWFRRAPGK | SSGR | TAYADSVKGRFTISRDVAL | GWSSLGSCG | NYWGQGT | Camelus |
| | GGSLRLSCAVSG | NYC | EREGVAVID | | DTAYLQMNSLKPEDTAMY | TNRNRY | QVTVSS | Dromedarius |
| | | | | | YCAA | | | (9838) |
| 1RJC | EVQLQASGGGSVQA | ATSS | MGWFRQAPGK | TGRG | TAYADSVQGRLTISLDNAK | DTSTWYRGY | SYWGQGT | Camelus |
| | GQSLRLSCATSG | SNC | EREGVAVID | N | NTLYLQMNSLKPEDTAMYY | CGTNPNYF | QVTVSS | Dromedarius |
| | | | | | CAA | | | (9838) |
| 1ZMY | QVQLVESGGGSVQA | YTIGP | MGWFRQAPGG | MGGG | TYYADSVKGRFTISRDNAK | DSTIYASYYE | DSWGQGT | Camelus |
| | GGSLRLSCTASG | YC | EREAVAAIN | I | NTVTLQMNSLKPEDTAMY | CGHGLSTGG | QVTVSS | Dromedarius |
| | | | | | YCAA | YGY | | (9838) |
| 1MVF | QVQLVESGGGSVQA | FTYS | MGWFRQAPGK | IDNGN | TIYADSVQGRFTISQDNAK | SSRWMDYSA | NSWGQGT | Camelus |
| | GGSLRLSCAASG | RKY | EREGVAAIF | | NTVYLQMNSLKPEDTAMY | LTAKAY | QVTVSS | Dromedarius |
| | | | | | YCAA | | | (9838) |
| 1KXT | QVQLVASGGGSVQA | YTFS | MGWYRQAPGK | SDGS | ANYADSVKGRFTISRDNAA | GPGSGKLVV | NYWGQGT | Camelus |
| | GGSLRLSCAASG | SYP | ECELSARIF | | NTAYLQMDSLKPEDTAVYY | AGRTCYGP | QVTVSS | Dromedarius |
| | | | | | CAA | | | (9838) |
| 1KXQ | QVQLVESGGGSVQA | YTDT | VGWFRQAPGK | RRTG | TYSADSVKGRFTLSQDNN | GNSVRLASW | FYWGQGT | Camelus |
| | GGSLSLSCAAST | | EREGVAAIY | Y | KNTVYLQMNSLKPEDTGIY | EGY | QVTVSS | Dromedarius |
| | | | | | YCAT | | | (9838) |
| 1KXV | QVQLVESGGGTVPA | NTLC | MSWYRRAPGK | NDGT | TTYVDSVAGRFTISQGNAK | SLRYGLPGC | IPWGQGT | Camelus |
| | GGSLRLSCAASG | TYD | GRDFVSGID | | NTAYLQMDSLKPDDTAMY | PI | QVTVSS | Dromedarius |
| | | | | | YCKP | | | (9838) |
| 1XFP | DVQLQASGGGSVQA | YTIGP | MGWFRQAPGK | SGGG | TYYADSVKGRFTISQDNAK | DSTIYASYYE | DSWGQGT | Camelus |
| | GGSLRLSCAASG | YC | EREGVAAIN | S | NTVYLLMNSLEPEDTAIYY | CGHGLSTGG | QVTVSS | Dromedarius |
| | | | | | CAA | YGY | | (9838) |
| 3EBA | QVQLVESGGGSVQA | YTYI | SGWFRQAPGK | SSDG | TYYADSVKGRFTISQDNAK | TEVAGWPLDI | DYWGQGT | Camelus |
| | GGSLRLSCSASG | | GLEWVAAIR | T | NTVYLQMNSLKPEDTAMY | GIY | QVTVSS | Dromedarius |
| | | | | | YCAA | | | (9838) |
| 1G6V | QVQLVESGGGSVQA | YTVS | MGWFRQAPGK | GGS | TYYGDSVKGRFTISQDNAK | STVASTGWC | HYRGQGT | Camelus |
| | GGSLRLSCAASG | TYC | EREGVATIL | | NTVYLQMNSLKPEDTAIYY | SRLRPYDY | QVTVSS | Dromedarius |
| | | | | | CAG | | | (9838) |
| 2P46 | QVQMVESGGGLVQA | YAYT | MGWFRQAPGK | SGGG | TLYADSVKGRMTISRDKGK | GGYELRDRT | GQWGQG | Camelus |
| | GGSLRLSCAASG | YIY | EREGVAAMD | G | NTVYLQMDSLKPEDTATYY | Y | TQVTVSS | Dromedarius |
| | | | | | CAA | | | (9838) |
| 6KSN | QVQLEESGGGSVQA | YMYS | MGWFRQAPGK | RGDH | TYYTDSVKGRFTISQDSAK | DFAHSFLLSV | SYWGQGT | Camelus |
| | GGSLRLSCAASG | TYST | EREGVAFIK | S | NTVSLQMNNLKPEDTAIYY | HSGAGQY | QVTVSS | Dromedarius |
| | | YC | | | CAA | | | (9838) |
| 5U65 | DVQLQESGGGSVQA | LTISN | MRWFRQAPGK | SAGT | TYYADSVKGRFTMSRDNA | STRVWGGYC | NDWGQG | Camelus |
| | GGSLRLSCVVSG | YC | GREGVASIN | | KNTVYLDMNSLKPEDTAIY | GGLDDATN | TQVTVSS | Dromedarius |
| | | | | | YCAS | | | (9838) |
| 5U64 | DVQLQESGGGSVQA | VTST | IGWFRQAPGK | FRGD | TYITDSVKGRFTISRDEDSD | DVNRGGFCY | SYWGQGT | Camelus |
| | GGSLRLSCVASG | RPC | EREGVAVVN | S | TVYLQMNSLKPEDTATYYC | IEDWYF | QVTVSS | Dromedarius |
| | | | | | AA | | | (9838) |
| 1ZVY | DVQLVESGGGSVQA | STDSI | MTWFRQAPGK | THTG | TYYTDSVKGRFTISQDKAK | TRKYVPVRF | DYWGQGT | Camelus |
| | GGSLRLSCAASG | EY | AREGVAALY | N | NMAYLRMDSVKSEDTAIYT | ALDQSSY | QVTVSS | Dromedarius |
| | | | | | CGA | | | (9838) |
| 6JB5 | DVQLVESGGGSVQA | STDSI | MTWFRQAPGK | THTG | TYYTDSVKGRFTISQDKAK | TRKAVPVRF | DYWGQGT | Camelus |
| | GGSLRLSCAASG | EY | AREGVAALY | N | NMAYLRMDSVKSEDTAIYT | ALDQSSY | QVTVSS | Dromedarius |
| | | | | | CGA | | | (9838) |
| 6DBA | QVKLEESGGGSVQA | HTYS | MGWFRQVPGK | VGGS | TWYADSVRDRFTISQDNAK | HRFCNTWSL | NVWGQGT | Camelus |
| | GGSLRLSCAASG | TYC | EREGVARIN | S | NTVYLQMNSLKLEDTAIYY | GTL | QVTVSS | Dromedarius |
| | | | | | CTL | | | (9838) |
| 5FOJ | QVQLQESGGGSVQV | DTFS | AAWFRQAPGK | SKRH | TSYADSVKGRFTISKDNAD | ADAIGLAEYW | KYWGQGT | Camelus |
| | GGSLRVACAASG | GYL | GREGVAAIN | T | NIMYLEMNSLKPEDTAIYYC | STPTLSAARY | QVTVSS | Dromedarius |
| | | | | | AA | | | (9838) |
| 5FUC | DVQFVESGGGSVHA | YIYST | MGWFRQAPGK | TNSG | TYYADSVKGRFTISQDNAK | RPSIRCASFS | KDWGQGT | Camelus |
| | GGSLRLNCATSG | YC | EREGVAHIY | R | NTVYLQMNSLKPEDTAIYY | ATEY | QVTVSS | Dromedarius |
| | | | | | CAA | | | (9838) |
| 5E7F | QVQLVESGGGSVQA | FTFD | MGWYHQAPGN | SDGS | TYYADSVKGRFTISRDNAK | ATTTVASPPV | GYWGQG | Camelus |
| | GGSLRLSCTASG | DSD | ECELVSAIF | | NTVYLQMNSLKPEDTAMY | RHVCN | TQVTVSS | Dromedarius |
| | | | | | YCAA | | | (9838) |
| 6XXP | QVQLQESGGGSVEA | WPYS | MNWFRQAPGK | STMS | IIFAESKAGQFTISQDNAKN | RRDYSLSSS | DYWGQGT | Camelus |
| | GGSLRLSCARSG | TYS | EREAVAGIS | G | TVYLQMNNLKPEDTAIYYC | SDDF | QVTVSS | Dromedarius |
| | | | | | AA | | | (9838) |
| 6XXN | QVQLQESGGGSVQA | YTDS | MSWFRQAPGK | TGRG | TSYADSVKGRFTISQDNAK | AACHFCDSL | ILWGQGT | Camelus |
| | GGSLRLSCTAPG | NYY | EREWVAGVN | S | NTMFLQMNSLKPEDTAIYY | PKTQDEY | QVTVSS | Dromedarius |
| | | | | | CAV | | | (9838) |
| 4KML | AVQLQESGGGLVQP | RTFS | MGWFRQAPGK | SSGD | SDYTDSVKGRFTISRDNAK | GLGIYIIRARG | DHWGQG | Lama |
| | GGSLRLSCAASG | SYN | GREFVASIT | K | NTMYLQMNNLKPEDTATY | GY | TQVTVSS | Glama |
| | | | | | YCAR | | | (9844) |
| 1YC7 | DVQLVESGGGSVQA | STYS | TGWYRQAPGK | SPGT | IYYQDSVKGRFTISRDNAK | QCGVRSIR | EYWGQGT | Camelus |
| | GGSLRLSCAVSG | PCT | EREWVSSIS | | NTVYLQMNSLQREDTGMY | | QVTVSS | Dromedarius |
| | | | | | YCQI | | | (9838) |
| 6U14 | QVKLEESGGGSVQA | HTYS | MGWFRQVPGK | VGGS | TWYADSVRDRFTISQDNAK | HRFANTWSL | NVWGQGT | Camelus |
| | GGSLRLSCAASG | TYA | EREGVARIN | S | NTVYLQMNSLKLEDTAIYY | GTL | QVTVSS | Dromedarius |
| | | | | | CTL | | | (9838) |
| 2P4A | QVQLVESGGGLVQA | YPWT | MGWFRQAPGK | SGGG | TLYADSVKGRFTISRDKGK | GGDALVATR | GRWGQG | Camelus |
| | GGSLRLSCAASG | YIY | EREGVAAMD | G | NTVYLQMDSLKPEDTATYY | Y | TQVTVSS | Dromedarius |
| | | | | | CAA | | | (9838) |
| 1ZVH | DVQLVESGGGSVQA | YIASI | LGWFRQAPGK | PAGG | PYYADSVKGRFTVSLDNAE | ARQGWYIPL | NYWGQGT | Camelus |
| | GGSLRLSCAASG | NY | EREGVAAVS | T | NTVYLQMNSLKPEDTALYY | NSYGY | QVTVSS | Dromedarius |
| | | | | | CAA | | | (9838) |
| 1ZV5 | DVQLVESGGGSVQA | VTYK | IGWFRQAPGK | SDGGI | TYYADSVKGRFTISQDNAK | GYRNYGQCA | RYWGQGT | Camelus |
| | GESLRLSCAASG | NYC | DREGVVFIN | | NTVYLQMNSLKPEDTASYY | T | QVTVSS | Dromedarius |
| | | | | | CAA | | | (9838) |
| 4OCN | QVQLQESGGGLVPA | RTFS | MAWFRQAPGK | WSGG | TYYADSVKGRFTISRDNAR | GTYYGTLSY | DFWGRGT | Lama |
| | GGSLRLSCVDSG | STV | EREFVATIR | N | NTVYLQMNSLKPEDTAVYY | KY | QVTVSS | Glama |
| | | | | | CAG | | | (9844) |
| 4LAJ | EVQLVESGGGLVQP | FTLDY | IGWFRQAPGK | DSDG | TYYADSVKGRFTISRDNAK | DCTVDPSLLY | DYYGKGT | Lama |
| | GGSLRLSCAASG | YS | EREGVSCIS | R | NTVYLQMNSLKPEDTAVYY | VM | QVTVSS | Glama |
| | | | | | CAT | | | (9844) |
| 6H7L | QVQLQESGGGLVQA | SIFAL | MGWYRQAPGK | SGGT | TNYANSVKGRFTISRDNAA | KDFGAIIYDY | DYWGQGT | Lama |
| | GGSLRLSCAASG | NI | QRELVAAIH | | NTVYLQMNSLKPEDTAVYY | | QVTVSS | Glama |
| | | | | | CNV | | | (9844) |
| 4KRM | QVKLEESGGGSVQT | RTSR | MGWFRQAPGK | WRGD | TGYADSVKGRFTISRDNAK | AAGSAWYGT | DYWGQGT | Lama |
| | GGSLRLTCAASG | SYG | EREFVSGIS | S | NTVDLQMNSLKPEDTAIYY | LYEY | QVTVSS | Glama |
| | | | | | CAA | | | (9844) |
| 4KRO | QVQLQESGGGLVQP | RTFS | MGWFRQAPGK | WSGG | TYYTDSVKGRFTISRDNAK | TYLSSDYSRY | DYWGQGT | Lama |
| | GGSLRLSCAASG | SYA | QREFVAAIR | Y | TTVYLQMNSLKPEDTAVYY | ALPQRPLDY | QVTVSS | Glama |
| | | | | | CAA | | | (9844) |
| 4KRP | EVQLVESGGGLVQA | RTFS | MGWFRQAPGK | WSSG | TYYADSVKGRFTISRDNAK | GYQINSGNY | DYWGQGT | Lama |
| | GGSLRLSCAASG | SYA | EREFVVAIN | S | NTMYLQMNSLKPEDTAVY | NFKDYEY | QVTVSS | Glama |
| | | | | | YCAA | | | (9844) |
| 4KSD | QVQLQESGGGLVQA | RTFN | MGWFRQAPGK | WSGE | TYYADSVKGRFTISRDNAK | RLTLGQF | DYWGQGT | Lama |
| | GGSLRLSCAASG | SAV | ERQFVATID | Y | NTVYLQMTSLKPEDTALYY | | QVTVSS | Glama |
| | | | | | CAA | | | (9844) |
| 4NBY | QVQLVESGGGLAQA | RTFS | MAWFRQPPGK | STGR | TYYADSVKGRFTISRDNAK | APYGANWYR | AYWGQGT | Lama |
| | GGSLRLSCAASG | MDP | EREFVAAGS | T | NTVYLQMNSLKPEDTAVYY | DEY | QVTVSS | Glama |
| | | | | | CAA | | | (9844) |
| 4NC0 | QVKLEESGGGLVQA | RTFS | VAWFRQAPGA | STGTS | TYYADSVKGRFTISRDNAK | NSQRTRLQD | DYWGQGT | Lama |
| | GGSLRLSCAASE | RYP | EREFVAVIS | | VTVYLQMNNLKREDTAVYF | PNEY | QVTVSS | Glama |
| | | | | | CAV | | | (9844) |
| 4N1H | QVQLQESGGGLVQA | RTFS | MGWFRQAPGK | RSGG | TKYADSVKGRFAISRDNDK | TTYASLSDTY | DDWGQG | Lama |
| | GASLKLSCAASG | SYA | EREFVAAIS | D | NTVWLRMNSLKPEDTAVY | IGEHIY | TQVTVSS | Glama |
| | | | | | YCAA | | | (9844) |
| 4MQT | QVQLQESGGGLVQA | FDFD | IGWFRQAPGQ | PSDG | TIYADSAKGRFTISSDNAEN | WTLFHSD | EYWGQGT | Lama |
| | GDSLRLSCAASG | NFDD | EREGVSCID | S | TVYLQMNSLKPEDTAVYVC | | QVTVSS | Glama |
| | | YA | | | SA | | | (9844) |
| 3R0M | AVQLQESGGGLVQA | RISSS | MGWFRQAPGK | WSGG | TDYADSVKGRFAISKDNAK | KWRPLRYSD | YDWGQGT | Lama |
| | GGSLRLSCTASG | YD | EREFVAAIS | T | NAVYLQMNSLKPEDTAVYY | YPSNSDY | QVTVSS | Glama |
| | | | | | CAA | | | (9844) |
| 4I13 | QVQLQESGGGLVQA | RLTV | IGWFRQAPGK | WGGG | TVYGESVEGRFTISRDIAKN | SRISYRVWN | TLWGRGT | Lama |
| | GASLRLSCAASE | DYA | EREFVAAIS | L | TMNLQMNVLRPEDTANYY | TIPYNKL | QVTVSS | Glama |
| | | | | | CAA | | | (9844) |
| 4I1N | QVQLQESGGGLVQA | RLTV | IGWFRQAPGK | WGGG | TVYGESVEGRFTISRDIAKN | SRISYAVWNT | TLWGRGT | Lama |
| | GASLRLSCAASE | DYA | EREFVAAIS | L | TMNLQMNVLRPEDTANYY | IPYNKL | QVTVSS | Glama |
| | | | | | CAA | | | (9844) |
| 4IDL | KVQLQQSGGGAVQT | NTASI | MGWYRRAPGK | TTGT | ADYGDFVKGRFTISRDNAN | DGRRFDGAR | ESWGQGT | Lama |
| | GGSLKLTCLASG | RA | QREWVASLT | | NAATLQMDSLKPEDTAVYY | WREY | QVTISS | Glama |
| | | | | | CNA | | | (9844) |
| 4IOS | QVQLVESGGGLVQA | RTFS | IGWFRQAPGK | WSTG | TYYGRSMKGRCAASRDNA | TLDWGKTLS | DYWGQGT | Lama |
| | GDSLRLSCAVSG | SNV | EREFVAAIS | S | KNTVALQLNSLKPEDTAVY | DEY | QVTVSS | Glama |
| | | | | | YCAA | | | (9844) |
| 4ORZ | EVOLVESGGGLVQA | FTFG | MAWLRQAPGK | ISGY | TDYADSVKDRFTISRDNAK | RVGSEY | DLWGQGT | Lama |
| | GGSLRLFCAASG | TSN | RREWVALIT | | NTVSLQMNSLKPEDTAIYF | | QVTVSS | Glama |
| | | | | | CAR | | | (9844) |
| 4PIR | DVQLVESGGGLVQP | SLFSI | MDWYRQAPGK | RDAA | TNYADSVKGRFTISRDSAK | DARTITGRA | DYWGQGT | Lama |
| | GGSLRLSCAYSG | LR | ERELVAGIT | GYAD | NTVYLQMNSLKPEDTAVYY | | QVTVSS | Glama |
| | | | | S | CNA | | | (9844) |
| 4POU | QVQLVESGGGLVQA | GYPH | MGWFRQAPGK | SGGG | TLYADSVKGRFTISRDKGK | GGYQLRDRT | GHWGQG | Lama |
| | GGGSLRLSCAAS | PYLH | EREGVAAMD | G | NTVYLQMDSLKPEDTATYY | Y | TQVTVSS | Glama |
| | | | | | CAA | | | (9844) |
| 4POY | QVQLVESGGGLVQA | YPHP | MGWFRQAPGK | SGGG | TLYADSVKGRFTISRDKGK | GGYQLRDRT | GHWGQG | Lama |
| | GGSLRLSCAASG | YLH | EREGVAAMD | G | NTVYLQMDSLKPEDTATYY | Y | TQVTVSS | Glama |
| | | | | | CAA | | | (9844) |
| 4PPT | QVQLVESGGGLVQA | YPHP | MGWFRQAPGK | SGGG | TLYADSVKGRFTISRDKGK | GGYELRDRT | GHWGQG | Lama |
| | GGSLRLSCAASG | YLH | EREGVAAMD | G | NTVYLQMDSLKPEDTATYY | Y | TQVTVSS | Glama |
| | | | | | CAA | | | (9844) |
| 4W81 | EVQLVESGGGLVQA | RTFS | MGWFRQAPGK | AAPG | AFYADSVRGRFSISADSAK | DLKMQVAAY | DYWGQGT | Lama |
| | GDSLRLSATASG | RAV | EREFVAAIS | TAYY | NTVYLQMNSLKPEDTAVYY | MNQRSV | QVTVSS | Glama |
| | | | | | VAA | | | (9844) |
| 3EZJ | QVQLQESGGGLVQA | SIFSI | MDWDRQAPGK | SGGS | TNYADSVKGRFTISRDNAK | NVKTWAGMT | DYWGQGT | Lama |
| | GGSLRLSCAASG | NS | QRELVATIT | | NTVYLQMNSLKPEDTAVYY | R | QVTVSS | Glama |
| | | | | | CNA | | | (9844) |
| 2X1O | QVQLQESGGGLVQA | RNLR | MGWFRQAPGK | WSSD | IYYADSVKGRFIISRDNAKN | GAGWAGTM | NYWGQGT | Lama |
| | GGSLRLSCAAAG | MYR | EREFVGTMV | T | TVYLQMNSLKPEDTAVYYC | TDY | QVTVSS | Glama |
| | | | | | AA | | | (9844) |
| 2X1P | QVQLQESGGGLVQA | RTFT | MGWFRQAPGK | RSGTL | TRYADSAKGRFTISVDNAK | DLHRPYGPG | DSWGQGT | Lama |
| | GGSLRLSCAASG | SFA | EREFVASIS | | NTVSLQMDNLNPDDTAVY | TQRSDEY | QVTVSS | Glama |
| | | | | | YCAA | | | (9844) |
| 2X1Q | QVQLQESGGGLVQP | RTFS | MGWFRQAPGK | QSGA | TAYADSVKGRFTFSRDNAK | SSRVFYTEVL | DYWGQGT | Lama |
| | GGSLRLSCAASG | NYR | EREFVATIS | A | NLLYLEMLSLEPEDTAVYY | QTTTGY | QVTVSS | Glama |
| | | | | | CAA | | | (9844) |
| 2BSE | QVQLQESGGGLVQA | RTGS | MGWFRQLAGK | FDYD | TYYADSVKGRFTVSRDSG | RSGGFSSNR | DGWGQG | Lama |
| | GGSLRLSCTASR | NWC | EPELVVALN | M | KNTVYLQMNSLKPEDTAIY | ELY | TQVTVSS | Glama |
| | | | | | YCAA | | | (9844) |
| 2XA3 | AVQLQESGGGLVQA | RTSS | MGWFRQAPGK | WSGG | TNYVDSVKGRFDISKDNAK | KWRPLRYSD | NYWGQGT | Lama |
| | GGSLRLSCTVSA | SHD | EREFVAAIS | T | NAVYLQMNSLKPEDTAVYY | NPSNSDY | QVTVSS | Glama |
| | | | | | CAA | | | (9844) |
| 3STB | QVQLQESGGGLVQA | RTLS | MGWFRQAPGK | RSGS | TFYADAVKGRFTISRDNAK | DRFSPVVPG | DSWGQGT | Lama |
| | GGSLRLSCAASG | SYA | EREFVAAIN | | NTVYLQMNSLKPEDTAAYY | PIPVNTV | QVTVSS | Glama |
| | | | | | CAA | | | (9844) |
| 4Y8D | QVQLQESGGGSVQA | YTSR | MGWFRQAPGA | RQSN | SYYSDSVRGRFTISQDNAK | TTDCAAFVE | ITAGQGTQ | Lama |
| | GGSLRLSCGASE | | EREGVACIH | L | TTAFLLMSSLKPEDTAIYYC | RATA | VTVSS | Glama |
| | | | | | AT | | | (9844) |
| 3K3Q | AVQLVDSGGGTLQA | LAFD | MGWFRQAPGK | PRTD | TYYAESLEGRFSVSRDAAA | DEDVTPRVM | DHWGQG | Lama |
| | GKSLRLSCAISG | GGAM | DREFVAAIS | E | TMVFLQADNVRLDDTASYY | GVIPHA | TLVTVSS | Glama |
| | | GSEH | | | CAA | | | (9844) |
| | | RLTA | | | | | | |
| | | GA | | | | | | |
| 3K81 | EVQPQESGGGLAQA | ITFAS | WGWYRRAPGK | NEGR | TNYVDSVKGRFTVSRDNA | NLQTGTLSG | LYWGQGT | Lama |
| | GGSLRLSCVVSG | EA | QRELIAAIN | | KNVMYLQMNSLKPEDTAV | AR | QVTVSS | Glama |
| | | | | | YYCNA | | | (9844) |
| 4DKA | QVQLQESGGGLVQA | RTSS | MGWFRQAPGK | RNGA | TYYTDSVKGRFTISRDNAK | DRFPTMEVV | DYWGQGT | Lama |
| | GGSLRLSCAASG | LYS | EREFVAAIS | N | NTVELQMNSLKPEDTAVYY | TIMTNEY | QVTVSS | Glama |
| | | | | | CAA | | | (9844) |
| 5M2M | QVQLQESGGGLVQP | RTFS | IGWFRQAPGK | WSSG | TYYADSVKGRFAISRDIAKN | RDGIPTSRSV | NYWGQGT | Lama |
| | GGSLRLSCAASG | DHSG | EREFVARIY | N | TVDLTMNNLEPEDTAVYYC | ESY | QVTVSS | Glama |
| | | YTYT | | | AA | | | (9844) |
| 5M2I | VQLVESGGGLVQAG | RSLS | MGWFRQAPGK | WRGY | IYYKDSVKGRFTISRDDAK | SILPLSDDPG | TYWGQGT | Lama |
| | GSLSLSCSASG | NYY | ERELLGNIS | N | NTIYLQMNRLKPEDTAVYY | WN | QVTVS | Glama |
| | | | | | CAA | | | (9844) |
| 4WGW | QVQLQESGGGLVQA | SIFSI | ANWYRQPPGM | RDGN | ANYADSVKGRFTISRDRAR | AIRTTVRTSA | EYWGQGT | Lama |
| | GGSLRLSCAASR | DT | QRELVATIT | | NTVYLQMNSLKPEDTGVY | Q | QVTVSS | Glama |
| | | | | | YCNA | | | (9844) |
| 6B73 | QVQLVESGGGLVRP | RTSY | MGWFRRAPGK | WSGI | PTYADSVADRFTTSRDVAN | RAPVGQSSS | DYWGQGT | Lama |
| | GGSLRLSCVDSE | P | EREFVASIT | D | NTLYLQMNSLKHEDTAVYY | PYDY | QVTVSS | Glama |
| | | | | | CAA | | | (9844) |
| 5JQH | QVQLQESGGGLVQA | SIFSL | MGWYRQAPGK | SGGS | TKYADSVKGRFTISRDNAK | KVAGTFSIY | DYWGQGT | Lama |
| | GGSLRLSCAASG | ND | LRELVAAIT | | NTVYLQMNSLKAEDTAVYY | | QVTVSS | Glama |
| | | | | | CNA | | | (9844) |
| 5F1O | DVQLQESGGGLVQA | SRFD | MGWFRQAPGK | WSSG | TRYLDTVKGRFTISRDNAK | RYQPRYYDS | DNWGQG | Lama |
| | GHSLRLSCVGSG | NYA | EREFVAAIS | T | STVYLQMNSLKPEDTAVYY | GDMDGYEY | TQVTVSS | Glama |
| | | | | | CAA | | | (9844) |
| 5F9D | QVQLQESGGGLVQP | SIFSG | MGWYRQAPGK | PQGV | PNYADSVKGRFTISRDNAK | LPNY | RSWGQGT | Lama |
| | GGSLRLSCAASG | NV | LREWVAAIT | | NMLYLQMSSLKPEDTALYY | | QVTVSS | Glama |
| | | | | | CNR | | | (9844) |
| 5F7L | QVQLQESGGGLVQP | SIYSLI | MGWYRQAPGK | SGST | TYYADSVKGRFTISRDNAK | YSDRLTDCS | DYWGQGT | Lama |
| | GGSLRLSCAASG | A | EHELVATIS | | NTLYLQMNSLKPEDTAMYY | NCEA | QVTVSH | Glama |
| | | | | | CAA | | | (9844) |
| 5H8D | QVQLQESGGGLVQP | FTFS | MSWYRQAPGK | SGGG | IYYADSVKGRFTISREDAKN | G | GFWGQGT | Lama |
| | GGSLKLSCAASG | RYA | ERESVARIS | T | TVYLQMNSLKPEDTAVYYC | | QVTVSS | Glama |
| | | | | | YV | | | (9844) |
| 5HM1 | DVQLQESGGGLVQP | NIVSI | AGWFRQAPGK | TGGA | TNYADSVKGRFTISRDNAK | PMIYYGGRY | DYWGQGT | Lama |
| | GGSLRLSCAASG | DA | QREPVATIL | | NTVYLQMNSLKPEDTAVYY | S | QVTVS | Glama |
| | | | | | CYA | | | (9844) |
| 5LWF | QVQLQESGGGLVQA | RTFS | MGWFRKAPGK | PGTE | TYYADSVKGRFAFSRDNA | TPYYRGSYY | TYWGQGT | Lama |
| | GGSLRLSCAASG | NDH | EREFVAAIT | K | KNTVYLQMNSLKPEDTAVY | AASTY | QVTVSS | Glama |
| | | | | | YCVA | | | (9844) |
| 5M30 | QVQLVESGGGLVQA | SISGI | MAWYRQAPGK | SGGT | TNYADSVKGRFTISKDNAE | FFRRDYVGY | DYWGQGT | Vicugna |
| | GGTLKLSCAASG | VV | QRELVASIT | | NTLYLRMNSLKPEDTAVYY | | QVTVSS | Pacos |
| | | | | | CKA | | | (30538) |
| 5MWN | QVQLVESGGGLVQP | IMLGY | MAWYRQAPGK | SGGS | ANYADAVKGRFTISRDNAR | RIWRGTVYD | NISGPGTQ | Lama |
| | GGSLRLSCAASG | FT | QRELVATEI | | STVYLQMNSLKPEDTAVYY | | VTVSS | Glama |
| | | | | | CDA | | | (9844) |
| 5NML | QVQLVESGGGLVQA | SAVS | MGWYRQAPGK | NSGR | TNYVDSVKGRFTISKDNAK | LGATTMSN | AVWGQGT | Lama |
| | GGSLRLSCVVSG | DYA | QRELVAAIY | | KTVYLQMNCLKPEDTADYF | | QVTVSS | Glama |
| | | | | | CNL | | | (9844) |
| 5IP4 | QVQLQESGGGLVQA | NIIGG | WAWYRQAPGQ | RYN | ANYADSVKGRFTISRDNAK | EN | YYWGQGT | Lama |
| | GGSLRLSCTASV | NH | QRDLVASLS | | NAAYLQMNSLKPEDTAIYF | | QVTVSS | Glama |
| | | | | | CAL | | | (9844) |
| 4GFT | QVQLQESGGGTVQP | ERAF | MGWFRQAPGQ | GSGR | QYYADSVKGRFTISRDNAM | RVVPVFSDS | VYWGQGT | Lama |
| | GGSLKLSCSAAP | SNYA | EREFVAGIT | S | NAVYLQMNSVKAEDTAVY | TKGY | QVTVSS | Glama |
| | | | | | YCAA | | | (9844) |
| 4GRW | EVQLVESGGGLVQP | FTLD | IAWFRQAPGK | SGDG | AYYADSVKGRFTISSDNAK | VRTGWGLNA | DYWGKGT | Lama |
| | GGSLRLSCAASG | DYA | EREGVSGID | S | NTVYLQMNSLRPEDTAVYY | PDYAM | LVTVSS | Glama |
| | | | | | CAR | | | (9844) |
| 4GRW | EVQLVESGGGLVQP | FTLDY | IGWFRQAPGK | SSGQ | TYYADSVKGRFTISRDNAE | DPECYRVRG | DYWGQGT | Lama |
| | GGSLRLSCAASG | LA | EREGVSCVS | Y | STVYLQMNSLKPEDTAVYY | YYNGEY | QVTVSS | Glama |
| | | | | | CAT | | | (9844) |
| 4GRW | EVQLVESGGGLVQA | RTFS | VGWFRQAPGK | WSGG | PYYADSVKDRFTISRDNAK | TSLFPTSRGS | DTWGQGT | Lama |
| | GGSLRLSCAASG | WSA | EREFVAAIR | S | NTVYLQMNSLRPEDTAVYL | HY | QVTVSS | Glama |
| | | | | | CGE | | | (9844) |
| 4HEM | QVQLVESGGGLVQA | STFS | MGWFRQAPGP | QTGS | TYYRNSVKGRFTISRDNAK | GDNYYYTRT | DYWGQGT | Lama |
| | GGSLRLSCAASE | NYA | EREFVATIS | H | NTVYLQMNNMKPEDTAVY | YEY | QVTVSS | Glama |
| | | | | | YCAA | | | (9844) |
| 4HEP | DVQLVESGGGLVQP | FSFD | IGWFRQAPGK | MSDG | TYVADSVTGRFTISSDNAK | GRFVTFGSA | DYWGKGT | Lama |
| | GGSLRLSCEASG | DYA | EREGVSYIS | R | NTVYLQMNSLKLEDTAVYY | WSFVGGGPY | LVTVSS | Glama |
| | | | | | CAA | GI | | (9844) |
| 4FHB | QVQLQESGGGLVQA | RTFS | MGWFRQAPGK | WSGS | TYYADSAKGRFTISRDNAK | PGRPHGSSW | DYWGQGT | Lama |
| | GGSLRLSCEASG | SYA | ERDFVAVIS | N | NTVYLQMNSLKPEDTAIYY | SLNKKGQGY | QVTVSS | Glama |
| | | | | | CAA | | | (9844) |
| 4BFB | QVQLQESGGGLVQP | FTFSS | MTWVRQAPGK | SDGSI | TTYADSVKGRFTISRDNAR | A | GRRGPGT | Lama |
| | GGSLRLSCAASG | AI | GREWVSTIG | | NTLYLQMNSLKPEDTAVYY | | QVTVSS | Glama |
| | | | | | CTS | | | (9844) |
| 3QXW | QVQLVESGGGLVQA | RSSR | MAWFRQAPGK | GDGR | TTYGDSVKGRFTISRDNAE | DDNYVTASW | DYWGQGT | Lama |
| | GGSLRLSCAASR | SWA | EREFVAKIS | L | YLVYLQMDSLKPEDTAVYY | RSGP | QVTVSS | Glama |
| | | | | | CAA | | | (9844) |
| 4EIZ | QVQLQESGGGLVQA | RTFS | MGWFRQTPGK | WGGS | TLYADSVKGRFTMSRDNA | DGSQYRSTY | GSWGQG | Lama |
| | GGSLRLSCTASG | SYA | EREFVAAIT | T | KNTVYLQMNSLKPEDTAVY | SFRDKPDY | TQVTVSS | Glama |
| | | | | | YCAA | | | (9844) |
| 4EIG | QVQLQESGGGLVQA | IIFSV | MTWYRQAPGK | TNNN | TMTVDSVKGRFTISRDNVQ | NRGLAGP | AYWGQGT | Lama |
| | GGSLRLSCKASG | YK | ERELVALIT | | NTVYLEMNNLKPEDTAVYY | | QVTVSS | Glama |
| | | | | | CNA | | | (9844) |
| 5DA0 | QVQLQESGGGLVQA | RTFS | MGWFRQAPGK | RSGG | SYNADSVKGRFTISRDNAK | GDTAITSWY | DYWGQGT | Lama |
| | GGSLRLSCAASG | SDV | EREFVAAVT | K | NTVSLQMNSLKPEDTAVYY | GY | QVTVS | Glama |
| | | | | | CAA | | | (9844) |
| 5DFZ | QVQLQESGGGLVQP | PFSP | MGWYRQAPGK | IDGR | TNYQDSVKGRFTISRDYVK | ETRGF | MHWGQG | Lama |
| | GGSLRLSCAPSG | NS | QRELVAVMT | | NTAYLQMNNLKPDDTAVYI | | TQVTVSS | Glama |
| | | | | | CNA | | | (9844) |
| 4B50 | EVQLVESGGGLVQP | SISSV | MSWYRQAPGK | DRGR | TNYKVSVKGRFTISRDNSK | ESRTSWSSP | DVWGRGT | Lama |
| | GGSLRLSCAASG | DV | QRELVAFIT | | NMVYLQMNSLKPEDTADY | SPL | QVTVSS | Glama |
| | | | | | LCRA | | | (9844) |
| 4QO1 | QVQLQESGGGLVQA | RTFS | MGWFRQAPGR | WSGT | TYYAESVKDRTTISRDNAK | HPQRGWGS | TYWGQGT | Lama |
| | GGSLRLSCAASE | TYA | EREFLAQIN | T | NTVYLEMNNLNADDTGIYF | TLGW | QVTVSS | Glama |
| | | | | | CAA | | | (9844) |
| 4W6X | QVQLQESGGGSVQA | YTYR | MGWFRQAPGK | SGGG | SYYADSVKGRFTISQDNAK | SSNSVCPPG | NDWGQG | Lama |
| | GGSLRLSCTASG | KYC | EREGVACIN | T | DTVFLRMNSLKPEDTAIYY | HVAWY | TQVTVSS | Glama |
| | | | | | CAL | | | (9844) |
| 4AQ1 | QVQLQESGGGLVQA | RTSS | MGWFRQAPGK | SKGG | TYYGASMKGRFTISRDNAK | SDKYNFDTS | GYWGQG | Lama |
| | GGSLRLSCAASG | AYA | EREFVAGIS | S | NTVYLQMNGLAPEDTAVY | HAGY | TQVTVSS | Glama |
| | | | | | YCAA | | | (9844) |
| 5SV3 | EVQLVESGGGLVQA | RTLG | VAWFRQAPGK | RSTII | TDYADSVRGRFSISADSAK | IANPVYATSR | GHWGQG | Lama |
| | GDSLRLSCTASG | DYG | EREFVSVIS | | NTVYLQMNSLKPEDTAVYY | NSDDY | TQVTVSS | Glama |
| | | | | | CAV | | | (9844) |
| 6H7J | QVQLQESGGGLVQA | SIFSI | MGWYRQAPGK | SGGS | TNYANSVKGRFTISRDNAA | KDYGAVLYE | DYWGQGT | Lama |
| | GGSLRLSCAASG | NT | QRELVAAIH | | NTVYLQMNSLKPEDTAVYY | Y | QVTVSS | Glama |
| | | | | | CNV | | | (9844) |
| 6Q6Z | QVQLQESGGGLVQA | FTFD | MGWFRRAPGK | RVTW | IDIADSVKGRFTISRDNAKN | SQQRLSRSD | DYWGQGT | Lama |
| | GGSLRLSCTASG | SYH | EREFVAAVS | L | TVYLEMNSLKPEDTAQYFC | VQY | QVTVSS | Glama |
| | | | | | AA | | | (9844) |
| 1QD0 | QVQLQESGGGLVQA | RAAS | MGWFRQVPGK | WSGK | TWYKDSVKGRFTISRDNAK | RPVRVADISL | DYWGQGT | Lama |
| | GGSLRLSCAASG | GHGH | EREFVAAIR | E | TTVYLQMNSLKGEDTAVYY | PVGF | QVTVSS | Glama |
| | | YG | | | CAA | | | (9844) |
| 1SJV | QVQLQESGGGLVQA | NTFS | MGWYRQAPGK | SRGI | TNYADFVKGRFTISRDNAK | HYFR | SYWGQGT | Lama |
| | GESLKLSCAASG | GGF | QRELVATIN | | KTVYLEMNSLEPEDTAVYY | | QVTVSS | Glama |
| | | | | | CYT | | | (9844) |
| 1U0Q | QVQLQESGGGLVQA | RTFS | VGWFRQAPGK | TRGG | TYYADSVKGRFTIAIDNAKN | RMPYSGDYR | DYWGQGT | Lama |
| | GGSLRLSCAASG | TYA | EREFVGYFG | R | TVYLQMNSLKLDDTAVYYC | SSGTY | QVTVSS | Glama |
| | | | | | AV | | | (9844) |
| 1G9E | QVQLQESGGGLVQA | RTGS | MGWFRQAPGK | WDSA | TYYASSVRGRFTISRDNAK | GEGGTW | DSWGQGT | Lama |
| | GGSLRLSCAASG | TYD | ERESVAAIN | R | KTVYLQMNSLKPEDTAVYT | | QVTVSS | Glama |
| | | | | | CGA | | | (9844) |
| 1I3V | QVQLQESGGGLVQA | DSIGT | IGWFRQAPGK | RNLV | TRYADSVKGRFAVSRDNA | KTTTWGGND | NYWGQGT | Lama |
| | GDSLKLSCEASG | YV | ERIYLATIG | GPSD | KNTVNLQMNSLKPEDTAVY | PNNW | QVTVSS | Glama |
| | | | | FY | YCAA | | | (9844) |
| 6QUP | QVQLVESGGGLVQP | SIFSI | MGWYRQAPGK | SGGT | THYADSVKGRFTISRDNAK | RVYFGDR | DYWGQGT | Lama |
| | GGSLRLSCAASG | DY | ERELVAIKT | | NTVYLQMNSLKPDDTAVYY | | QVTVSS | Glama |
| | | | | | CNA | | | (9844) |
| 6QX4 | QVQLVESGGGLVQA | SIFRI | MGWYRQAPGK | SGGS | TNYADSVKGRFTISRDNAK | DFSTGWAPY | DYWGQGT | Lama |
| | GGSLRLSCAASG | ND | QRELVAAIT | | KMVYLQMNSLKPEDTAVY | | QVTVSS | Glama |
| | | | | | YCHA | | | (9844) |
| 6S0Y | QVQLQESGGGLVQT | FTSD | IGWFRQAPGK | LSGG | TIYADSAKGRFTVSADNAK | ERYNVEGCG | AYWGKGT | Lama |
| | GGSLRLSCAFSG | DYV | GRQGVSCIR | G | KTVYLQMTRLKPEDTAVYY | YDV | QVTVSS | Glama |
| | | | | | CGA | | | (9844) |
| 6RUV | QVQLVESGGGLVQA | RTFTI | MGWFRQAPGK | RSGE | TDYADSVKGRFTISRDNNK | GRAILVHTTK | DHWGQG | Lama |
| | GGSLRLSCAASE | YA | EREFVAAIS | N | NTISLQMNSLKPEDTAVYY | KEY | TQVTVSS | Glama |
| | | | | | CAA | | | (9844) |
| 6EHG | QVQLVETGGGLVQA | SIFSL | MGWFRQAPGK | RSGG | TYYADSVKGRFTISRDNGK | GTGWSPQTD | NYWGQGT | Lama |
| | GGSLRLSCAASG | NA | EREFVATIN | R | NMVYLQMHSLKPEDTAIYY | NEY | QVTVSS | Glama |
| | | | | | CAA | | | (9844) |
| 6RTY | QVQLQESGGGLVQP | SGNSI | MGWYRQAPGK | SSGT | TNYADSVKGRFSISRDNAK | VLVRFGGLR | SYWGQGT | Lama |
| | GGSLRLSCAASG | NV | PRELVAEIT | | NTVPLQMNSLKPEDTAIYY | R | QVTVSS | Glama |
| | | | | | CSA | | | (9844) |
| 6RUL | QVQLVESGGALVQP | FPVN | MRWYRQAPGK | SAGD | SSYEDSVKGRFTISRDDAR | NVGFLPADLA | EYWGQGT | Lama |
| | GGSLRLSCAASG | RYS | EREWVAGMS | R | NTVYLQMNSLKPEDTAVYY | WFKRNTLNK | QVTVS | Glama |
| | | | | | CNV | PVIMGRHTW | | (9844) |
| | | | | | | ESIGRPLPGR | | |
| | | | | | | KNIILSSQPG | | |
| | | | | | | TDDRVTWVK | | |
| | | | | | | SVDEAIAACG | | |
| | | | | | | DVPEIMVIGG | | |
| | | | | | | GRVYEQFLP | | |
| | | | | | | KAQKLYLTHI | | |
| | | | | | | DAEVEGDTH | | |
| | | | | | | FPDYEPDDW | | |
| | | | | | | ESVFSEFHD | | |
| | | | | | | ADAQNSHSY | | |
| | | | | | | CFEILERRGG | | |
| | | | | | | GGGMISLIAA | | |
| | | | | | | LAVDRVIGME | | |
| | | | | | | NAMPWN | | |
| 6RVC | QVQLQESGGGLVQA | RTFS | MGWFRQAPGK | STGS | TYYADSVKGRFTISRDNAK | KVAGGSYYQ | DYWGQGT | Lama |
| | GDSLTLSCAASG | SYT | ERDFIAGIT | S | NTVYLQMNSLKPEDTADYY | KDKY | QVTVSS | Glama |
| | | | | | CAR | | | (9844) |
| 6YZ7 | QVQLVESGGGLMQA | RTFS | MGWFRQAPGK | WSGG | AYYADSVKGRFTISRDKAK | TENVRSLLSD | DYWGQGT | Lama |
| | GGSLRLSCAVSG | TAA | EREFVAAIR | S | NTVYLQMNSLKYEDTAVYY | YATWPY | QVTVSS | Glama |
| | | | | | CAR | | | (9844) |
| 6ZHD | QVQLVESGGGLMQA | RTFS | MGWFRQAPGK | WSGG | AYYADSVKGRFTISRDKAK | THYVSYLLSD | DYWGQGT | Lama |
| | GGSLRLSCAVSG | TAA | EREFVAAIR | S | NTVYLQMNSLKYEDTAVYY | YATWPY | QVTVSS | Glama |
| | | | | | CAQ | | | (9844) |
| 6QGW | QMQLVESGGGLVQA | RTFS | MGWFRQAPGK | RSGR | TSLADSVKGRFTISRDNGK | DPQWSRVRS | DYWGQGT | Lama |
| | GGSLTLSCAASG | DYD | AREFVARIS | M | RTVYLQMNSLKPEDTAVYY | GA | RVTVSA | Glama |
| | | | | | CAA | | | (9844) |
| 6QGY | QGQLVESGGGMVQ | RTFN | AAWFRQAPGK | RSGD | TYYTNSVKGRFTISRDSAK | KTGTWATMD | DYWGQGT | Lama |
| | AGGSLRLSCAASG | GWT | DREFVAAIS | Y | NNLYLQMDSLKPEDTAVYY | RRY | RVTVSA | Glama |
| | | | | | CAA | | | (9844) |
| 6QGX | QVQLVESGGGLVQA | RTFS | MAWFRRAPGK | ASAG | IFYTDSVKGRFTISRDHAKN | KTGTWATLD | DYWGQGT | Lama |
| | GGSLRLSCAASG | RYA | EREFVAAIS | T | TVSLQMNSLRPEDTAVYYC | RRY | RVTVSA | Glama |
| | | | | | AA | | | (9844) |
| 6B20 | QVQLVESGGGLVQA | SIFSI | MGWYRQAPGK | RGGR | TNYADSVKGRFTLSRDNAK | GRSR | GYWGQG | Lama |
| | GGSLRLSCAASG | NA | QRELVAAIT | | NTVYLQMNSLKPEDTAVYY | | TQVTVSS | Glama |
| | | | | | CNV | | | (9844) |
| 5O8F | QVQLQESGGGLVQA | HTFN | MGWFRQAPGK | WSGG | TSYADSVKDRFTISRDNAK | KGRYSGGLY | DYWGQGT | Lama |
| | GGSLRLSCAASG | YPI | EREFVGAIS | S | NTVYLEMNNLKPEDTAVYY | YPTNY | QVTVS | Glama |
| | | | | | CAA | | | 9844) |
| 6EZW | QVQLVQSGGGLVQA | RTFS | MGWFRQAPGK | GRGL | PDIADSVNGRFTISRDNAK | DLQYGSSWP | DYWGQGT | Lama |
| | GGSLRLSCAFSG | MYT | EREFVAANR | S | NTLYLQMDSLKPEDTAVYY | QRSSAEY | TVTVSS | Glama |
| | | | | | CAA | | | 9844) |
| 6H02 | QVQLVESGGGLVQA | RTGSI | MGWFRQAPGK | WTPG | TKYADSVKGRVAISRDIAK | CAYGTCYYG | EYWGQGT | Lama |
| | GASLRLSCAVSG | YT | EREVVARTT | S | NTLYLQMNNLKPEDTAVYY | DRAY | QVTVSS | Glama |
| | | | | | CAA | | | (9844) |
| 6H16 | EVQLQESGGGLVQA | RTFSI | IGWFRQAPGK | WSGG | TYYADSVKGRFTISRDNAK | ITYTRGIY | KYWGQGT | Lama |
| | GGSLRLSCAASG | YT | EREFVAEIT | S | NTVYLQMNSLKPEDTAVYY | | QVTVSS | Glama |
| | | | | | CAA | | | (9844) |
| 6H15 | VQLQESGGCLVQAG | STFST | IGWFRQAPGK | WDGG | TYYADSVKGRFTISRDNAK | RGRRYFDFT | DYWGQGT | Lama |
| | GSLRLSCAASG | YT | EREFVAAIH | Q | NTVYLQMNSLKPEDTAVYY | YSDVY | QVTVS | Glama |
| | | | | | CAA | | | (9844) |
| 6FYU | EVQLVESGGGLVQA | RTYA | MGWFRQAPGK | ALGTR | TYYSDSVKGRFTISRDNAK | QGQWRAAP | EFWGQGT | Lama |
| | GGSLKLSCAASG | | EREFVAHIN | | NTEYLEMNNLKPEDTAVYY | VAVAAEY | QVTVS | Glama |
| | | | | | CTA | | | (9844) |
| 6FYS | EVQLVESGGGLVQP | FTLEN | IGWFRQTPGS | KSGS | TYYTDSMRGRFTISRDNAE | TTAGGGLCW | SSWGQGT | Lama |
| | GGSLRLSCAATG | KA | EREGVLCIS | W | NTVYLQMDSLKPEDTAVYY | DGTTFSRLA | QVTVSS | Glama |
| | | | | | CAT | | | (9844) |
| 6GCI | QVQLVESGGGLVQA | ITFSS | MGWFRQAPGK | GSGS | TYYADSVKGRYTISRDNAK | RDDGRMYQ | EYWGQGT | Lama |
| | GDSLRLACAASG | YT | EREYIARIT | N | NTAYLQMNSLKPEDTANYY | GFYDF | QVTVSS | Glama |
| | | | | | CAA | | | (9844) |
| 5EUL | QVQLVETGGGLVQP | SIFNM | MGWYRQAPGK | TDDS | TMYPDSVKGRFTISRDNAK | QRTVMSQ | PYWGQGT | Vicugna |
| | GGSLRLSCGASG | YA | QREVVARIA | | NTVYLQMNSLKPEDTAVYY | | QVTVSS | Pacos |
| | | | | | CYY | | | (30538) |
| 6ITC | VALVESGGALVQPG | FPVN | MRWYRQAPGK | AGDR | SSYEDSVKGRFTISRDDAR | NVGF | EYWGQGT | Lama |
| | GSLRLSCAASG | RYS | EREWVAGMS | | NTVYLQMNSLKPEDTAVYY | | QVTVS | Glama |
| | | | | | CNV | | | (9844) |
| 5G5X | QVQLQESGGGLVQP | SGFN | MGWYRQAPGK | SFGS | TNYADSVKGRFTISRDNAK | GWGATPR | SYWGQGT | Lama |
| | GGSLRLSCAASG | NNA | QRELVAAIT | | NTVYLQMNSLKPEDTAVYY | | QVTVSS | Glama |
| | | | | | CTA | | | (9844) |
| 5O2U | DVQLQESGGGLVQA | SISRF | MGWWRQAPGK | KGFD | PVLADSVKGRFTISIDSAEN | ALDT | AYWGQGT | Lama |
| | GGSLRLSCAASG | NA | EREFVARIV | | TLALQMNRLKPEDTAVYYC | | QVTVSS | Glama |
| | | | | | FA | | | (9844) |
| 6C9W | VQLVESGGGLVQAG | GTFS | MGWFRQDLGK | WTGG | AYYGDSVKGRFTISRDNAK | QGTNGGGYS | NYWGQGT | Lama |
| | DSLRLSCAASG | TFN | EREFVAAIR | R | NTVYLQMNSLKPEDTAVYY | EATSY | QVTVSS | Glama |
| | | | | | CAR | | | (9844) |
| 5VAK | QVQLVESGGGLVQA | RTFS | GGWFRQAPGK | WSGG | KLYADSVKGRFTISRDNAK | RRINEVLTTA | DFWGQGT | Lama |
| | GGSLRLSCAASQ | PYV | EREFVAAIS | T | NTVYLQMNTLKREDTAVYY | PDY | QVTVSS | Glama |
| | | | | | CAA | | | (9844) |
| 6F2G | QVQLVESGGGVVQA | RTFS | MGWFRQAPGE | WSGS | TEYADSVKGRVTISRDNAK | KNGGAASNY | VYWGQGT | Lama |
| | GGSLRLSCAASG | SRA | GREFVATIS | Y | NTVYLQMNSLKPGDTAVY | PNDY | QVTVSS | Glama |
| | | | | | HCAA | | | (9844) |
| 6EQI | QVQLVESGGGLVQA | RPFS | LAWFRQAPGK | RGGS | TFYADSVSGRFTISGGSTK | SITGYGLVDS | TIWGQGT | Lama |
| | GGSLKLSCTTSG | TFD | EREFVSGLR | | NTLYLQMNSLKPEDTAIYY | ASHY | QVTVSS | Glama |
| | | | | | CAR | | | (9844) |
| 6NI2 | QVQLQESGGGLVQA | FFFDT | MAWYRRAPGK | AGGT | TTYADSVKDRFTISRDNAK | FVRS | LSWGQGT | Lama |
| | GGSLRLSCVVSG | VT | HRELVASAT | | NTVYLQMNSLKPEDTAVYY | | QVTVSS | Glama |
| | | | | | CNT | | | (9844) |
| 6O3C | QVQLQESGGGLVQA | YIFSS | MGWYRQAPGK | WGTI | TYYADSVKGRFTISRDNAK | QDLLYYSFP | AYWGQGT | Lama |
| | GGSLRLSCAASG | YA | EREFVATIG | | NTVYLQMNSLKPEDTAVYY | GDH | QVTVSS | Glama |
| | | | | | CAA | | | (9844) |
| 6OZ6 | DVQLQESGGGLVQT | RSFS | MAWFRQAPGK | RRGN | TAYADAVKGRFTISRDNAA | FRVAVTTYTS | NYWGQGT | Lama |
| | GGSLTLSCATSG | LYA | EREFVAGVS | | NTVYLQMTSLKPEDTAVYF | QQANEY | QVTVSS | Glama |
| | | | | | CAA | | | (9844) |
| 6GJQ | QVQLQESGGGLEQP | VIFGI | MGWYRQAPGK | SGGS | TNYADFVEGRFTISRDNAK | TVVVSRYGLT | DYWGQGT | Lama |
| | GGSLRLSCATSG | NA | QRELVATFT | | NTVYLQMNGLRPEDTAVY | Y | QVTVSS | Glama |
| | | | | | YCHA | | | (9844) |
| 6GKD | QVQLQESGGGLVQA | SIRSI | MGWYRQAPGK | RVGN | TDYADSVKGRFTISRDNAK | EITEQSRPFY | DYWGQGT | Lama |
| | GSSLRLACAATG | NN | QRGMVAIIT | | NTVYLQMNSLKPEDTATYY | LTD | QVTVSS | Glama |
| | | | | | CHA | | | (9844) |
| 6GJU | QVQLQESGGGLVQA | STFAI | MGWYRQAPGK | TGD | TRYADSVKGRFTISRDNAK | AVQVRDYR | NYWGQGT | Lama |
| | GGSLRLSCAASG | IA | QRELVAVIS | | NTVYLQMDSLRPEDTAVYY | | QVTVSS | Glama |
| | | | | | CNA | | | (9844) |
| 6GK4 | QVQLQESGGGLVQP | STSSI | MGWYRQAPGK | SGGD | TRYAEPVKGRFTISRDNAQ | NWGRTSV | NSWGQGT | Lama |
| | GGSLRLSCAASG | NA | QREPVAISS | | NKVYLQMNSLKPEDTAVYY | | QVTVSS | Glama |
| | | | | | CWL | | | (9844) |
| 6GJU | QVQLQESGGGLVQA | SIFRI | MGWYRQAPGK | SGGS | TDYADSVKGRFTISRDNAK | DVRTRWYAS | NYWGQGT | Lama |
| | GGSLRLSCAASG | DA | QRELVAHST | | NTVYLQMNSLKPEDTAVYY | N | QVTVSS | Glama |
| | | | | | CNA | | | (9844) |
| 6GKD | QVQLQESGGGLVQA | RAFS | MGWFRQAPGK | GNGS | RDYADSVKGRFTISRDNAK | SSTYYYTDPE | DYWGQGT | Lama |
| | GGSLRLSCTASG | WYV | EREFVATVS | R | NTVYLQMNSLKPEDTAVYY | KY | QVTVSS | Glama |
| | | | | | CAA | | | (9844) |
| 4S11 | QVQLQESGGGLVQA | RTFS | MGWFRQAPGK | RSGS | TRYADSAKGRFTISKDNAK | DLHRPYGPG | DTWGQGT | Lama |
| | GGSLRLSCAASG | SFV | EREFVASIS | V | NTVSLQMDNLNPDDTAVY | SQRTDDY | QVTVSS | Glama |
| | | | | | YCAA | | | (9844) |
| 6GS4 | QVQLQESGGGLVQA | RTFS | MGWFRQAPGK | WTGR | ADYPDSVKGRFTISRDNAK | KQYGSRADY | DYWGQGT | Lama |
| | GGSLRLSCAGSG | SYN | EREFVGGIS | S | NAVYLQMNSLKPEDTAVYY | PWDDY | QVTVSS | Glama |
| | | | | | CAA | | | (9844) |
| 5LMW | QVQLVESGGGLVQA | LTFN | MGWFRQAPGR | WSGD | TYGTDSVKGRFAISRDNAK | DRFLTRSVKY | DYWGQGT | Lama |
| | GDSLRLSCAASG | RYN | EREFVASIS | R | NTMYLQMNSLKPEDTAVY | | QVTVSS | Glama |
| | | | | | YCAA | | | (9844) |
| 6HJX | QVQLQESGGGLVQA | RIFST | MGWFRQAPGK | RIGGS | TVYADFVKGRFTLSRDNAK | RIGGSDRLAP | GYWGQG | Lama |
| | GGSLRLSCAASG | NV | EREFVATVG | | NMVYLQMNSLKPEDTAVY | ENY | TQVTVSS | Glama |
| | | | | | YCGA | | | (9844) |
| 6I53 | QVQLQESGGGLVQA | RTFT | MAWFRQAPGK | QGRI | QYYGDSVRGRFTISRDYAK | GAGFWGLRT | HYWGQGT | Lama |
| | GGSLRVSCAASG | AYI | EREFLAAMD | | NSVDLQLDGLRPEDTAVYY | ASSY | QVTVSS | Glama |
| | | | | | CAA | | | (9844) |
| 6I8H | QVQLQESGGGLVQA | RTFS | MAWFRQAPGK | SSGG | VVYRDSVKGRFTIARDNAA | KWLAADY | NYWGQGT | Lama |
| | GGSLRLSCAGSG | TYD | EREFVSSIS | N | NAVYLQMNSLKPEDTAVYY | | QVTVSS | Glama |
| | | | | | CAA | | | (9844) |
| 6I8G | QVQLQESGGGLVQA | HTAG | MAWFRQAPGK | WSDY | TDYANSVKNRFTISRDNAK | GWPVKVISS | INWGQGT | Lama |
| | GGSLRLSCATST | QYT | EREFVAVLR | S | NTVYLQMNSLKPEDTAVYY | ADEY | QVTVSS | Glama |
| | | | | | CAA | | | (9844) |
| 6N51 | QVQLVESGGGLVQA | RTFT | MGWFRQAPGK | SSGG | THYADSVKGRFTISRDNSK | AMYGSRWP | DYWGQGT | Lama |
| | GGSLRLSCAASG | SYA | ERESVAAIS | S | NTVYLQMNSLKPEDTAVYY | DWEY | QVTVSS | Glama |
| | | | | | CAA | | | (9844) |
| 5LZ0 | DVQLVESGGGLVQA | RTFS | MGWFRQAPGK | RSDN | TYYADSVKGRFTISRDSAK | TPYGSRYYL | DYWGQGT | Lama |
| | GGSLRVSCAASG | SYS | EREFVAAIS | S | NTVYLQMNSLKPEDTAVYY | RELREY | QVTVSS | Glama |
| | | | | | CAA | | | (9844) |
| 6XZU | QVQLVESGGGLVQA | STFS | MGWYRQAAGE | STGR | TNYIDSVKGRFTISRDNAKT | LGATTMIN | TKWGQGT | Lama |
| | GGSLRLSCVVSG | DYA | QRELVAAIY | | TVYLQMNSLKPEDTAVYYC | | QVTVSS | Glama |
| | | | | | NL | | | (9844) |
| 6SWR | QRQLVESGGGLVQP | SILYF | MGWYRQAPGK | SGDS | TNYADPVKGRFTISRDNAK | KEKGWSFSL | DYWGQGT | Lama |
| | GGSLRLSCAASG | NR | QRELVAAIT | | NTVYLQMNSLKPEDTAVYY | Y | PVTVVK | Glama |
| | | | | | CNA | | | (9844) |
| 6SSP | QVQLQESGGGLVQA | FTFD | IGWFRQAPGK | SSLGS | TYYADSVKGRITISRDNAK | GRDADPTIFA | DYWGQGT | Lama |
| | GGSLRLSCAASG | DYT | EREGVSLIS | | NTVYLQMNSLKPEDTAVYY | ILRSEYPF | QVTVSS | Glama |
| | | | | | CAA | | | (9844) |
| 6SSI | QVQLQESGGGLAQA | RNFFI | MNWYRQAPGK | RAGT | TTYADSVKGRFTISRDNAK | G | ASWGQGT | Lama |
| | GGSMRLSCIASG | NI | QRELVAQIT | | NTVYLQMSTLQSEDTAVYY | | QVTVSS | Glama |
| | | | | | CNV | | | (9844) |
| 6U52 | QVKLQQSGGGSVQE | AFFR | MGWYRRAPGN | RNGR | TIYAPSLKDRFTISRDDDNN | NVRTAVAGR | DYWGQGT | Lama |
| | GGSLRLSCASSG | AGP | ERELVAGIS | | ILYLQMSDLTPGDTAVYYC | N | QVTVSS | Glama |
| | | | | | NL | | | (9844) |
| 6U53 | KVQLQQSGGGSVTP | SISDF | MAWYRQAPGK | SAGA | LLYAEPVKGRFTISRDNAK | YAEA | IYWGQGT | Lama |
| | GGSLRLSCAASG | AA | ERDWVGTIF | | NTVYLQMNSLKPEDTAVYY | | QVTVSS | Glama |
| | | | | | CRL | | | (9844) |
| 6UKT | QVQLQESGGGLEQA | LIVSN | MGWFRQAPGK | WNGG | TYYTNSVKGRFTISRDNAK | TSRASVTTRV | GYWGQG | Lama |
| | GDSLRLSCAASG | YA | EREFVAYIN | V | NTVYLQMNSLKPEDTAVYY | ADF | TQVTVSS | Glama |
| | | | | | CAR | | | (9844) |
| 6UKT | QVQLQESGGGLVQP | IIFRS | MAWYRQAPGK | SFGD | AIYRDSVKGRFTISRDNAR | YPVN | SAWGQGT | Lama |
| | GGSLRLSCAASG | NG | EREWVASIT | | NAVSLQTNSLKTEDTAVYY | | QVTVSS | Glama |
| | | | | | CNT | | | (9844) |
| 6UKT | QVQLQESGGGLVQA | GIVHI | MGWFRQAPGK | SNGD | IRYADSVKGRFTLSRDNAK | FLRHTASASY | NYYGQGT | Lama |
| | GGSLRLSCAASG | SS | QRELVATSP | | NTVSLQMNSLEPEDTAVYY | N | QVTVSS | Glama |
| | | | | | CHS | | | (9844) |
| 6UKT | QVQLQESGGGLVQA | RTSD | MAWFRQAPGK | WNSA | TWYADFVKGRFTISRDNAK | RAYGFDTDS | SNWGQGT | Lama |
| | GGSLRLSCAASV | TDG | EREFVGGIR | | NTLYLQMNSLKPEDTALYY | RESAY | QVTVSS | Glama |
| | | | | | CAR | | | (9844) |
| 6VI4 | QVQLQESGGGLVQA | TIFRL | MGWYRRVSGN | SGGS | TKYGDSVKGRFTISRDNAK | EYRTGIWEEL | DGWGQG | Lama |
| | GESLRLSCAASG | YD | QRELVASIT | | NTVYLQMSSLKPEDTAVYY | L | TQVTVSS | Glama |
| | | | | | CNA | | | (9844) |
| 6WAQ | QVQLQESGGGLVQA | RTFS | MGWFRQAPGK | WSGG | TYYTDSVKGRFTISRDNAK | AGLGTVVSE | DYWGQGT | Lama |
| | GGSLRLSCAASG | EYA | EREFVATIS | S | NTVYLQMNSLKPDDTAVYY | WDYDY | QVTVSS | Glama |
| | | | | | CAA | | | (9844) |
| 6WAR | QVQLQESGGGSVQA | SIFSI | MDWYRQAPGK | SGGS | TNYGDFVKGRFTISRDNAK | EVGGWGPP | DYWGHGT | Lama |
| | GGSLRLSCVASG | NA | QRELVAGIT | | NTVYLQMDSLKPEDTAVYY | RP | QVTVSS | Glama |
| | | | | | CAA | | | (9844) |
| 4LHJ | QVQLVESGGGLVQA | SIVNF | MGWYRQAPGK | NEGS | SNYADSVKGRFTISGDNAK | TFGSRWPYA | DHWGQG | Vicugna |
| | GGSLRLSCAASG | ET | ERELVATIT | | NTVSLQMNSLKPEDTAVYY | HS | TQVTVS | Pacos |
| | | | | | CSA | | | (30538) |
| 4LGP | QVQLVETGGGLVQP | GTLE | IGWFRQAPGK | GEYG | TVYVDSVKGRFTASRDNA | GCYSWR | GPWGQG | Vicugna |
| | GGSLTLSCAGSG | HYA | EHEWLVCNR | S | KNTVYLQLNSLKPDDTGIY | | TQVTVS | Pacos |
| | | | | | YCVS | | | (30538) |
| 4LGS | QVQLVESGGGLVQA | GDFS | MAWFRQAPGK | WTGS | TYYLDSVKGRFTISRDNAK | STVFAEITGL | DYWGQGT | Vicugna |
| | GGSLSLSCAASG | RNA | EREFVASIN | G | NALYLQMNNLKPEDTAVYY | AGYQSGSY | QVTVSS | Pacos |
| | | | | | CAR | | | (30538) |
| 5L21 | QVQLVESGGGLAQP | FGTW | VNWYRQPPGK | RYPK | VTYLDSVKGRFTISRDNAK | G | EFWGQGT | Vicugna |
| | GGSLRLSCEASG | FRFD | SREFDELVA | SGI | KMAFLQMDNLKPEDTAVY | | QVTISS | Pacos |
| | | ENT | | | YCNV | | | (30538) |
| 5LHQ | QVQLQESGGGLVQP | FTLG | IGWFRRAPGK | SSGG | TNYADSVKGRFTISRDNAK | EWVPPGYGA | EYWGKGT | Vicugna |
| | GGSLRLSCAASG | YYA | EREGVSCIS | S | NTVDLQMNSLKPEDTAIYY | TVQALCNNA | QVTVSS | Pacos |
| | | | | | CAA | GYGM | | (30538) |
| 5GXB | QVQLVESGGRLVQA | RTFTT | MGWFRQAPGK | WSGG | TYYADSVKGRFTISRDNAK | AARPSYSGD | DYWGQGT | Vicugna |
| | GDSLRLSCAASG | YL | EREFVAAIR | S | NTVYLQMNSLKLEDTAVYY | YGYTEALRY | QVTVSS | Pacos |
| | | | | | CAA | | | (30538) |
| 5HVH | QVQLQESGGGLVQA | SIFSP | MGWYRQAPGK | NVG | STYADSVKGRFTVSRDNA | WGQDGWLG | DYWGQGT | Vicugna |
| | GGSLRLSCAASG | NA | ERELVAART | | KNTVYLQMNSLKPEDTAVY | QY | QVTVSS | Pacos |
| | | | | | YCNA | | | (30538) |
| 5HVH | QVQLQESGGGLVQP | SIFSG | MGWYRQAPGK | SGGS | TDYADSVKGRFTISRDNAK | DPRPWGYDV | DYWGQGT | Vicugna |
| | GGSLRLSCAASG | NA | QRELVAAIT | | NTVYLQMNSLKPEDTAVYY | TDY | QVTVSS | Pacos |
| | | | | | CHV | | | (30538) |
| 4YGA | QVQLVETGGGLVQP | FTLD | VGWFRQVPGK | ANGV | LDYADSIKGRFTISRDNAKN | TREFCSAYVF | EHWGQGT | Vicugna |
| | GESLRLSCVASG | HSA | EREKLLCIN | S | TVYLQMNDLKPEDTATYSC | LY | QVTVSS | Pacos |
| | | | | | AA | | | (30538) |
| 5NBM | QVQLVESGGGSVQA | RTFT | MGWFRQAPGK | RFGF | LYYSDSVKGRFTISRDNAK | RNPRATAED | DYWGQGT | Vicugna |
| | GDSLRLSCTASG | NYG | EREFVAAIG | P | TTVYLQMHNLKPEDTAIYF | VSAY | QVTVSS | Pacos |
| | | | | | CAA | | | (30538) |
| 5O02 | QVQLQESGGGLVQP | FTFSS | MRWYRQAPGK | SAGG | THYADSVKERFTISRDNAK | RRDYGDSWF | GYWGQG | Vicugna |
| | GGSLRLFCAASG | YA | ERELVAAIT | S | NTMYLQMNSLKPEDTAVY | TAGG | TQVTVSS | Pacos |
| | | | | | YCNA | | | (30538) |
| 5J1S | QVQLVETGGGLVQA | NIFSF | MGWYRQAPGK | SGDT | TTYADSVQGRFTISRDNAK | RRNPINGPYY | AYWGQGT | Vicugna |
| | GGSLRLSCAASG | NV | QRELVAAIT | | NAVYLQMNSLTPEDTAVYF | TT | QVTVSS | Pacos |
| | | | | | CNA | | | (30538) |
| 5J57 | VQLAETGGGLVEPG | FRLQ | AGWFRQAPGK | AGGG | TYYTGSVQGRFTISRDNAK | DLEYSQIMPS | GVRGQGT | Vicugna |
| | GSLRLSCAAPE | YYT | EREWVACIS | V | RTVYLQMDSLKPEDTAVYS | CRGSY | QVTVSS | Pacos |
| | | | | | CAA | | | (30538) |
| 5J56 | QVQLVESGGGLVQP | FSGF | IGWFRQAPGK | SSSD | TSYSDSVKGRFTISRDNAK | RLGGWASFS | DYWGQGT | Vicugna |
| | GGSLRLSCVASE | TLDY | EREGLSSIS | GF | NTVYLQMNSLKPEDTAVYY | PQEY | QVTVSS | Pacos |
| | | YA | | | CAA | | | (30538) |
| 5IVN | QVQLVESGGGLVQP | FTLD | IGWFRQAPGK | NSDD | TYYADSVKGRFTIFMNNAK | ARGCKRGRY | DFWGQGT | Vicugna |
| | GGSLTLSCTASG | HYD | EREGVSCIN | D | DTVYLQMNSLKPEDTAIYY | EY | QVTVSS | Pacos |
| | | | | | CAE | | | (30538) |
| 4JVP | EVQLQASGGGLVQP | FTDD | IGWFRQAPGK | NFDG | TYYADSVKSRFTMSRDNA | DKGLCSWLR | GSWGQG | Vicugna |
| | GGSLRLSCTASG | YYA | EREGVSCIT | G | KNTVYLQMNSLKPEDTAVY | AGGKVTF | TQVTVSS | Pacos |
| | | | | | YCAA | | | (30538) |
| 2XXM | QVQLVESGGGLVQA | SFFM | MAWYRQAPGK | GGDM | TVYDDSVKGRFTITRDDDK | SG | SSWGQGT | Vicugna |
| | GGSLRLSCAASG | SNV | ARELIAAIR | S | NILYLQMNDLKPEDTAMYY | | QVTVSS | Pacos |
| | | | | | CKA | | | (30538) |
| 4TVS | QVQLVESGGGLVQA | RTLS | VGWFRQAPGL | RSGG | THYADSVKGRFTISRDNAK | TFTPDGSWY | DYWGQGT | Vicugna |
| | GGSLRLSCAASG | SYA | EREFVATIS | S | NTVYLQMNSLKPEDTAVYY | YTRGSSY | QVTVSS | Pacos |
| | | | | | CAA | | | (30538) |
| 4XT1 | QVQLVESGGGLVRP | SIFTIY | MGWYRQAPGK | FGGD | TNYADSVKGRFTISRDNAK | EETIVEEA | DYWGQGT | Vicugna |
| | GGSLRLSCAASG | A | QRELVARIT | | NAVYLQMNSLKPEDTAVYY | | QVTVSS | Pacos |
| | | | | | CNA | | | (30538) |
| 6QV2 | QGQLVESGGGLVQP | FTLDY | IGWFRQAPGK | NSGG | TKYADSVKGRFTISRDKAK | DRGYSEYDL | DYWGKGT | Vicugna |
| | GGSLRLSCAASG | YA | EREGVSCIS | S | NTVYLQMNSLKPEDTGVY | PCDLVIYGM | PVTVSA | Pacos |
| | | | | | YCAA | | | (30538) |
| 6QV1 | QGQLVESGGGLVQA | RDISF | VGWFRQAPGK | SLRK | INYADSVKGRFTISRDDAK | SLPGL | PYWGQGT | Vicugna |
| | GGSLTLSCAASV | FA | QRELVAQMT | | NTVSLQMNSLKPEDTAVYY | | PVTVSA | Pacos |
| | | | | | CHA | | | (30538) |
| 6RAK | QLQLVESGGGLVQP | SALD | IGWFRQAPGK | KITGN | TAYADSVKGRFTISRDNAK | VTAVLLPGRC | KYWGQGT | Vicugna |
| | GDSLRLSCAVSG | YNA | EREGVACIS | | NTVHLQMNSLKPEDTAVYY | VPG | PVTVSS | Pacos |
| | | | | | CAT | | | (30538) |
| 6IBB | EVQLVESGGGLVQP | YTLA | IGWFRQAPGK | SGGS | TVYSESVKDRFTISRDNAK | DPFGERLCID | ETWGQGT | Vicugna |
| | GGSLRLSCEASG | NYA | EREGVSCIS | | KIVYLQMNSLOPEDTAVYY | PNTFAGYL | QVTVSS | Pacos |
| | | | | | CAA | | | (30538) |
| 5UKB | QVQLVESGGGLVQA | RPFR | LGWFRQAPGK | WGGV | TNYADSVKGRFTISRDDAK | FDSTGSPIVR | EYWGQGT | Vicugna |
| | GGSLTLSCVASG | NYR | EREFVAAIN | I | NTVYLQMNSLKPEETAVYY | DNY | QVTVSS | Pacos |
| | | | | | CAA | | | (30538) |
| 5UK4 | QVQLVETGGGLVQT | RTFS | MGWFRQAPGK | WRND | TTYADSVKGRFTISRDNAS | TKAYNGGET | YYWGQGT | Vicugna |
| | GGSLRLSCKASG | NSI | ERDFVAKIS | Y | NMVYLLMNNLKPEDTAVYY | SGRGF | QVTVSS | Pacos |
| | | | | | CAA | | | (30538) |
| 6IYN | QLQLVESGGGLVQA | RTFS | MGWFRQAPGK | WSGR | TYYADSVKGRFTISRDNAK | GKWDGSYY | DYWGQGT | Vicugna |
| | GGSLRLSCAASG | SYA | EREFVAVVN | R | NTVYLQMNSLKPEDTAVYN | GAP | QVTVSS | Pacos |
| | | | | | CAA | | | (30538) |
| 5VXK | QLQLVESGGGLVQP | FTLD | IAWFRQAPGK | IDGNT | QSYSDSVKGRFTISRDTAN | DRYTSVRQM | RVWGQGT | Vicugna |
| | GGSLRLSCAASG | DQP | EREGVSCIS | | NRVHLQMNNLKPEDTAVY | CTMIEGLH | QVTVSS | Pacos |
| | | | | | YCAA | | | (30538) |
| 5VXM | QVQLVESGGGLVQA | LEMQ | IGWFRQAPGK | DDGS | TRYADSVKGRFTISRDNAK | KSVWFCSVIR | NSWGQGT | Vicugna |
| | GGSLRLSCAVSG | SHA | EREGVSCIN | T | NTVYLQMNSLKPEDTAVYF | SHEF | QVTVSS | Pacos |
| | | | | | CAA | | | (30538) |
| 6CWK | QVQLAESGGGLVQA | RDFS | LAWFRQAPGK | CSGG | TYYADSMQGRFTISRDNAK | STTYCSATTY | DFWGQGT | Vicugna |
| | GGSLKLSCAASG | MYM | EREFVAAIM | GGG | KTVALQMNSLKPEDTAVYY | SSDRLY | QVTVSS | Pacos |
| | | | | | CAA | | | (30538) |
| 5TD8 | QVQLVESGGGLVHP | RTGS | VAWFRQAPGK | AVGLV | RNYADSVLGRFSISRDFAK | RYYSGTYSS | DYWGQGT | Vicugna |
| | GGSLRLSCAASG | RHA | ERDFVASIN | | NEVYLQMNSLEPEDTAVYY | TYDRDDY | QVTVSS | Pacos |
| | | | | | CAA | | | (30538) |
| 6OCD | QLVETGGGLVQSGG | FTLD | IGWFRQAPGK | SSDG | TYYADSVKGRFTISRDNAK | TKYGSSCPIR | DYWGQGT | Vicugna |
| | SLRLSCAASG | NYN | EYGGVSCIS | S | NTVYLQMNNLKPEDTDVY | PY | QVTVSS | Pacos |
| | | | | | YCAA | | | (30538) |
| 6H71 | QVQLQESGGGLVQA | RMFSI | MGWYRQAPGK | EAGT | TTYADSVRGRFTIARDNAK | YIQLDSTIWF | AYWGQGT | Vicugna |
| | GGSLRLSCAASG | NS | ERELVATIS | | NTVYLQMNSLNPEDTAVYY | R | QVTVSS | Pacos |
| | | | | | CNA | | | (30538) |
| 6GWP | QVQLVESGGGLVQP | FTFRT | MQWYRQSPGT | NIGGV | TDYGDSVKGRFTISRDNAK | VRLPQ | RYWGRGT | Vicugna |
| | GGRLRLSCAASG | YA | ERELVAAIS | | TTVYLEMNSLKPEDTATYY | | QVTVSS | Pacos |
| | | | | | CSA | | | (30538) |
| 6GWP | QVQLVESGGGLVQA | FTFD | IAWFRQAPGK | SSDG | AYYADSVKGRFTISSDNAK | VWARVCRNP | DYWGQGT | Vicugna |
| | GGSLRLSCAASG | DYS | EREGVSCIS | S | NTVYLQMNSLKPEDTAVYY | Y | QVTVSS | Pacos |
| | | | | | CAA | | | (30538) |
| 6I2G | EVQLQESGGGLVQP | VTISA | MGWYRQAPGE | ERGN | AMYRESVQGRFTVTRDFT | LEDRVDSFH | DYWGQGT | Vicugna |
| | GGSLRLSCTASG | LNAM | RRVMVAAVS | | NKMVSLQMDNLKPEDTAV | | QVTVSS | Pacos |
| | | A | | | YYCHV | | | (30538) |
| 5E1H | VQLAETGGGLVQAG | TTFSK | MAWFRQAPGK | WNAV | TNYADSVKGRFTVSRDNA | SSIYSDISGA | NYWGQGT | Vicugna |
| | GSLRLSCAASG | NA | EREFVAGIN | S | KNTVYLQMNSLKPEDTAVY | ATVWATSY | QVTVSS | Pacos |
| | | | | | YCAG | | | (30538) |
| 6ZRV | QVQLVESGGGLVQP | FSLD | IGWFRQAPGK | SSDG | TYYTDSVEGRFTISRDNAK | DYGSSWCTF | DYWGQGT | Vicugna |
| | GGSLRLSCAASG | NYA | EREGVSCIS | S | NTVYLQMNSLKPDDTAVYY | NGM | QVTVSS | Pacos |
| | | | | | CAA | | | (30538) |
| 6XW4 | QVQLQESGGGLVQA | RTFR | MGWFRQAPGK | WSAAI | TNYADSVKGRFTILRDKGM | TYSTIAPRTS | DFWGQGT | Vicugna |
| | GGSLRLSCAKSG | AYA | EREFVAAID | | NTAYLQMNSLEPEDTAVYY | Y | QVTVSS | Pacos |
| | | | | | CAA | | | (30538) |
| 6XW6 | QVQLQESGGGLVQA | RTISS | MGWFRQAPGK | GNGG | TYYLDSVKGRFTTSRDNAK | RSRFSAMHL | DDWGQG | Vicugna |
| | GDSLRVSCAASG | SP | EREFVAAIS | N | NTVYLQLNNLKPEDTAIYY | AYRRLVDY | TQVTVSS | Pacos |
| | | | | | CAA | | | (30538) |
| 6XW5 | QVQLQESGGGLVQA | RTFSL | MGWFRQAPGE | RAAY | TYYADSVKGRFTISRDNAK | KGQGGTW | DYWGQGT | Vicugna |
| | GGSLRLSCAASG | TT | DRAFVTSIS | | NMVSLQMNSLKPEDTAVY | | QVTVSS | Pacos |
| | | | | | VCAG | | | (30538) |
| 6XW7 | QVQLQESGGGLVEA | LTFSR | MGWFRQAPGK | RSGG | PNYADSVKGRFTISRDNAK | RGSVYY | DVWGQGT | Vicugna |
| | GGSLRLSCLGSG | YA | EREFVASIT | S | NTVYLQMSSLKPEDTAVYY | | QVTVSS | Pacos |
| | | | | | CAG | | | (30538) |
| 5OMM | QVQLQESGGGLVQS | NINS | VGWYRQAPGN | DDGS | TDYVDSVKGRFTISRDIAEN | TIVVFTTPM | HYWGKGT | Vicugna |
| | GGSLRLSCAASR | MHV | QRELVASIT | | TVYLQMNSLNPEDTAVYYC | | QVTVSS | Pacos |
| | | | | | KG | | | (30538) |
| 6UHT | QVQLVESGGGLVQA | LTYDL | IGWVRQAPGK | STDG | TYYADSVKGRFTISRNNAK | APLAGRYCP | GYWGQG | Vicugna |
| | GGSLRLSCAASI | DYYY | EREGVSCIS | A | NTVYLQMNNLKPEDTAIYY | ASHEY | TQVTVSS | Pacos |
| | | | | | CAA | | | (30538) |
| 6UL6 | QVQLVESGGGLVQV | SDISG | MGWYRQAPGK | SGGS | TDYAGSVKGRFTISRDNAK | YGSG | DYWGQGT | Vicugna |
| | GGSLRLSCVVSG | IA | RREMVADIF | | KTSYLQMNNVKPEDTGVY | | QVTVSS | Pacos |
| | | | | | YCRL | | | (30538) |
| 6UL6 | QLQLVESGGGLVQP | SDFN | MGWYRQVPGK | TEGK | TNYGGSVKGRFTISRDNAK | DWKMGAWT | DYWGKGT | Vicugna |
| | GGSLRLSCVVSG | TYI | PRELVADIT | | NTVYLQMFGLKPEDAGNY | AGDYGI | LVTVSS | Pacos |
| | | | | | VCNA | | | (30538) |
| 6UI1 | QVQLVESGGGLVHP | SLPST | VGWYRQAPGK | LR | INYADSVKGRFTISRDNAK | EYT | HYWGKGT | Vicugna |
| | GGSLRLSCAPSA | PFNP | QREMVASIG | | NTVDLQMDSLRPEDSATY | | LVTVSS | Pacos |
| | | FNNM | | | YCHI | | | (30538) |
| 1SHM | DVQLQESGGGLVQA | ATGS | MGWFRQAPGK | WGSA | TYYASSVRGRFTISRDNAK | GRIGRSVFNL | TWWGQG | Lama |
| | GGSLRLSCAASG | TYD | ERESVAAIN | G | KTVYLQMNSLKPEDTAVYT | RRESWV | TQVTVSS | Glama |
| | | | | | CGA | | | (9844) |
| 1SJX | QVQLQESGGGLVQA | NIFRI | MGWYRQAPGT | SGGS | TKYADSVKGRFTISKDNAK | EDRHRIGTV | GYWGQG | Lama |
| | GGSLRLSCQASG | ND | QRELVAAIT | | NTVYLQMNSLKPEDTAVYY | | TQVTVSS | Glama |
| | | | | | CAA | | | (9844) |
| 3K7U | QVQLQESGGGLVQA | RTFS | MGWFRQAPGK | WTGG | LFYADSVNGRFTISRDNAK | RPQGDYVTA | DYWGQGT | Lama |
| | GGSLTLSCAASG | NNA | EREFVAAIS | L | RTVTLQMNSLKPEDTAVYY | HY | QVTVSS | Glama |
| | | | | | CAA | | | (9844) |
| 3K80 | QVQLQESGGGLVQA | RAFS | MGWFRQAPGK | RSGG | TQYAESLKGRFAISRDNAK | DLYGLGSHM | DSWGQGT | Lama |
| | GDSLRLSCVASG | SYG | ERAFVAAIS | L | NTVYLQMGSLKPEDTAVYY | ENEY | QVTVSS | Glama |
| | | | | | CAG | | | (9844) |
| 4B41 | EVQLVESGGGLVQP | SIISN | MGWYRQAPGK | SGGR | TTYADSVKGRFTISRDNAK | ASLVRGPL | DHWGQG | Lama |
| | GGSLRLSCAASR | NA | QRELVARIS | | TTVYLQMNSLKPEDTAVYY | | TQVTVSS | Glama |
| | | | | | CNA | | | (9844 |
| 4B5E | EVQLVESGGGLVQA | RSFS | MGWFRQAPGK | LNGG | TYSADSVKGRFTISRDNDK | REGDVGLVS | PYWGQGT | Lama |
| | GGSLRLSCAASG | RDA | ERDVVAAIN | R | NTVYLQMSNLKPEDTAVYY | YKRSSNY | QVTVSS | Glama |
| | | | | | CAA | | | (9844) |
| 4LGR | VQLVESGGGLVQPG | SIASI | TCWYRQGTGK | SGGN | TYYADSVKGRFTISRDNAK | DEAGIGGFN | DYWGQGT | Vicugna |
| | GSLRLHCAASG | YR | QRELVAAIT | | NTIDLQMNSLKPEDTAVYY | | QVTVSS | Pacos |
| | | | | | CNA | | | (30538) |
| 4LHQ | VQLVETGGGTVQTG | GSFS | MGWFRQAPGK | WSAS | TYYRDSVKGRFTVSRDNA | SSVYAEMPY | NYWGQGT | Vicugna |
| | GSLRLSCSASG | RNA | EREFVAAIN | S | KNTVYLHLNSLKLEDTAAY | ADSVKATSY | QVTVSS | Pacos |
| | | | | | YCAG | | | (30538) |
| 4M3K | QVQLQESGGGLVQP | SISSIT | MGWYRQDPGK | SVGD | TTYAGSVKGRFTISRDNAK | FMSTNSGRT | SFWGQGT | Lama |
| | GGSLRLSCAASG | T | GRELVALIN | | NTVYLEMSSLKPEDTAVYY | G | QVTVSS | Glama |
| | | | | | CNA | | | (9844) |
| 4NC2 | QVQLVESGGGLVQA | LTFSR | MGWFRQAPGK | WGGT | PNYADSVKGRFTISRDNSK | GLGWDSRYS | NYWGQGT | Lama |
| | GGSLRLSCAASG | YV | EREFVAAIT | | NTQYLQMNSLKPEDTAVY | QSY | QVTVSS | Glama |
| | | | | | YCAA | | | (9844) |
| 4P2C | QVQLQESGGGLVQA | SIFRL | MGWYRQAPGK | SYGD | TNYRDSVKGRFTISRDNAK | NIEAGTYYGP | DYWGQGT | Lama |
| | GGSLRLSCAVSG | S | QREFVASIT | | NTVYLQMNSLKPEDTAVYY | GR | QVTVSS | Glama |
| | | | | | CNA | | | (9844) |
| 4Y7M | QVQLVESGGGLVQA | FTFE | IGWFRQAPGK | NLDG | TYYPDSVKGRFTASSDKAK | VNAQGIYCTD | DYWGKGT | Lama |
| | GGSLRLSCAASG | DYA | EREGVSCIS | S | NMVYLQMNSLKPEDTAVY | YIIGPYGM | QVTVSS | Glama |
| | | | | | YCAA | | | (9844) |
| 4QLR | DVQLVESGGGLVHP | RTFS | LGWFRQAPGK | WSGG | TYYADSVQGRFTISRDNDK | DKYYTGPGG | DYWGRGT | Lama |
| | GGSLRLSCAASG | DYA | DREFVAAIS | S | NSVYLQMNSLKPEDTAVYY | ESVY | QVTVSS | Glama |
| | | | | | CAA | | | (9844) |
| 6APQ | KVQLQESGGGLVQA | GTFSI | LGWYRRAPGK | SGGI | TRYADSVKGRFTISRDNGK | RNWGGGLD | VYWGQGT | Lama |
| | GGSLRLSCAASG | NT | EREFVARIS | | NTVYLDMNSLKPEDTAVYY | | QVTVSS | Glama |
| | | | | | CMY | | | (9844) |
| 4W2Q | KVQLQESGGGLVQV | FTFR | MGWYRRAPGK | TTGT | ADYGDFVKGRFTISRDNAE | DPYGMESL | RYWGQGT | Lama |
| | GGSLRLSCKASG | SSA | QRELVASLT | | NTVDLHMNSLKPEDTAVYY | | QVTVSS | Glama |
| | | | | | CHE | | | (9844) |
| 4W6W | QVQLQESGGGSVQA | YTSG | MGWFRQAPGK | TSGI | VNYADSVKGRFTISQDSAK | GPFVYGRGC | SYWGQGT | Lama |
| | GGSLRLSCAASG | RDS | EREGVACID | | KTLYLEMNSLKPEDTALYS | LGQAFY | QVTVSS | Glama |
| | | | | | CAT | | | (9844) |
| 4W6Y | QVQLQESGGGSVQA | YTYS | MAWFRQVPGK | TRGGI | TYYADSVKGRFTISRDNAK | VREATYSDN | DYWGQGT | Lama |
| | GGSLRLSCAASG | SNC | EREGVASIN | | NTVSLQMNSLKPEDTATYY | RCSVRSYTY | QVTVSS | Glama |
| | | | | | CAA | | | (9844) |
| 4WEM | QVQLQESGGGLVQA | NVDRI | MGWFRQAPGK | EGGI | LNYGDFVKGRFTISRDNAK | SHWGTLLIKG | EHWGKGT | Lama |
| | GGSLRLSCEASG | DA | QREFVGYIS | | NTVYLQMSNLKSEDTGVYF | I | QVTVSS | Glama |
| | | | | | CAA | | | (9844) |
| 4WEN | QVQLQESGGGLVQP | SISSI | MGWYRQAPGS | NTGV | TEFADSVKGRFTISRDNAK | TDWGTLLIKG | DHWGKGT | Lama |
| | GGSLRLSCTASG | NA | KREFVAHIT | | TTVDLQMNSLKPEDTAVYY | I | QVTVSS | Glama |
| | | | | | CAA | | | (9844) |
| 4WEU | QVQLQESGGGLVQA | LTFDT | MGWFRQAPGK | WTGIS | TYYADIAKGRFTISRDNAKN | QKSLNVPAP | DYWGQGT | Lama |
| | GGSLRLSCAASG | YA | KREYVAAIS | | TLYLQMDSLKPEDTAVYYC | W | QVTVSS | Glama |
| | | | | | AA | | | (9844) |
| 5O04 | QVQLQESGGGLVQP | SIFSIY | MGWYRQAPGK | SGGG | TNYADSVKGRFTISGDNAK | EDYSAYAPP | GSRGRGT | Vicugna |
| | GGSLRLSCAASG | A | QRELVASIS | | NTVYLQMNSLKPEDTAVYY | S | QVTVSS | Pacos |
| | | | | | CKR | | | (30538) |
| 4X7F | DVQLVESGGGLVQP | SILSF | MAWYRQGPGE | REGS | TDYADSVKGRFTISRDNAK | GIS | NPWGQGT | Vicugna |
| | GGSLRLSCAASE | NH | QRELVAVIT | | NMVYLLMSNLRPEDTAVYY | | QVTVSS | Pacos |
| | | | | | CNR | | | (30538) |
| 4ZG1 | QVQLQESGGGLVQA | STFGI | MGWYRQAPGK | SGGS | TDYADSVKGRFTISRDNAK | RVGITML | AHWGQGT | Lama |
| | GGSLRLSCAASG | RT | QRDLVAIIS | | NTVYLQMDSLKPEDTAIYY | | QVTVSS | Glama |
| | | | | | CNA | | | (9844) |
| 5BOP | QVQLQESGGGLVQA | GTFS | MGWFRQAPGK | WTGA | TYYADSVRGRFTISRDNAK | RRWLGGSYF | DFWGQGT | Lama |
| | GGSLRLSCAASG | TYG | EREFVAASS | N | NTVYLEMNSLKPEDTAVYY | DPGNY | QVTVSS | Glama |
| | | | | | CAA | | | (9844) |
| 5BOZ | QVQLVESGGGLVQA | RTFS | MGWFRQAPGK | WADG | TLYGDSVKGRFTVSRDNV | NKFVRGLVA | DYWGQGT | Vicugna |
| | GGSLRLSCAASG | RSS | EREFVASIV | T | KNMVYLQMNNLKPEDTAL | VRAIDY | QVTVS | Pacos |
| | | | | | YYCAD | | | (30538) |
| 5E0Q | QVQLVESGGGPVEA | RSFS | MAWFRQAPGK | WSSG | TSIADSVKGRFTMSRDPAK | SNRGSLYTL | EDWGQGT | Vicugna |
| | GGSLRLSCAASG | NSV | EREFLSVLN | R | ITVYLQMNGLKPEDTAVYY | DNQNRY | QVTVSS | Pacos |
| | | | | | CAA | | | (30538) |
| 5F1K | DVQLQESGGGLVQA | RTFR | MAWFRQAPGK | WVGA | TLYADFAKGRFTISRDNAK | GRGIVAGRIP | ADWGQGT | Lama |
| | GGSLRLSCTGSG | NYP | EREFVAGIT | S | NTVYLQMNSLKPEDTAVYS | AEY | QVTVSS | Glama |
| | | | | | CAA | | | (9844) |
| 5F21 | DVQLQESGGGSVQA | LLFRL | MGWYRQAPGK | VGGK | DSVQGRFIITRDNTGDNTK | ASPAVGA | DTWGQGT | Lama |
| | GGSLTLSCTASG | AS | ERELIATIT | TNYK | STVTLQMNRLKPEDTAVYY | | RVTVSS | Glama |
| | | | | | CNT | | | (9844) |
| 6EY6 | QVQLVESGGGLVQA | RTFS | MGWFRQAPGK | WSGG | IHYADSVKGRFTISRDNAK | GFAGYGSFT | DYWGQGT | Lama |
| | GGSLRLSCAASG | SYV | EREFVTAIS | S | NTVYLQMNSLKPEDTAVYT | SRSARDSDK | KVTVSS | Glama |
| | | | | | CVA | Y | | (9844) |
| 5JA8 | QVQLQESGGGLVQP | FTLDY | IGWFRQAPGK | SSGG | TNYADSVKGRFTVSRDNA | DFACPLIREY | DYWGQGT | Lama |
| | GGSLRLSCAASG | YA | EREGVSCIS | T | KNTVYLQMNSLKPEDTAVY | | QVTVSS | Glama |
| | | | | | YCVA | | | (9844) |
| 5JA9 | QVQLQESGGGLVQP | FTFS | MRWYRQAPGE | SVGG | TNYADSVKGRFTISRDNGK | RLSLIS | DSWGQGT | Lama |
| | GGSLRLSCAASG | NYA | EREFVAFIS | S | NTLYLQMNSLKPEDTAVYF | | QVTVSS | Glama |
| | | | | | CVA | | | (9844) |
| 5LHR | QVQLQESGGGLVQA | RTFS | MGWFRQAPGK | WSGG | TNYADSVKGRFTISRDNAK | DLASSRDVS | WYWGQG | Vicugna |
| | GGSLRLSCAASG | SYV | EREFVAAIS | S | NTVYLQMNSLKPEDTAVYY | S | TQVTVSS | Pacos |
| | | | | | CAA | | | (30538) |
| 5LMJ | QVQLVESGGGLVQA | RTFS | MAWFRQAPGK | TKGG | TWYHDSVKGRFTISRDNAK | GAVTYYSAR | DYWGQGT | Lama |
| | GGSLRLSCTASG | DYD | ERDRVSAIS | S | NTVYLQMNSLKPEDTAVYY | YEY | QVTVSS | Glama |
| | | | | | CAA | | | (9844) |
| 5M7Q | QVQLQESGGGSVQA | NTGR | MGWFRQAPGK | RLGG | TSYAGPVKGRFTISQDNAK | DSRPIYSGT | RYWGQGT | Camelus |
| | GGSLRLSCAVSE | | EREKVAIIT | Y | NTVYLLMNSLKPEDTAIYY | W | QVTVSS | Dromedarius |
| | | | | | CAA | | | (9838) |
| 5MJE | QVQLQESGGGLVQP | DRRTI | MGWFRQAPGN | SSGV | TTYVDSVKGRFSISRDSAE | TCYEESRRP | TYWGQGT | Lama |
| | GGSLRLSCVVSG | YT | QGELVATMT | | DSAKNTVSLQMNSLKPEDT | LGSRN | QVTVSS | Glama |
| | | | | | AFY | | | (9844) |
| 5O03 | QVQLQESGGGLVQP | FTLG | IGWFRQAPGK | GSGG | ANYAASVKGRFTISRDNAK | DLSSLTTVQA | DYWGLGT | Lama |
| | GGSLRLSCAASG | YYP | GLEGVSCIS | S | NTVYLQMNSLKPEDTAIYY | MCVIPRPGFS | QVTVSS | Glama |
| | | | | | CAA | AKAY | | (9844) |
| 5O04 | QVQLQESGGGLVQP | IIFFM | VGWYRQAPEK | SDVS | TKYADSVKGRFTISRDNAK | RRASA | DYWGQGT | Vicugna |
| | GGSLRLSCTAPR | YD | QRELVAQIN | | RTVYLQMNDLKPEDAAVY | | QVTVSS | Pacos |
| | | | | | YCNV | | | (30538) |
| 5O05 | QVQLQESGGGLVQP | SVSR | MGWYRQTPGN | SVGS | TNYADSLKGRFTISRENAE | IRYSPIHAPL | DYWGQGT | Vicugna |
| | GGSLRLSCAASG | TYV | QRELVATIT | | NTVYLQMNSLKPEDTAIYY | | QVTVSS | Pacos |
| | | | | | CKY | | | (30538) |
| 5O0W | QVQLQESGGGLVQP | TALTY | IGWFRQAPGK | RINSG | TDYADSVKGRFTISRDDAK | DTTDRYDSA | DYWGQGT | Vicugna |
| | GGSLRLSCAASE | YA | EREGVSCIS | SGAR | NTVTLQMNSLEPEDTARYY | NGRYYCTISS | QVTVSS | Pacos |
| | | | | | CAL | DTY | | (30538) |
| 5OCL | QGQLVESGGGLVQA | IIFREL | IDWYRQAPGK | SAGM | TNYADSVKGRFTISRDNAK | LPRFS | HLWGQGT | Vicugna |
| | GGSLRLSCAASG | G | QRELVASIA | | NTVYLQMNSLKPEDTAVYY | | RVTVSS | Pacos |
| | | | | | CHT | | | (30538) |
| 5OCL | QVQLQESGGGLVQA | RTWS | MGWFRQAPGK | WRGG | THYADFVKGRFTISRDNVK | NPNPSGSSV | DYWGQGT | Lama |
| | GDSLRLSCAASG | IYG | EREFVAGIT | N | NTVYLQMNSLKPEDTAVYY | YRRN | QVTVSS | Glama |
| | | | | | CAA | | | (9844) |
| 5OMN | QVQLQESGGGLVQP | TIFSR | MGWYRQAPGK | SDRS | TWYAESVEGRFTISRDNVK | RTL | GSWGQG | Vicugna |
| | GGSLRLSCAASG | NI | ERELVASIY | | NTLYLQMNSLKPEDTAMYY | | TQVTVSS | Pacos |
| | | | | | CRD | | | (30538) |
| 5TJW | QVQLQESGGGLVQA | RTST | QGWFRQPPGK | THDG | THYTDSVKGRFTISRDNAE | SLGYSGAYA | DYWGQGT | Vicugna |
| | GGSLRLTCALSE | SYA | EREFVASLR | N | NTLYLQMNSLKTEDTAVYY | SGY | QVTVSS | Pacos |
| | | | | | CAA | | | (30538) |
| 5TP3 | QVQLQESGGGLVQP | FTLDY | IGWFRQAPGK | GSSG | TYYPDSVKGRFTISRDNAK | IRSSSWGGC | DYWGKGT | Lama |
| | GGSLRLSCAASG | YY | EREAVSCIS | S | NTVYLQMNSLKPEDTAVYY | VHYGM | QVTVSS | Glama |
| | | | | | CAT | | | (9844) |
| 5TOK | QVQLQESGGGLVQP | FTLDY | IGWFRQAPGK | SSHG | TYYADSVKGRFTISRDNAK | VAVAHFRGC | DYWGKGT | Lama |
| | GGSLRLSCAASG | YY | EREGVSCIS | S | NTVYLQMNSLKPEDTAVYY | GVDGM | QVTVSS | Glama |
| | | | | | CAT | | | (9844) |
| 5U4M | QVQLVESGGGLVQP | FSRF | IGWFRQAPGK | SSSD | TSYSDSVKGRFTISRDNAK | RLGGWASFS | DYWGQGT | Vicugna |
| | GGSLRLSCVASE | TLDY | EREGLSSIS | GF | NTVYLQMNSLKPEDTAVYY | PQEY | QVTVS | Pacos |
| | | YA | | | CAA | | | (30538) |
| 5VL2 | QVQLQQSGGGLVQA | RTHT | MGWFRQAPGK | GVAA | TTYADSVRGRFTISRDDAK | RASMAVSTS | PIWGQGT | Lama |
| | GGSLRLSCAASG | PYA | EREFVGGIG | T | ATVYLQMNSLKPEDTAVYY | PRVY | QVTVSS | Glama |
| | | | | | CAT | | | (9844) |
| 5VM0 | EVQLVESGGGLVQT | RTYT | MAWFRQAPGK | GIDGT | AAYADSVRGRATISRDSAK | RASMQVLTS | PIWGRGT | Lama |
| | GDSLRLSCAASG | PYA | EREFVAGIG | | KTVYLQMNSLKPEDTAVYS | PRVY | QVTVSS | Glama |
| | | | | | CAT | | | (9844) |
| 5VM6 | QVKLQQSGGGMVQ | RALS | VGWFRQIPGK | WSSS | TWYADSVKGRFTISKDDAA | ALRRPGSDA | PYWGQGT | Lama |
| | TGDSLRLSCVGSR | STI | EREFVGGIA | D | NGVHLQMSSLKPEDTAVY | SDYTRIPDY | QVTVSS | Glama |
| | | | | | YCAS | | | (9844) |
| 5VXJ | QVQLAETGGGLAQP | FTFS | MNWYRQAPGK | DAGG | GSIADPVKGRFTISRDNAK | GIFDGNYR | TYWGQGT | Vicugna |
| | GGSLRLSCAASG | RAV | ERELVARIY | N | NTVHLQMNSLKPEDTAMY | | QVTVSS | Pacos |
| | | | | | VCNA | | | (30538) |
| 5VXL | QVQLAESGGGLVQP | GVFII | MGWYRQAPGK | SYSG | TNYADSVKGRFTISRDNVE | NLRTN | NYWGQGT | Vicugna |
| | GGSLRLSCSASG | YN | QRELVASID | SI | KRVYLEMNNLKPEDTAVYY | | QVTVSS | Pacos |
| | | | | | CNA | | | (30538) |
| 6FYT | EVOLVESGGGLVQP | SIFDI | MDWYRQAPGK | RDGS | TNYADSVKGRFTISRDNAK | SLYRDPLGV | VYWGKGA | Lama |
| | GGSLRLSCAVS | YA | QRDLVATSF | | NTLYLQMNSLKPEDTAVYL | AGGMG | LVTVSS | Glama |
| | | | | | CHV | | | (9844) |
| 6DBD | QVKLEESGGGLVQA | RIEGI | VGWYRQGPGK | RNG | NTRYDGSAEGRFTIARENA | LSSGVNP | WAWGQG | Lama |
| | EGSLRLSCVTSG | LL | QRDVVASID | | NTVYLQMNNLRPEDSNVY | | TQVTVSS | Glama |
| | | | | | VCGA | | | (9844) |
| 6DBE | QVKLEESGGGLVQA | STFSI | MGWFRQAPGK | WNGGW | TYYADSVKGRFTIYRDNYK | DDLMIDR | DYWGQGT | Lama |
| | GGSLRLSCAASG | YT | EREFVADIS | S | NTVYLQMNSLKPEDTAVYY | | QVTVSS | Glama |
| | | | | | CNA | | | (9844) |
| 6DYX | QVKLEESGGGLVQA | RTYS | MGWFRQTPGK | WSGG | THYADSVKGRFTISRDNAK | PKGHTGD | HYWGPGT | Vicugna |
| | GGSLRLSCAASG | TYA | ERELVAAIN | N | STVYLQMNSLKPEDTAVYY | | QVTVSS | Pacos |
| | | | | | CAA | | | (30538) |
| 6F5G | QVKLEESGGGLVQA | RTFS | MGWFRQVPGR | DSDA | IYYTDSVKGRFTISRDNAKN | RQYYSGRVY | DYWGQGT | Lama |
| | GGSLRLSCSPSD | AYA | EREFVATIR | S | TVYLQMNSLIPDDTAVYYC | STFREEY | QVTVSS | Glama |
| | | | | | AA | | | (9844) |
| 6H6Y | QVQLQESGGGLVQA | RTFS | SGWFRQAPGK | WSDS | TNYADSVKGRFTISRDTAK | RRLATY | DYWGQGT | Vicugna |
| | GGSLRLSCAVSG | NYY | EREFLASIR | T | NTVYLQMNSLKLEDTAVYH | | QVTVSS | Pacos |
| | | | | | CAA | | | (30538) |
| 6H70 | QVQLQESGGGLVMT | RTIDV | MAWFRQAPGK | WSGM | TYSADSVKDRFTISRDKTK | RSRFIVGVPQ | DYWGQGT | Vicugna |
| | GGSLRLSCAVSG | SV | EREFVSGMR | T | NTVYLQMNSLKPEDTAVYY | ARDLY | QVTVSS | Pacos |
| | | | | | CAA | | | (30538) |
| 6HHU | QVQLVESGGGLVQA | SIFRV | MGWYRQVTGK | SGGR | TNYADSVKGRFTISRDNIK | DLGTGGRSY | DYWGQGT | Lama |
| | GGSLRLFCAASG | NA | QRELVAAIT | | NTVYLQMNSLKPEDTAVYY | | QVTVSS | Glama |
| | | | | | CNA | | | (9844) |
| 6JRI | DVQLVESGGGLVQA | FTFD | MGWFRQAPGK | WSGS | TYYTDSVKGRFTISRDNAK | ARYRGIGSQ | IYWGQGT | Vicugna |
| | GGSLRLSCTASG | DYT | EREGVSYTG | MSGS | NTLYLQMNSLKPEDTAMYY | VRWTDF | QVTVSS | Pacos |
| | | | | T | CAA | | | (30538) |
| 6K2I | QLQLVESGGGLVQA | RTFR | MGWFRQAPGK | WSGG | TYYADSVKGRFTISRDNAK | GVWRSSGW | DYWGQGT | Vicugna |
| | GGSLRLSCVASG | SNA | EREFVAAIR | S | NTVYLQMNSLKPEDTAVYL | DTP | QVTVSS | Pacos |
| | | | | | CAA | | | (30538) |
| 6NFJ | QVQLVESGGGLVQA | RAIRS | MAWFRQAPGK | YIFN | TYYADSVKGRFTISRDNAK | GVGASVSVS | NYWGQGT | Lama |
| | GGSLRLSCAASG | YF | EREFVAAVE | | NTVFLQMNSLKPEDTAVYY | ESWY | QVTVSS | Glama |
| | | | | | CAA | | | (9844) |
| 6OBC | QVQLAETGGGLVQP | SISSF | MGWYRQAPGK | NYGR | TDYGDSLKGRFTISRDNAA | RKWERSVLE | DYWGQGT | Vicugna |
| | GGARTLSCAASE | YF | PRELVAEIS | | NTVNLQMNNLAPEDTALYY | | QVTVSS | Pacos |
| | | | | | CNA | | | (30538) |
| 6OBG | QLVETGGGLVQPGG | SIFSI | MGWYRQAPGK | SSGR | INEADSVKGRFTISRDNAK | LAGSHYYDE | EYWGQGT | Vicugna |
| | SLRLSCAASG | NA | ERELVADIS | | NTVYLQMNSLKPEDTAVYY | Y | QVTVS | Pacos |
| | | | | | CNV | | | (30538) |
| 6OBM | QVQLVETGGGGLVQ | GSISS | MGWYRQAPGK | ASGR | TNYADSVKGRFTISRDNAK | VGGTYYYDE | DYWGQGT | Vicugna |
| | AGGSLRLSCAAS | LNA | ERELVADIS | | NTVSLQMNSLKPEDTAVYY | Y | QVTVS | Pacos |
| | | | | | CNA | | | (30538) |
| 6OBO | VQLAETGGGLAQAG | SIFSI | MGWYRQAPGK | GSGR | TNYADSVKGRFTISRDNAK | VGGSYYYDE | NYWGQGT | Vicugna |
| | GSLRLSCAASG | NA | ERELVADIS | | NTVSLQMNSLKPEDTAVYY | Y | QVTVSS | Pacos |
| | | | | | CNV | | | (30538) |
| 6OC8 | EVQLVESGGGLVQA | SIFRA | VGYYRQTPGR | GGGS | THYADPVKGRFTISRDNAK | GPTLTTGDA | PYWGQGT | Lama |
| | GGSLRLSCAASA | LN | QRELIAGIS | | NRVDLQMNNLKPEDTAVY | G | QVTVSS | Glama |
| | | | | | YCNA | | | (9844) |
| 6OCA | VQLVETGGGVVQAG | RTFS | LGWFRQAPGK | WSVD | TDLANSVKGRFTISGVNAK | GLRGGTYAR | DYWGQGT | Vicugna |
| | GSLRLSCVASG | VSGR | EREFVGSIS | GDAT | NTVYLQMNSLKPEDTAVYY | TIYEY | QVTVSL | Pacos |
| | | TFSD | | YY | CAA | | | (30538) |
| | | HG | | | | | | |
| 6RBB | RGSEFEVQLVQAGG | GTFA | MGWLRQAPGK | PSGG | RIYADSVKGRFTISRDNAG | RRRFDGTSY | DSWGQGT | Lama |
| | SLRLSCAASG | TSP | GTEFVAAIS | D | NFIYLQMNSLKPEDTAVYY | YTGDY | LVTVSS | Glama |
| | | | | | CAV | | | (9844) |
| 6R7T | QVQLQESGGGLVQP | FTFST | MSWFRQAPGK | SSGG | QSYADSVKGRFTISRDNAK | AAWRVGTY | DYRGQGT | Lama |
| | GGSLRLSCAASG | YA | GLEWVASIN | GI | NTLYLQMNSLEPEDTAVYY | | QVTVSS | Glama |
| | | | | | CAA | | | (9844) |
| 6RUM | QVQLVESGGALVQP | FPVN | MRWYRQAPGK | SAGD | SSYEDSVKGRFTISRDDAR | NVGLPADLA | EYWGQGT | Lama |
| | GGSLRLSCAASG | RYS | EREWVAGMS | R | NTVYLQMNSLKPEDTAVYY | WFKRNTLNK | QVTVS | Glama |
| | | | | | CNV | PVIMGRHTW | | (9844) |
| | | | | | | ESIGRPLPGR | | |
| | | | | | | KNIILSSQPG | | |
| | | | | | | TDDRVTWVK | | |
| | | | | | | SVDEAIAACG | | |
| | | | | | | DVPEIMVIGG | | |
| | | | | | | GRVYEQFLP | | |
| | | | | | | KAQKLYLTHI | | |
| | | | | | | DAEVEGDTH | | |
| | | | | | | FPDYEPDDW | | |
| | | | | | | ESVFSEFHD | | |
| | | | | | | ADAQNSHSY | | |
| | | | | | | CFEILERRGG | | |
| | | | | | | GGGMISLIAA | | |
| | | | | | | LAVDRVIGME | | |
| | | | | | | NAMPWNF | | |
| 6U55 | QVQLQESGGGLVQP | FTLAE | VGWFRQAPGK | VGGT | THSIDSVKGRFTISRDNMK | YSSAYDR | NYWGQGT | Lama |
| | GGSLRLSCTASG | YG | ERELVALIA | | NTVYLQMNSLNVEDTAVYY | | QVTVSS | Glama |
| | | | | | CNA | | | (9844) |
| 6Z6V | QVQLVETGGGLVQA | RTFN | MAWFRQAPGT | AGGG | THYADSVKGRFVISRDNDK | DENPPGWPS | DYWGQGT | Lama |
| | GGSLRLSCAASG | NDV | EREFVALIT | | NMAYLQMNSLKSEDTAIYY | RWSSAY | QVTVSS | Glama |
| | | | | | CGA | | | (9844) |

TABLE 10B

| | | SEQ ID | SEQ ID | SEQ ID | | | SEQ ID | |
|---|---|---|---|---|---|---|---|---|
| | | NOS: | NOS: | NOS: | | | NOS: | |
| | SEQ ID NOS: | 8975- | 9991- | 11021- | SEQ ID NOS: | SEQ ID NOS: | 14072- | |
| | 7945-8974 | 9990 | 11020 | 12029 | 12030-13059 | 13060-14071 | 15101 | Source_ |
| ID | Frame1 | CDR1 | Frame2 | CDR2 | Frame3 | CDR3 | Frame4 | organism |
| 3ln9_A | EVQLVESGGGL | YTFSHRY | HRWFRQAP | QSGMR | TYYADSVKGRFTISRDNA | GTRKNVWTRQHP | DYWGQG | Camelidae |
| | VQPGGSLRLSC | | GKEREIVAV | | KNTVYLQMNSLKPEDTA | F | TQVTVSS | |
| | TASG | | IS | | MYYCAA | | | |
| 3tpk_A | EVQLVESGGG | YTFSQEF | VIWFRQAP | LRKGW | TYYADSVKGRFTISQDNA | APTATHALYF | DYWGQG | Camelidae |
| | SVQPGGSLRLS | | GKEREIVSG | | KNTVYLQMNNLKPEDTA | | TQVTVSS | |
| | CTASG | | IS | | MYYCAA | | | |
| 2x89_C | QVQLQESGGG | YTDSRYC | MAWFRQAP | SGRD | TYYADSVKGRFTFSQDN | DIPLRCRDIVAKG | RYWGQG | Camelus |
| | SVQAGGSLRLS | | GKEREWVA | | AKNTVYLQMDSLEPEDTA | GDGF | TQVTVSS | |
| | CAASG | | RIN | | TYYCAT | | | |
| 5dxw_A | QVQLVETGGG | FTFSMHA | MTWYRQAP | SHGDR | ANYTDSVRGRFTISRDNT | PRY | DSWGQG | Camelidae |
| | LVQPGGSLRLS | | GKQRELVA | | KNMVYLQMNSLKPEDTA | | TQVTVSS | |
| | CTASG | | VIT | | VYYCNV | | | |
| 5e5m_H | QVQLVESGGG | STISSVA | VGWYRQTP | TSSTT | ATYADSVKGRFTISRDNA | GL | TNWGRGT | Camelidae |
| | LAQPGGSLRLS | | GNQREWVA | | KNTIYLQMNSLKPEDTAV | | QVTVSS | |
| | CAASG | | TSS | | YYCKT | | | |
| 5imo_B | QVQLVESGGG | RTFSSYG | MGWFRQAP | WNGGS | TYYADSVKGRFTISRDNA | GRWDKYGSSFQD | DYWGQG | Camelidae |
| | LVQAGGSLRLS | | GKEREFVA | | KNTVYLQMNSLKPEDTAV | EY | TQVTVSS | |
| | CAASG | | AIR | | YYCAA | | | |
| 5jds_B | QVQLQESGGG | KMSSRRC | MAWFRQAP | TTSGS | TYLADSVKGRFTISQNNA | DSFEDPTCTLVTS | QYWGQG | Camelidae |
| | LVQPGGSLRLS | | GKERERVA | | KSTVYLQMNSLKPEDTA | SGAF | TQVTVSS | |
| | CAASG | | KLL | | MYYCAA | | | |
| 6qtl_H | QVQLVESGGG | RTGTIYS | MAWFRQAP | WSSGI | TYYMDSVKGRFTISRDKG | TRAYSVGY | DYWGQG | Camelidae |
| | LVQAGGSLRLS | | GKEREFLAT | | KNTVYLQMDSLKPEDTAV | | TQVTVS | |
| | CTASG | | VG | | YYCTA | | | |
| 6dbg_D | QVKLEESGGG | HTYSTYC | MGWFRQVP | VGGSS | TWYADSVRDRFTISQDN | HRFCNTWSLGTL | NVWGQG | Camelus |
| | SVQAGGSLRLS | | GKEREGVA | | AKNTVYLQMNSLKLEDTA | | TQVTVSS | |
| | CAASG | | RIN | | IYYCTL | | | |
| 6dyx_D | QVKLEESGGGL | RTYSTYA | MGWFRQTP | WSGGN | THYADSVKGRFTISRDNA | PKGHTGD | HYWGPGT | Vicugna |
| | VQAGGSLRLSC | | GKERELVA | | KSTVYLQMNSLKPEDTAV | | QVTVSS | |
| | AASG | | AIN | | YYCAA | | | |
| 6dbe_B | QVKLEESGGGL | STFSIYT | MGWFRQAP | WNGGS | TYYADSVKGRFTIYRDNY | DDLMIDR | DYWGQG | Lama |
| | VQAGGSLRLSC | | GKEREFVA | | KNTVYLQMNSLKPEDTAV | | TQVTVSS | |
| | AASG | | DIS | | YYCNA | | | |
| AIZ0302930.1 | QVQLVESGGG | RSSFSRYF | MGWFRQAP | WTGSS | TYYADSVKGRFTISRDNA | DFLRGSRRYGINT | DYWGQG | Camelidae |
| | SVQAGGSLSVS | | GKEREFVA | | KNTVYLQMNSLKPEDTAV | TEEY | TQVTVSS | |
| | CAASG | | AIS | | YYCAA | | | |
| CAP58559.1 | EVQLQASGGG | STFRINR | MGWYRQA | SGGS | TNYADSVKGRFTISRDNA | VTPW | PYWGQGT | Vicugna |
| | LVQAGGSLRLS | | PGKQRELV | | KGTVNLTMNSLKPEDTAV | | QVTVSS | |
| | CAASG | | ASIN | | YYCNR | | | |
| CAP58560.1 | EVQLQASGGG | STFSINV | IGWYRQAP | RSGN | TNYADSVEGRFTISRDYA | KTYLLH | MYWGQG | Vicugna |
| | LVQAGGSLRLS | | GKQRELVA | | KNTVYLQMNSLKPEDTAV | | TQVTVSS | |
| | CAASG | | GIS | | YYCHS | | | |
| CAG33966.1 | EVQLQASGGG | SIFSIDG | MGWYRQA | SGGS | TNYADSVKGRFTISRDNA | RTWR | DYWGQG | Camelidae |
| | LVQPGGSLRLS | | PGKQRELV | | KNMMFLQMRSLLPENTA | | TQVTVSS | |
| | CAASA | | AGIT | | VYYCHA | | | |
| CAG33969.1 | DVQLQASGGG | IVFRVST | MGWYRQA | SGGS | TNYADSVKGRFTIYRDNA | NTGLRTL | SFWGQGT | Camelidae |
| | LVQPGGSLRLS | | PGKQRELV | | KNTVYLQMNSLKPEDTAV | | QVTVSS | |
| | CAASG | | ATIS | | YYCNA | | | |
| CAG33970.1 | EVQLQASGGG | RTFSNAR | MAWFRQAP | WSGTT | TNYADSVKGRFTISRDNA | DGSWRGVCNNV | DYWGQG | Camelidae |
| | LVQAGGSLRLS | | GQEREFVA | | KNTVYLQMNSLKPEDTAV | Y | TQVTVSS | |
| | CAASE | | AIS | | YYCAA | | | |
| CAG33972.1 | RVQLQASGGG | RTLSSYA | MGWFRQAP | WSGTR | TSYADSVKGRFTISRDNA | RSMRSNLYTVYE | DYWGQG | Camelidae |
| | LVQAGGSLRLS | | GKDREFVA | | KNTVYLQMNSLKPEDTAV | APHDY | TQVTVSS | |
| | CAASG | | AIS | | YYCAM | | | |
| CAG33974.1 | CELQASGGGL | SIFSNHA | MGWYRQP | SGGR | INYADFVKGRFTISRDNA | WRLGY | DYWGQG | Camelidae |
| | VQPGGSLRLSC | | PGKQREFV | | KNTVYLQMNKLKPEDTAV | | TQVTVSS | |
| | AASG | | ANIF | | YLCNA | | | |
| CAG33975.1 | EVQLQASGGG | RTFSTYN | MAWFRQAP | WSGG | TYYADSVKGRFTISRDNA | SRRASYFGDPTD | RSWGQG | Camelidae |
| | LLQAGDSLRLS | | GKERELVA | | KNTVSLQMDSLKPEDTAV | F | TQVTVSS | |
| | CAASG | | AIT | | YYCTR | | | |
| AAP22639.1 | QVQLVESGGG | YTYRSTC | LGWFREAP | RGTGD | TYYGDAVRGRFTISQDNA | YSRFGYSGLC | NDWGQG | Camelus |
| | SVQAGGSLRLS | | EKEREVVA | | KKTVYLQMNSLKPEDTA | | TQVTVSS | |
| | CVASG | | AIY | | MYYCNT | | | |
| AAP22640.1 | DVQLVESGGG | YTYENRY | MAWFRQAP | RGGNN | PYYADSVKGRFTISQDKA | QAGRFSGPFTNQ | DYWGQG | Camelus |
| | SVPAGGSLRLS | | GKEREGVA | | KNIVSLLMNSLKPEDTAIY | TY | TQVTVSS | |
| | CAVSG | | AIW | | YCAA | | | |
| AAP22641.1 | QVQLVESGGG | YSVSIGC | MAWFRQAP | RGGSM | TDYTASVKGRFTISRDND | DGPEIATMIG | GSRGRGT | Camelus |
| | SVEAGGSLRLS | | GSGREGVA | | QRTVTLQMNSLKPEDTA | | QVTVSS | |
| | CVVSG | | GIS | | VYYCAR | | | |
| AAP22642.1 | DVQLVESGGG | ITYRMYC | MAWFRQPP | RIDRAG | TYYADSVKGRFTISQDNA | RDYGCYSGSAQG | AYWGRGT | Camelus |
| | SVLTGGSLRLS | | GQEREMVA | GR | KDTLYLQMNSLKPEDTAI | TEF | QVTVSS | |
| | CAAPG | | TVN | | YLCAA | | | |
| 1yc7_B | DVQLVESGGG | STYSPCT | TGWYRQAP | SPGT | IYYQDSVKGRFTISRDNA | QCGVRSIR | EYWGQGT | Camelus |
| | SVQAGGSLRLS | | GKEREWVS | | KNTVYLQMNSLQREDTG | | QVTVSS | |
| | CAVSG | | SIS | | MYYCQI | | | |
| AAP22645.1 | QVQLVESGGG | STYRRVF | TGWFRQAP | VGVGD | TYYADSVKGRFTISQDNA | FMTGTQVLRPQD | KYWGQGT | Camelus |
| | SVLAGGSLRLS | | GKEREGVA | | KNTVYLQMNSLKPEDTA | Y | QVTVSS | |
| | CAASE | | AIL | | MYYCAA | | | |
| AAL40829.1 | EVQLQASGGG | RPFSSFA | MGWFRQAP | ASGGE | TYYTGSLKGRFTISRDNA | TINGA | ARRGQGT | Lama |
| | SVQAGDSLRLS | | GKEREFVA | | KNTVYLQMDSLKPEDTG | | QVTVSS | |
| | CAASG | | AIS | | VYYCAA | | | |
| ACF49483.1 | DVQLQESGGG | YDNDNYC | MGWFRQTP | IGGGS | PVYADFVRGRFTISLDSS | IRKPQFYTCRMW | DIWGQGT | Camelus |
| | SVQAGGSLKLS | | GKEREKVA | | KDTLYLLMNAVTPEDTAM | KPRADF | QVTVSS | |
| | CAISG | | ALN | | YYCAA | | | |
| ACY01865.1 | DVQLQESGGG | DTAAYTDD | LGWFRQAT | TGSSS | TFYIDAVKGRFTFSQDND | ADFTCMPEVTAN | GHWGQG | Camelus |
| | SVQAGGSLKLA | GYC | GNEREGVA | | DKNIVYLQMNSLRPEDTA | QALNIMSGSQFAA | TQVTVSS | |
| | CTVSG | | AIN | | MYICA | G | | |
| AEA07719.1 | QVQLQESGGG | LTDSTCG | MAWYRQAP | TDGN | TYYADSVKGRFTISQDNA | WSESKRLCLPD | NYWGQG | Camelus |
| | SVQAGGSLRLS | | GKERELVST | | KNRVFLQMNSLKPEDTA | | TQVTVSS | |
| | CAASG | | | | MYYCNS | | | |
| AEX07288.1 | QVQLVESGGG | NIYRRNY | VGWFRQAP | IGSRN | TVYADSVKGRFTISQDNA | GLLRAADLGRELR | DYWGQG | Camelus |
| | SVQAGESLRLS | | GKEREGVAI | | KPTVYLQMNSLKPEDTA | SLLTSPNSV | TQVTVSS | |
| | CAGSG | | IY | | MYYCAA | | | |
| AEX07289.1 | QVQLVESGGG | HTLRSHY | MAWFRQVT | GIGSTA | TDYADSVEGRFIISRDNT | RTGFSGSWTRQT | AYWGQGT | Camelus |
| | SVQAGGSLRLS | | GKEREGVA | | ENTVYLQMADLKPEDAA | DY | QVTVFS | |
| | CASST | | YIP | | MYYCAV | | | |
| AEX07290.1 | QRQVVESGGG | FTLDEAD | MGWYRQIP | GFGQ | RYYAESVWGRFTISQDK | NRGFSRSHLTCP | GYWGQG | Camelus |
| | SVQAGETLELS | | GHECELVA | | AKNTVYLEMNSLKPEDTA | APG | TQVTVST | |
| | CTGSG | | SIG | | VYYCSA | | | |
| AEX07291.1 | QVALEECGGV | VASERCA | IYWYRQAP | RPGT | TTTIDSVKGRFSVSRDKA | LGCAQ | ATWGQGI | Camelus |
| | SVQAGGSLRLS | | GKEREWVL | | TETTFLQMDNLKPEDTG | | QVTVSS | |
| | CTAPG | | SLN | | MYTCRT | | | |
| AEX07292.1 | QMQLVESGGG | YTISTDC | MGWFRQTP | TGDGR | TYYADSVKGRFTISQDNA | RPKSGARGCADL | TYRGQGT | Camelus |
| | SVQAGGSLRLS | | GKEREGIAT | | KNTMWLEMNSLKPEDTA | WDWY | QVTVSS | |
| | CAASG | | LY | | MYYCAA | | | |
| AEX07294.1 | QAQVVETGGG | LIYMSNC | MGWFRQAP | TGSGA | TYYPDYLKGRFTITRDNA | GGGDPGNKPAIY | NYWGQG | Camelus |
| | SVKAGGSLRLS | | GKKREGVA | | KNMVFLQIDNLKVEDTAIY | SCYSGSWSREQA | TQVTVSS | |
| | CATSE | | SIY | | YCAA | ED | | |
| AEX07309.1 | QVQLVESGGG | DVYSRVC | MGWLRQAP | TGGSN | AYYADSVKGRFTISQDNA | DARRGYWRPCNS | NYWGQG | Camelus |
| | SVQAGGSLRLS | | GKERERVA | | KSTTYLQMSSLKPEDTAM | IEY | TQVTVSS | |
| | CTASG | | SIY | | YYCAT | | | |
| AEX07301.1 | QVQLQESGGG | ITHSPVC | MGWFRQAP | TAEGK | LFYLESVKGRFTFSRDTT | DPDCRATWYRGG | GAWGQG | Camelus |
| | LVQAGGSLRLS | | GKEREGVA | | KNTISLEMNGLKPDDTAM | | TQVTVSS | |
| | CVASG | | TEY | | YYCAA | | | |
| AEX07302.1 | RVHVVLSGGG | YKDDFNC | MGWFRQVP | GEWQ | PDYADFVNGRFTISQDPA | PSPGVTYGGNDQ | EVRGQGT | Camelus |
| | SVQAGGSLTLS | | GKELESVAT | G | RNTVSLQMYNLQPNDTA | PCKYL | LVIVSS | |
| | CEASG | | IA | | MYYCAT | | | |
| AEX07303.1 | QVQMVESGGG | SISSRNA | IGWFRQAP | VSGK | GVYADSVRGRFTISQNTA | DYGWKLDGRLLG | DYWGQG | Camelus |
| | KVQVGGSLTLS | | GKEREGVA | | KTTVYLQMNNLTIDDTAT | SESWGLQPSGY | TQVTVTE | |
| | CECSG | | AIY | | YVCAS | | | |
| AEX07303.1 | QVQLEEAGGG | DSGVNYC | MGWFRQAP | NR | GTTNYADSVRGRFTISKV | VHLWDGRAWYC | TYWGRGT | Camelus |
| | SVQAGGSLRLS | | GKEREGLA | | KKQLYLDMVNLKPEDTA | PERTSDF | QVTVSA | |
| | CAASG | | TIV | | MYYCAS | | | |
| AEX07313.1 | QAQLRESGGG | YTVSSHC | MGRFREAP | SRGI | ITHAGSVKGRFTISKDNS | HLARGGGYCYDL | DYWGQG | Camelus |
| | SVQPGGTLRLS | | GKEREGVA | | KNTLYLQMNSLKPEDTAL | SLSSRF | TQVTVSS | |
| | CVASG | | VID | | YYCAT | | | |
| AEX07314.1 | QEELMESGGG | FTSSRRC | MGWFRQVP | TGDSR | TNYIDSVKGRFTITHDNAK | GPRKVGSCDTSF | KYWGQGT | Camelus |
| | PVQAGESLRLS | | GQEREVVA | | DTVYLQMNSLKPEDTAM | SY | QVTVSS | |
| | CSASG | | VIF | | YFCAA | | | |
| AEX07315.1 | QVRVMESGGG | NTIDNC | VGWFRQAP | ADDGT | TVYADSVKGRFTISRDNA | NEFGVRVWSLCQ | NFWGQGT | Camelus |
| | SVQAGGSLRLS | | GREREGVA | | KNTVYLQMNNLKPEDTA | STRY | QVTVSS | |
| | CTASG | | YMH | | MYYCAV | | | |
| AEX07317.1 | QAQMVESGGG | YTYASAC | IAWFRQAP | TGRGD | TVYADSVKGRFTISQDNA | SSTTAALVWSPT | NYWGQG | Camelus |
| | SVQAGGSLRLS | | GKEREGVT | | ENTVFLQMDSLKPEDTA | CPLRGSDY | TQVTVSS | |
| | CRAST | | AIY | | MYYCAA | | | |
| AEX07318.1 | QVQLVESGGG | YVNSPNC | WAWFRQAP | TASGI | ATYDDSVKGRFTISQDNA | QRPYGN | TYYGSCT | Camelus |
| | SGQAGGSLRLT | | GKEREGVA | | KNTVLLQMDSLKPEDSA | | RVVGAY | |
| | CGASG | | TIN | | MYYCAV | | | |
| AGJ76249.1 | EVQVVESGGG | DTYSRRC | MGWFRQAP | TNGGG | TAYADPAKGRFTISQDNA | QYAASKTYGRSC | KYWGQGT | Camelus |
| | SVQAGGSLRLS | | GKEREGVA | S | KDTVYLQMQDLEPEDTAI | GTALGDY | LVTVSS | |
| | CAASG | | TIH | | YYCAA | | | |
| AFW03620.1 | DVQLVESGGG | SDITYSTD | MGWFRQAP | NGRAI | TYYADSVKGRFTISQDNA | RLRAGYCYPADY | DYWGKGT | Camelus |
| | SVQGAAGGSL | C | GKEREGVA | | KNTVYLQMNSLRPKDTAI | SM | QVTVSS | |
| | RLSCAA | | TIN | | YYCAA | | | |
| AFW03621.1 | DVQLEESGGG | YIYSTYC | MGWFRQAP | DVGGS | VYYADSVKGRFTISQDIA | LRCLSDSDPDTR | YDWGQG | Camelus |
| | SVQAGGSLRLS | | GKEREGVA | | QDTMYLQMNDLTPENTV | VHMY | TQVTVSS | |
| | CAASG | | AIN | | TYTCAA | | | |
| AFW03622.1 | DVQLEESGGG | YTYSSAC | MGWFRQG | TGGRR | TYYADSVKGRFTISQDNT | GPRRRDYGLGPC | NYWGQG | Camelus |
| | SVQTGGSLRLS | | PGKEREAV | | KDMRYLQMNNLKPEDTA | DY | TQVTVSS | |
| | CAASG | | ADVN | | TYYCAT | | | |
| AFW03623.1 | EVQLEESGGGL | YTFTNCA | AGWYRQAP | SGNR | TNYADSVKGRFTISRDNT | RT | PCWGQG | Camelus |
| | VQPGGSLTLSC | | GKECELVA | | KDIVYLQMNSLKPEDTTV | | TQVTVSS | |
| | AASG | | SIF | | YYCDA | | | |
| AFW03624.1 | EVQLEESGGG | YTFLQLL | HGWFRQAP | TDINK | TFYLESVKGRFTLSQDNA | SRPDSTCDYF | AYRGQGT | Camelus |
| | SVQAGGSLRLS | | GKEREVVA | | KNTLYLQMNSLKPEDTAI | | QVTVSS | |
| | CAASG | | RFN | | YYCAA | | | |
| AFY09731.1 | GLVGGLKARSL | SGYTESVK | MGWFRQAP | IPGGS | TYYDDHVKGRFTISQDNA | RNAGGRFRPSAA | NYWGQG | Camelus |
| | VQAGGSLRLAC | W | GQEREGVA | | QNTVYLQMNSLKPEDTA | GGY | TQVTVSS | |
| | AASA | | VIS | | MYYCAA | | | |
| AGN74801.1 | HVQLVESGGG | YTYSSNC | MGWFRQAP | AGGG | IYYADSVKGRFAISQDNA | GGSLYSGSCSRY | RYRGQGT | Camelus |
| | SVQAGGSLRLS | | GKEREGVA | W | KNMVYLQMNSLKPEDTA | WDEY | QVTVSS | |
| | CAASG | | GVY | | MYYCVA | | | |
| AGN74804.1 | HVQLVESGGG | YTYSSDS | MAWFRQAP | IGSGS | TLYADSVKGRFTISQDKA | GGNWYDGVLNVE | AYWGQGT | Camelus |
| | SVQAGGSLRLS | | GKEREGVA | | KNTVYLQMNSLKPEDTAL | RAF | QVTVSS | |
| | CTYSV | | GIY | | YYCAA | | | |
| AGN74805.1 | DVQLVESGGG | YTYSSAC | MGWFRQAP | TGSGR | TYIADSVKGRFTISQDNA | GGSYYSGSCSRY | RYWGQG | Camelus |
| | AVQAGGSLRLS | | GKEREAVA | | KNTVYLQMNSLEPEDTA | GDEW | TQVTVSS | |
| | CAASR | | GIY | | MYYCVA | | | |
| AGV76520.1 | HVQLVESGGG | YAYVSNC | LAWFRQAP | SGGGS | TYYADSVKGRFTISLDIPK | LSGVCDGGPSMT | GIGVQGT | Camelus |
| | SVQAGGSLRLS | | GKEREEVA | | SAVYLQMNSLKPDDTAM | AIQ | QVTVSS | |
| | CKASG | | AIY | | YYCAA | | | |
| AGV76521.1 | HVQLVESGGG | DGYMRNC | MGWFRQAP | TGGRS | LYYADFMKGRFTISQDNP | ETRGDCSGGYLG | NYWGQG | Camelus |
| | SVQAGGSLRLS | | GKEREGVAI | | KNTLYLQMNILEPEDTAM | PDPY | TQVTVSS | |
| | CAASG | | VA | | YYCAA | | | |
| AGV76522.1 | QVQLVESGGG | YTYSSNY | LGWFRQTP | RGGLR | TYYADSVKGRFTISRDNA | STGRLWAGYDWY | NFWGQGT | Camelus |
| | SVQAGGSLRLS | | GKEREGVA | GGGR | ENTVYLEMNGLIPEDTAM | RPEPY | QVTVSS | |
| | CTASG | | AIY | | YYCAA | | | |
| AGV76523.1 | HVQLVESGGG | HISSTCG | RGWYRQAP | SDGT | IVYADSVKGRFTISQDNV | CR | YWWGQG | Camelus |
| | SVQAGGSLKLS | | GKERELVSI | | ENTLSLQMNSLKTDDTGV | | TLVTVSS | |
| | CAVSG | | IT | | YYCAA | | | |
| AGV76524.1 | QVQLVESGGG | YTYSRYY | MGWFRQAP | SDGR | TIYADSVKGRFTISKDNAK | KIPPKTWFEY | NYWGQG | Camelus |
| | SVQAGGSLRLS | | GKEREGVA | | NTLYLQMNNLKLEDTAMY | | TLVTVSS | |
| | CVASG | | TFD | | YCAA | | | |
| AGV76525.1 | DVQLVESGGG | YTYGSNF | MGWFRQAP | GDGS | TTYAGSVKGRFTISKDNA | TRHDTRATLEDL | NYWGQG | Camelus |
| | SVQAGGSLRLS | | GKEREGVA | | HNTLYLQMNSLKPDDTAA | WY | TQVTVSS | |
| | CAASG | | YID | | YYCAS | | | |
| AGV76526.1 | QVQLVESGGG | YVYISYC | MGWFRQAP | TGGGT | TSYADSVKGRFTISQDNA | DCSIATIAPGSPLI | GFWGQG | Camelus |
| | SVQAGGSLRLS | | GKEREGVA | | KNTVYLQMNSLKPEDTA | EF | TLVTVSS | |
| | CAASG | | AIY | | MYYCAA | | | |
| AGV76527.1 | DVQLVESGGG | YTYSSNC | MGWFRQAP | TVGGS | TYYTDSVKGRFTISKDNA | GWSRADSWCYL | GYWGQG | Camelus |
| | SVQAGGSLRLS | | GKEREGVA | | KNTLYLQMNSLKPEDTTM | PDL | TQVTVSS | |
| | CAASG | | AIY | | YYCAA | | | |
| AGV76528.1 | QVQLVESGGG | YRTSNYC | MGWFRQAP | RVDT | TTYAGSVKGRFTISKDNA | SLRYYCNPKEGLF | KNWGQG | Camelus |
| | SVQAGGSLRLS | | GKEREEVA | | KNTLYLQMNSLKPEDTA | | TLVTVSS | |
| | CATSG | | TID | | MYYCAA | | | |
| AGV76530.1 | HVQLVESGGG | YTYSSYC | MGWFRQSP | SDGS | THYADSVKDRFTISKDNA | DYYSDYDESCDY | NYWGQG | Camelus |
| | SVQAGGSLRLS | | GKERQGVA | | KNTLYLQMNNLKPEDTAV | | TQVTVSS | |
| | CVASE | | VID | | YYCAL | | | |
| AGV76531.1 | DVQLVESGGG | YTYSSSNC | IGWFRQAP | TGGGI | TYYADSVKGRFAISQDNA | QRAEWGECILDD | NYWGQG | Camelus |
| | SVQAGGSLRLS | | GKEREGVA | | KNTVYLQMNSLKPEDTA | Y | TQVTVSS | |
| | CAASG | | TIY | | MYYCAT | | | |
| AGV76534.1 | EVQLVESGGG | YTYSRMC | MGWFRQTP | SAGN | TNYVDSVKGRFTISQDNA | VASVVAHRCSPS | NYWGQG | Camelus |
| | SVQAGGSLRLS | | GKEREGVA | | KNTLYLQMNSLKPEDTAI | PDY | TQVTVSS | |
| | CRASR | | AID | | YYCAA | | | |
| AGV76535.1 | QVQLVESGGG | YTYSSYC | MGWFRQAP | SDGS | TSYADSVKGRFTISQDIAK | VWGSGCSGGYP | GYWGQG | Camelus |
| | SVQAGGSLRLS | | GKEREGVA | | NTLYLQMNSLKPEDTAM | RL | TLVTVSS | |
| | CAASG | | AID | | YYCAA | | | |
| AGV76536.1 | HVQLVESGGG | FTFDDSD | MGWYRQA | SDGS | TYYADSVKGRFTISQDNA | DYGWGGYCYNLE | GYWGQG | Camelus |
| | SVQAGGSLRLS | | PGNECELV | | KNTLYLQMNSLKPEDTAL | TFGF | TLVTVSS | |
| | CTASG | | STIS | | YYCAA | | | |
| AGV76540.1 | QVQLVESGGG | YTYSSNC | MGWFRQAP | TGGGS | TYYADSVKGRFTISQDNA | PPRNREAGDCYS | NYWGQG | Camelus |
| | SVQAGGSLRLS | | GKEREGVA | | KNTVYLQMNSLKPEDTA | GSWSKPREY | TQVTVSS | |
| | CAASG | | AIY | | MYYCAV | | | |
| AGV76541.1 | QVQLVESGGG | YTYSSYC | MGWFRQAP | SDGS | TSYADPVKGRSTISKDNV | HVLCRLLKVL | GIRGQGT | Camelus |
| | SVQAGGSLRLS | | GKEREGVG | | ANTLYLQMNSLKPEDTA | | LVTVSS | |
| | CVASG | | AID | | MYYCAA | | | |
| AGV76542.1 | QVQLVESGGG | HTFSVLS | MGWFRQAP | SDGS | TRYADSVKGRFTISKDNA | DLFGLLFRLLEAE | NYRGQGT | Camelus |
| | SVQAGGSLRLS | | GKDREGVA | | KNTLYLHMNSLKPEDTAM | SY | LVTVSS | |
| | CAASG | | AID | | YYCAA | | | |
| AGV76544.1 | QVQLVESGGG | YIFSSCG | MGWYRQA | SDGT | TSYADSVKGRFTISQDNA | DPWYPAAC | NYWGQG | Camelus |
| | SVQAGGSLKLS | | PGKERELV | | KSTLYLQMNSLKTEDTAV | | TQVTVSS | |
| | CAASG | | STIS | | YYCAA | | | |
| AHW48352.1 | DVQLVESGGG | FTFDDYT | MGWFRQAP | WSGSM | TYYTDSVKGRFTISRDNA | ARYRGIGSQVRW | IYWGQGT | Camelus |
| | LVQAGGSLRLS | | GKEREGVS | SGST | KNTLYLQMNSLKPEDTA | TDF | QVTVS | |
| | CTASG | | YTG | | MYYCAA | | | |
| AHW48351.1 | DVQLVESGGG | FTFDDCT | MGWFRQAP | WSGST | TYYTDSVKGRFTISRDNA | ARYRGIGSRVRW | IYWGQGT | Camelus |
| | LVQAGGSLRLS | | GKEREGVS | SGST | KNTLYLQMNSLKPEDTA | TDF | QVTVS | |
| | CTASG | | YIG | | MYYCAA | | | |
| AID18522.1 | DVQLVESGGG | YMYSSKA | MGWFRQAP | TDGYS | PYYADSVKGRFTISQDNA | SKRGPSMGWVP | GDWGQG | Camelus |
| | SVQAGGSLRLS | | GKEREGVAI | | KNTVYLQMNSLKPEDTA | KSASYF | TQVTVS | |
| | CAGSG | | IY | | MYYCAA | | | |
| AIF28002.1 | QVQLQESGGG | GAYRNAC | MGWFRQAP | SVDT | TYYADPVKGRFTISRDNA | VARVVCPGDKLG | NYWGQG | Camelus |
| | SVQAGGSLKLS | | GKEREGVAI | | KSTVYLLMNSLKPEDTAIY | ASGY | TQVTVSS | |
| | CAASG | | IN | | YCAQ | | | |
| AIF28003.1 | QVQLQESGGG | PTYSSYF | MAWFRQAP | YDGST | TLYADSVKGRFTISQGNA | RRRGWSNTSGW | DYWGQG | Camelus |
| | SVQAGGSLRLS | | GMEREGVA | | KNTKFLLLNNLEPEDTAIY | KQPGWY | TQVTVSS | |
| | CAASG | | ASS | | YCAL | | | |
| AIF28004.1 | QVQLQESGGG | YTFSDYC | MGWFRQAP | GGKR | TYYSDSVRGRFTISRDDY | GGYTTGVCAGGF | NDWGQG | Camelus |
| | SVQAGGSLRLA | | GKEREEVA | | KNTVWLQMDSLKPEDTAI | | TQVTVSS | |
| | CAAPG | | RIS | | YYCAR | | | |
| AIF28006.1 | QVQLQESGGG | YTFSDYC | MGWFRQAP | NGGLI | TRYADSVKGRFTVSRDN | GSYTCNPDRWSQ | KYGGQGT | Camelus |
| | SVQAGGSLRLS | | GKEREGVAI | | AKNTLYLEMNSLKPEDTA | VSDY | QVTVSS | |
| | CADSG | | IS | | TYFCAK | | | |
| AIF28007.1 | QVQLQESGGG | MTFSVYN | LGWLRQAP | RDGS | TDYADSMKGRFTISRDNA | GVGVVD | CTEGQGT | Camelus |
| | SVQAGGSLRLS | | GQECELVS | | KNTMYLQMTSLKPDDTA | | QVTVSS | |
| | CESSG | | TIT | | VYYCAA | | | |
| AIF28009.1 | QVQLQESGGG | DTRRINN | MAWFRQTP | VVIGT | TDYDDSVKGRFTLSRDN | GELIRFSRWRTG | TYWGQGT | Camelus |
| | SVQTGGSLTLS | | GKEREGVA | | AKNTLYLRMNSLKPEDTA | REF | QVTVSS | |
| | CAASV | | RIN | | MYYCAA | | | |
| AIF28012.1 | QVQLQESGGG | NHDSFQT | MGWFRQAP | YVGL | TFVRASVRGRFTISQDDA | KGVADRDFTNF | DYWGQG | Camelus |
| | SVQVGGSLRLS | | GKEREGVA | | MKTMYLQMDSLKAEDTG | | TQVTVSS | |
| | CVYSG | | TIN | | VYYCAA | | | |
| AIF28013.1 | QVQLQESGGG | YTRNGCV | LNWYRLAT | TDGN | TMYRTPVKGRFTISQDSA | TGTTRWCRP | SDWGQG | Camelus |
| | SVQAGESLRLS | | GKPREWVS | | KDTAFLQMNSLKVEDTA | | TQVTVSS | |
| | CTVPG | | SID | | MYFCRT | | | |
| AIG20205.1 | DVQLVESGGG | STVTIGS | MGWFRQAP | TGRGS | TNYADSVKGRFTISQGNA | APGRPSLKYEMR | RYWGQG | Camelus |
| | SVQTGGSLTLS | | GKEREGVA | | KNTVYLQMNSLKPEDTAI | QVDF | TQVTVSS | |
| | CAASG | | LIY | | YYCAA | | | |
| AKE13334.1 | QVQLQESGGG | DTYSSAC | MGWFRQAP | TSTSM | RYYADAVKARFTISQDNA | GHTVGSSWRDPG | RYWGQG | Camelus |
| | SVQAGGSLRLS | | GKEREGVA | RT | KNTVYLQMNSLKPEDIAM | AW | TQVTVSS | |
| | CVASG | | TIC | | YYCAT | | | |
| AKE13335.1 | QVQLQESGGG | YAYDTYY | MGWFRQAP | SLVSG | KYYTDSVKGRFTIFRDDD | SRSGLRARLLRPE | EYWGQGT | Camelus |
| | SVQDGGSLRLS | | GKEREWVA | VAYY | KNTVDLQMNSLKPEDTAI | LY | QVTVSS | |
| | CAASG | | GIT | | YYCAA | | | |
| AKF02407.1 | EVQLVESGGG | YTYCSYG | MSWYRQAP | SDGS | TSYADSVKGRFTISQDNA | DQTGGSWWADC | EVWGQGT | Camelus |
| | SVQAGGSLRLS | | GKEREFVS | | KNTVYLQMNSLIPEDTAM | RYL | MVTVSS | |
| | CAASG | | AID | | YYCKT | | | |
| AKF02408.1 | QVQLVESGGG | YTCYTDD | RSWSRQAP | SDGT | TTYADSVKGRFTISRDNA | VCRDRWNVRQ | TYWGQGT | Camelus |
| | SVQAGGSLRLS | | GKEREFVSI | | KNTVYLQMNSLKPEDTG | | LVTVSS | |
| | CVASG | | IV | | MYYCKI | | | |
| ALN98710.1 | QVQLQESGGG | YIASGCGM | MAWYRQAP | RDG | IRYIGAVKGRFTISRDSAK | CRRSIDDY | TYWGQGT | Camelus |
| | SVQAGGSLKLS | GG | GKERELVST | | NTLYLQMSSLKTEDTGVY | | QVTVSS | |
| | CAASG | | IS | | YCAA | | | |
| ALN98712.1 | QVQLQESGGD | YIFSTCG | MGWYRQA | IDGT | TRYADSVKGRFTISQDRA | GGGSGSWCPG | NYWGQG | Camelus |
| | SVQAGGSLKLS | | PGKERELLS | | KHTLYLQMNSLKTEDTAV | | TQVTVSS | |
| | CAASG | | TRS | | YYCRA | | | |
| ALN98713.1 | QVQLQESGGG | YTDRNYC | MGWFRQAP | SAGN | TAYADSVKGRFTISQDNA | IAKEYNRGGYYC | DYWGQG | Camelus |
| | SVHSGGSLRLS | | GSQREGVA | | KNTLWLRMNTLKPEDTA | RSSGRV | TQVTVSS | |
| | CLAAG | | VID | | MYYCAA | | | |
| ALN98714.1 | QVQLQESGGG | YRLNLNC | MGWFRQAP | SDSY | GRYADSVRGRFAISQDN | WRGDCGIPDMLR | NYRGQGT | Camelus |
| | SVQSGGSLRLS | | GKEREGVA | | AKNTLYLQMNTLNPEDTA | TD | QVTVSS | |
| | CVASG | | TIA | | TYYCAA | | | |
| ALS19648.1 | DVQLQASGGG | FSFADSD | MSWFRQAP | RNGN | TEYSDSVKGRFTISRDNA | PKSGLLRPPISHC | KYWGQGT | Camelus |
| | SVQAGGSLRLS | | GKERELVST | | KNAVYLQMNSLKPEDTA | DSCVVLGVDGY | QVTVST | |
| | CAASG | | IR | | MYYCAA | | | |
| 5foj_A | QVQLQESGGG | DTFSGYL | AAWFRQAP | SKRHT | TSYADSVKGRFTISKDNA | ADAIGLAEYWSTP | KYWGQGT | Camelus |
| | SVQVGGSLRV | | GKGREGVA | | DNIMYLEMNSLKPEDTAI | TLSAARY | QVTVSS | |
| | ACAASG | | AIN | | YYCAA | | | |
| ASM90300.1 | DVQLQESGGG | YTYNTYRR | MGWFRQAP | SVDGR | SYYADSVKGRFTISRDNG | ADKWGGYCGGV | GYEGQGT | Camelus |
| | SVQAGGSLRLS | FC | GREREGVA | | ENAVNLQMNSLKPEDTAI | ADIAHF | QVTVSS | |
| | CAVNA | | SIN | | YYCAA | | | |
| 5u65_B | DVQLQESGGG | LTISNYC | MRWFRQAP | SAGT | TYYADSVKGRFTMSRDN | STRVWGGYCGGL | NDWGQG | Camelus |
| | SVQAGGSLRLS | | GKGREGVA | | AKNTVYLDMNSLKPEDTA | DDATN | TQVTVSS | |
| | CVVSG | | SIN | | IYYCAS | | | |
| ASM90302.1 | DVQLQESGGG | FTTTSYSS | IGWFRQAP | AKGST | LYYVDSVKGRFTISRDND | AADVYRGGYCSA | SYWGQGT | Camelus |
| | SVQAGGSLRLS | TC | GKEREAVA | | NAENTVYLQMNSLKPED | YAGRE | QVTVSS | |
| | CTASG | | TIN | | TSTYYC | | | |
| ASM90303.1 | DVQLQESGGG | YTSSKYC | VGWFRQAP | GGGGA | TSYADSVKGRFTVSQDN | GTRPSIFCYKGDR | SAWGQGT | Camelus |
| | SVQAGGSLRLS | | GKEREGVA | | AEGTVYLQMNDLKPEDT | WY | QVTVSS | |
| | CAASE | | VFI | | AIYYCAA | | | |
| 5u64_B | DVQLQESGGG | VTSTRPC | IGWFRQAP | FRGDS | TYITDSVKGRFTISRDEDS | DVNRGGFCYIED | SYWGQGT | Camelus |
| | SVQAGGSLRLS | | GKEREGVA | | DTVYLQMNSLKPEDTATY | WYF | QVTVSS | |
| | CVASG | | VVN | | YCAA | | | |
| ASM90305.1 | DVQLQESGGG | YTHRRYC | MAWFRQAP | NGGSS | TYFADSVKGRFTISRDSE | DDLRGGYCSSSS | TYWGQGT | Camelus |
| | SVQAGGSLRLS | | GKEREGVA | | ENTLYLQMNSLKAEDTGI | TLY | QVTVSS | |
| | CAASG | | SVN | | YYCAA | | | |
| ASM90306.1 | DVQLQESGGG | YTSNRNV | MGWFRQAP | TRTGS | TDYADSVKGRFTISQDNN | SYQFFSSEPSLSA | TDWGQGT | Camelus |
| | LVQPGGSLTLS | | GKEREGVA | | KNTVYLQMNSLKPEDTA | RRY | QVTVSS | |
| | CAASG | | VIN | | MYYCAA | | | |
| ASM90307.1 | DVQLQESGGG | YTHGSYC | MGWFRQAP | KSGGS | SNYPDSVKGRFTISRDNA | TETWGPYCGQAS | PYWGQGT | Camelus |
| | SVQTGGSLRLS | | GKDREVVA | | DNTVYLLMNDLKPEDTAT | PAYF | QVTVSS | |
| | CVASE | | TIN | | YYCAA | | | |
| AUS94292.1 | QVQLQESGGG | FTFGAYY | MYWFRQAP | TGDDT | TYYADSVKGRFTISQDNA | DSSG | RVRGQGT | Camelus |
| | LVQPGGSLRLS | | GKGLEWVS | | KNTLYLRMNNLKPEDTAV | | QVTVSS | |
| | CAASG | | SIY | | YYCAT | | | |
| AXU39122.1 | EVQLVESGGG | FSFSSNV | MGWFRQAP | VDSGS | TWYADSVKGRFTISLDSA | RRGVILTLSPETY | DYWGQG | Camelus |
| | SVQTGGSLRLS | | GKEREGVA | | NNTLYLQMNSLKPEDTA | | TQVTVSS | |
| | CAASG | | AIS | | MYYCAT | | | |
| BAD00517.1 | DVQLVESGGG | YTDCKYD | MSWYRQVP | KIGTD | TYYPVSVKGRFTVSRDD | GESWWGY | SDWGQG | Camelus |
| | SVQAGGSLRLS | | GKERELVS | | AKNTLNLQLNTLKIEDTA | | TQVTVSS | |
| | CAASR | | QIN | | MYYCVR | | | |
| BAD00570.1 | EVQLVESGGG | YAANRYT | VGWFRQAP | PAGTV | TEYADSVKGRFTISQDDA | GRALVGPGFKGF | TIWGQGT | Camelus |
| | SVQAGGSLRLS | | GKAHEGVA | | KNTVYLQMNNLKPEDTGI | | QVTVSS | |
| | CAAPR | | SIN | | YYCVA | | | |
| BAD00571.1 | QVQLVESGGG | YLFSRHA | MGWFRHRP | SDGT | TDYADSVKGRFTISRDNA | DNPGPPVCRGGN | GYFGQGT | Camelus |
| | SVQAGGSLRLS | | GKECELVS | | KNTVDLQMDSLKPEDTA | CRVCDTQA | QVTVSS | |
| | CKHIG | | MVL | | VYYCAA | | | |
| BAD00574.1 | EVQLVESGGG | FVFDDSD | MGWYRQA | DDGS | TYYHESVQGRFTISRDNV | GSRQFQRTSTTW | GVWAQGT | Camelus |
| | SVQAGGSLNL | | PGRECELV | | KNLMTLQMNNLKVEDTA | CL | QVTVSS | |
| | GCSASG | | ATVS | | RYYCAA | | | |
| BAD00576.1 | EVQLVESGGG | HRTGTTCS | MNWYRQAP | DFGS | TWYADSVKGRFTISEDKA | GNCNYTCHACFP | NYWGQG | Camelus |
| | TVQAGGSLRLS | | AKERELVSS | | KHVLFLQMNNLRPEDTA | PDY | TQVTVSS | |
| | CAASG | | IN | | MYYCAT | | | |
| BAD00577.1 | DVQLVESGGG | IIASNLC | MAWFRQVP | GRPGT | TLYDSSVAGRFKITRDHD | GRGWSCPSNY | DYWGQG | Camelus |
| | SVQAGGSLRLS | | EKQREAVA | T | KNTVFLQMNSLKQEDTAI | | TQVAVSS | |
| | CTVSG | | SIA | | YYCAL | | | |
| BAD00579.1 | AVQLVDSGGG | FSFDDSE | LGWYHQAP | VDGT | TYYATSVKGRFAISRDNA | DAGLNDIELKYTR | NYWGQG | Camelus |
| | SVQAGGSLTLS | | GNECELVS | | KNTVYLRMNSLKPEDSA | TDCGPLAGY | TQVTVSS | |
| | CTGSG | | FIG | | MYYCAT | | | |
| BAD00580.1 | QVKLEESGGG | FGSEYC | IGWFRQAP | SGGGN | KDYADSVKGRFTISQDNA | VPLCSRPPPMIRG | TNWGQGT | Camelus |
| | SVQAGGSLRLS | | EKEREVVA | | KNTVYLQMNSLKPEDTAI | AQHGY | QVTVSS | |
| | CAPSG | | SMN | | YYCAA | | | |
| BAD00581.1 | QVQLVESGGG | YSYSTYC | MGWFRQAP | SAT | GTTYYADSVKGRFTITQIK | DSASSVGFCSNP | DYWGKGT | Camelus |
| | SVQAGGSLRLS | | GKDREGVA | | NTVYLQMTSLTPEDTAIY | LEDM | LVTISS | |
| | CVITE | | SIN | | YCAA | | | |
| BAD00582.1 | VVQLVESGGG | YTDSVKW | VAWFRQAP | SGGFN | TYYADSVKGRFTISQDIAK | DFLSGNLLDGRY | RYWGQG | Camelus |
| | SVQAGGSLRLS | | GKEREGVA | | NTVYLQMNSLKLEDTAM | | TQVTVSS | |
| | CAASG | | CIY | | YYCAT | | | |
| BAD00583.1 | QVQLVESGGG | GPTCSHQ | MEWYRQAP | LDGR | TMYQDSVKGRFAISHDNL | TARRCGFTTTWL | ELWGQGI | Camelus |
| | SVQAGGSLRLS | | GKEREFLS | | KSTVFLQMNSLKPEDTAK | | LVNVSS | |
| | CAPSG | | GIE | | YYCKL | | | |
| BAD00584.1 | AVQLVESGGG | YTYMDYC | AGWFRQVP | SGGGK | TKYADSVKGRFTISQINA | VNSRDGADCPTG | HAWGQG | Camelus |
| | SVQAGGSLRLS | | GEAREAVA | | NNTVSLQMNSLNLEDTAV | RYDY | SQVTVSS | |
| | CTVSG | | FIN | | YYCAS | | | |
| BAD00585.1 | DVQLVESGGG | DPGINLY | ITWFRQPP | TDQNG | IYIADSVKGRFTISQDKAK | GVAASLSPHYGY | NYWGQG | Camelus |
| | SVQAGGSLRLS | | GKEREAVG | | KTVYLEMNNLKLEDTAMY | | TQVTVSS | |
| | CTVSG | | FIN | | YCAA | | | |
| BAD00588.1 | AVQLVESGGG | LSNRQLC | MAWFRQAP | SRGID | AVYADSVKGRFTISEDSA | ALAYAWSCSRAE | NYWGQG | Camelus |
| | SAQAGGSLRLA | | GKAREIVAG | | SNTVYLQMDDLKPEDTAI | AGY | TQVTVSS | |
| | CVAAE | | KK | | YYCAA | | | |
| BAD00590.1 | EVQLVESGGG | PLYSAYC | MSWFRQAP | RDGSS | TVETDSVQGRFTPSQDF | AGRRSECDSERH | PYWGQGT | Camelus |
| | SVQAGGSLRLS | | GKGREWIA | | PSNTVYLQMNSLKPEDTA | SF | QVTVSS | |
| | CTASQ | | TIN | | IYYCAA | | | |
| BAD00591.1 | AVQLVESGGG | DSDSSFC | MAWFRQGP | TYDG | STDYADSVKGRFAISQDN | VRVLAGVPCLPPP | KYWGQGT | Camelus |
| | SVKAGGSLRLS | | GKEREGVA | | HKNIYLQLHSLKPEDTAIY | YEY | QVTVSS | |
| | CATSR | | AIR | | FCAA | | | |
| BAD00592.1 | DVQLVESGGG | YTLASDL | MGWFRQAP | TVGVT | TWYADSVKGRFTISQDN | SFSGGRWSDRSR | KSWGQGT | Camelus |
| | SVQAGGNLTLS | | GEEREGVA | | NKNTVYLRMNNLKPEDT | Y | QVTVSS | |
| | CEASG | | ALN | | AMYYCSA | | | |
| BAD00595.1 | EVQLVESGGG | HTANKWC | MAWFRQVP | TYGDV | TYFRDSVKGRFIISQDNV | LRLQDLWRGSCP | NYWGQG | Camelus |
| | SVQAGGSLRLS | | GKEREGVA | | KNTVHLLMNSLKPEDTAA | ETLGY | TQVTVSS | |
| | CVASG | | AIN | | YYCAA | | | |
| BAD00596.1 | QVQLVESGGG | YTDSENYY | IGWFRQAP | TRAGT | TIYADSVKGRFTISQDKAK | TGPSCLSDSSLRP | GYRGQGT | Camelus |
| | SVQAGGSLRLS | C | GNDPEGVA | | NTSYLQMTSLTPDDMAM | WHFAGVAF | QVTVSS | |
| | CAASA | | YIT | | YYCAA | | | |
| BAD00597.1 | EVQLVESGGG | PTICITD | ISWHRQAP | ASGS | TRYAESVKGRFTVSRDS | TRVGGFCYD | GTWGQG | Camelus |
| | SVQAGGSLRLS | | GKEREFLSS | | ATNTVYLDMNSLTPDDSA | | TQVTVSS | |
| | CVASG | | IV | | MYTCQS | | | |
| BAD00598.1 | QVQLVESGGG | FASTTNC | MGWFRQAP | LGGGH | TYYADSVKGRFTISQDKA | RWAYCRSFRDSP | NYWGQG | Camelus |
| | SVQAGGSLRLS | | GKEREGVA | S | ENTVYLQMNSLKPEDTAI | | TQVTVSS | |
| | CANSR | | VIN | | YYCAA | | | |
| BAD00600.1 | AVQLVESGGG | YSYC | MGWFRQAP | SGSGT | THYADSVKGRFTISQDIA | GQVQCYTEFALR | NDRGQGT | Camelus |
| | SVQAGGSLRLS | | GKEREGVA | | KNTVYLEMNSLKPEDTAI | WLLSW | QVAVSS | |
| | CVASS | | TIN | | YYCVA | | | |
| BAD00601.1 | AVQLVESGGG | NMGRFNS | MGWIRQAP | TGGGS | AWYADSVKGRFTISQDN | DRYNCEYIRRGG | ESRGQGT | Camelus |
| | SVQTGGSLRLT | | GKGREAVA | | TKNTMNLNMNTLKPEDT | EF | QVTVSS | |
| | RALSG | | CIH | | AIYYCAA | | | |
| BAD00602.1 | QVKLEESGGG | SGYVSSYY | IGWFRRAP | SGGDS | TYYADSVKGRFTISQDNA | EGPTNIAAIYWGR | GYWGQG | Camelus |
| | SVQAGGSLRLS | | GKEREGVA | | KNTVYLQMNSLKPEDTAI | AF | TQVTVSS | |
| | CVVSA | | AIV | | YYCAA | | | |
| BAD00604.1 | AVQLVESGGG | YIFTGCG | MGWYRQA | PDGT | TTYAESVKGRFTISQDNA | LSYYSDSELGDC | NFWGQGT | Camelus |
| | SVQAGGSLKLS | | PGKEREMV | | KQTLFLQMNSLKPEDTAV | GDGE | QVTVSS | |
| | CAATT | | STIS | | YFCAV | | | |
| BAD00605.1 | QVQLVESGGG | YMYVSTS | MGWFRQAP | PFGPK | TYYADSVKGRFTISRDNA | LASGEEETVRSW | AAWGQGT | Camelus |
| | SVQAGGSLNLS | | GKEREGVA | | KHTLRMQMTNLKPEDSA | FYGRRDFSSQPD | QVTVSS | |
| | CVASG | | AIY | | MYYCGV | L | | |
| BAD00606.1 | AVQLVESGGG | DTTNNYYC | MGWFRQAP | SGGDS | SYYADSVKGRFTISQDSA | QFARATRLTCEA | DYVGQGV | Camelus |
| | SVQAGGSLSLS | | GKGLEGVA | | KNTVFLEMNSLKPEDTAI | DWYLTSAEVYVY | QVTVSS | |
| | CAASG | | AIN | | YVCAA | | | |
| BAD00607.1 | QVKLEESGGG | VPDEGNC | MGWFRQAP | TRRSI | TFYNPSVKGRFTISRDTIK | VSTAWTLCPRTP | NYWGQG | Camelus |
| | SVQAGGSLRLS | | GNEREWVA | | NTVYLQMDSLKPEDSAM | GAY | TQVTVSS | |
| | CVVSG | | QIE | | YYCAA | | | |
| BAD00601.1 | QVQLVESGGG | NIYCDYD | MNWYRQAP | SDGS | TNYADSVKGRFTISQDNA | ECYSTDYGGNVT | GYWGQG | Camelus |
| | SVQAGGSLTLS | | GKEREFVS | | LDPVYLQMNGLKPEDTA | AGPGL | TQVIVSS | |
| | CVASG | | AID | | MYICKF | | | |
| BAD00611.1 | QVKLEESGGGL | ITYPSCC | MSWYRQLP | ADGGN | RRYADSARGRFTISKGNA | DQACGSWTGPC | GAWGQG | Camelus |
| | VQAGGSLRLSC | | GKERELVAT | | KNSLYLQMNSLKPEDTAV | HANY | TQVTVSS | |
| | EASG | | IS | | YYCAA | | | |
| BAD00613.1 | DVQLVESGGG | YTYSTYY | MGWFRQAP | NGGS | TVYATSVKGRFTISQGNA | AQGLTWGSLLTP | NYWGQG | Camelus |
| | SVQAGGSLRLS | | GKKREGVA | | QKTVYLQMNSLKPEDTAI | TRY | TQVTVSS | |
| | CAASG | | AIV | | YYCAA | | | |
| BAD00614.1 | DVQLVESGGG | SRKNIAST | MGWFRQAP | RGTT | NEIYADSVKGRFTISRDN | CQDSYCYKGGFY | ALWGQGT | Camelus |
| | SVHVGGSLRLS | DC | GKDREVVA | | AQSMSLQMDRLKPEDTA | AVYPGYGC | QVNVSS | |
| | CVVSP | | TLL | | LYYCAA | | | |
| BAD00615.1 | QVQLVESGGG | FIFDASD | MGWYHQV | SKGN | TYYADSVKGRFTISRDNA | APGEVNGWRGL | DCWGQG | Camelus |
| | SVQAGGSLRLS | | PGNECELV | | KNTMYLQMNSLKPEDTA | GTTRS | TQVTVYS | |
| | CTASG | | STIS | | MYYCDT | | | |
| BAD00617.1 | AVQLVESGGG | FTVSDYS | MAWFRQVP | ADTGT | TFYADSVKGRFTISLDNA | ETAPRYYNDAVW | SFWGQGI | Camelus |
| | SVQAGGSLRLS | | GQEREVVA | | KAAVYLQMNSLNTDDTA | PSDSDF | QVTVSS | |
| | CASSG | | HIN | | VYYCAA | | | |
| BAD00618.1 | DVQLVESGGG | DTYTGNC | LGWFRQAP | IKHG | RPYYADSVKGRFTISQDS | IQPTYGIDFFGSC | DYWGQG | Camelus |
| | SVQPGGSLRLS | | GKERVMVA | | ATTTYLQMESLQPEDTA | PSESADF | TQVTVSS | |
| | CEVSG | | TIN | | MYFCAA | | | |
| BAD00619.1 | QVKLEESGGG | YTYSSNC | IGWFRQAP | TGSGS | TFYADSVKGRFTISQDNA | VGYTDYCKSPWP | RFWGQGT | Camelus |
| | SVQAGGSLRLS | | GKEREGVA | S | KNTVYLQMNSLKPEDTA | EAY | QVTVSS | |
| | CATSG | | VIY | | MYYCAA | | | |
| BAD00621.1 | EVQLVESGGG | VTYSNRC | MAWFRQGP | TRGES | PDYAASVKGRFTISQDNA | RTAEWFACPPAA | NDWGPGT | Camelus |
| | SVQAGGSLRLS | | GKEREWVA | | KNTVYLQMNSLKPEDTAT | SVDY | QVTVSS | |
| | CVLSG | | VIN | | YVCAT | | | |
| BAD00622.1 | QVQLVESGGG | YAYSSFC | WAWFRQAP | HGR | TYFGEFVKGRFTISQDNA | GCGAIQPLGAGY | NRWGRG | Camelus |
| | SVQTGGSLRLS | | GKEREGVA | | KNNVYLQMDNLKPEDTAI | | TQVTVSS | |
| | CAGSE | | AIH | | YYCAA | | | |
| BAD00623.1 | AVQLVESGGG | YTSSVYC | MGWFRQAP | SGGGS | TYIADSVKGRFTISHDNAK | HPGRNLAIQYLNA | GYWGQG | Camelus |
| | SVQAGGSLRLS | | GKEREGVA | | NTVYLQMNNLKPEDTAIY | LPGGGASYF | TQVTVSS | |
| | CAASG | | AIN | | YCAA | | | |
| BAD00625.1 | AVQLVESGGG | YTFGIYP | MAWVRQAP | SDGS | TNYYDSAKGRFTISRDNA | DGPDDIATPCPC | EVWGQGT | Camelus |
| | SVPAGGSLKLS | | GKECELVAT | | KNTVYLQMNSLKPEDTA | GAQYRFL | LVNVSS | |
| | CAASG | | LG | | RYYCAA | | | |
| BAD00627.1 | AVQLVDSGGG | YTYSDYC | MGWFRQAP | TGAGL | TYYADSVKGRFTISQDNA | GCQGLYSSCRYC | HDWGQG | Camelus |
| | SVQAGGSLRLS | | GKEREGVA | | KNTVYLLMNSLKPEDTAI | SVY | TQVTVSS | |
| | CAASG | | SIN | | YYCAA | | | |
| BAD00628.1 | QVQLVESGGG | FAYTSYC | LGWFRQVP | PSSGA | TTYPDSTKGRFTISQNDA | GHCKFWYPRLV | ASWGQGT | Camelus |
| | SVQAGGSLRLS | | GKEREGVA | | WYTVYLQMNDLKPEDTA | | QVTVSS | |
| | CSASG | | RIV | | TYYCSA | | | |
| BAD00629.1 | QVQLVESGGG | YTYSNFC | MAWFRQAP | TGGN | SYYADSVKGRFTISQDNA | DNGPGTCIGRPE | RYWGRGT | Camelus |
| | SVQAGGSLRLS | | GQAREGVA | | KNTVYLQMNSLKPEDTAI | YLF | QVTVSS | |
| | CAASG | | YIY | | YYCAA | | | |
| BAD00631.1 | QVQLVESGGG | YTRCRYD | MNWYRQAP | SDGT | TTYATSVKGRFTISQDNA | VILCGDSDMA | NYWGQGI | Camelus |
| | SVQAGGSLTLS | | GKNREFVS | | KNTATLQMASLKPEDTA | | QATVSS | |
| | CAASR | | GID | | MYYCNR | | | |
| BAD00632.1 | QVQLVESGGG | YTDRYCT | MGWYRQA | KNSR | PWYKDSVKGRFTISLNKD | WADRCSPGYGL | HLWGHGT | Camelus |
| | SAQAGGSLRLA | | PGKQRELV | | NSSLELQMDNLKPEDTAT | | QVTVSS | |
| | CGASG | | ANVI | | YYCNI | | | |
| BAD00633.1 | DVQLVESGGG | FSFSRYC | TGWFRQAS | GAGMP | TYYADSVKGRFTISRDNS | RSTFCTGGTWRD | NYWGQG | Camelus |
| | SVQPGGSLRLS | | GKEREGVA | | KDMLYLQINLLKTEDAAIY | RDEV | TQVTVSS | |
| | CTASG | | AIN | | YCAA | | | |
| BAD00634.1 | QVQLVESGGG | YTFSSNI | MAWFRQAP | SDGD | TFYGNSVKGRAAISRDDA | RVFVPPINCPADF | GYWGQG | Camelus |
| | SVQASGSLRLS | | GKECELVA | | DNTVHLQMNSLKPEDTA | | TQVTVSS | |
| | CDASE | | RMT | | VYYCVA | | | |
| BAD00635.1 | DVQLVESGGG | YIDRRDC | IGWFRQAP | TVGGN | TYYSDSVKGRFTISLDTT | NFLVSTSSVLSPL | GDWGQG | Camelus |
| | SVQAGGSLRLS | | GQEREGVA | | NNTVYLEMTSLKPEDTAM | NF | TQVTVSS | |
| | CDASG | | AIY | | YYCAA | | | |
| BAD00636.1 | EVQLVESGGG | TTDIFAY | MAWFRQAP | TGLGF | TYYADSVKDRFTISRDNA | TSGALGGSKLRR | NFWGQGT | Camelus |
| | SVQAGGSLRLS | | GKEREGVA | | KNTVYLQMNSLKPDDTA | EGY | QVTVSS | |
| | CAASK | | AAY | | MYYCAA | | | |
| BAD00640.1 | EVQLVESGGG | STSRLFC | MAWYRHVP | LVSYTT | TYYHDSVKGRFALSRDN | LPGQCGRQDDEY | RYWGQG | Camelus |
| | SVHVGGSLRLS | | GKERERVA | TIK | AGPTWYLQMDDLKLDDT | | TQVNVSS | |
| | CAASG | | AMY | | AMYSCAA | | | |
| BAD00641.1 | AVQLVESGGG | DIDKMSC | MGWFRQAP | IGSSHI | TYYHDSIKGRFTISQSQD | AAGGGGCGASM | DYWGQG | Camelus |
| | SVQAGGSLRLS | | GKGRKPVA | | NAKRMVYLQMNSLKPED | SPGGF | TQVTVSS | |
| | CVLSG | | TTY | | TGLYYC | | | |
| BAD00642.1 | QVQLVESGGG | YVYTEYTC | MGWFRQAP | RDSGS | SYYDDFVAGRFTISQDNA | GIRVPDGSCLSEN | THWGQGT | Camelus |
| | SVEAGGSLRLS | | EKKREGVA | | KATVYLQMDTVKPEDTAS | TIW | QVTVSS | |
| | CTVSG | | CIR | | YVCAI | | | |
| BAD00643.1 | EVOLVESGGG | FTFTASKW | LGWYRLTP | SDGN | RWSSDSVKARFTMSSDN | VLFDVKQGVVPN | DYWGQG | Camelus |
| | SVQAGGSLKLS | A | ENKCEFIST | | AKNTVYLEMNSLKPEDSA | APSPNCTGYF | TQVTVSS | |
| | CSVTG | | IH | | MYFCAA | | | |
| BAD00645.1 | QVQLVESGGG | HRFIHNC | MGWFRQAP | TGDGF | TYYADSVKGRFTISQGNA | APYHCDSASWRV | IFWGEGT | Camelus |
| | SVQAGGSLRLS | | GKEREGVA | | KNTVYLEMNSLKPEDTA | KEG | QVTVSS | |
| | CASSE | | SIY | | MYYCAS | | | |
| BAD00646.1 | QVQLVESGGG | ITYSNNC | MAWFRQAP | TSDGS | THYADSMKGRFTMSQDN | RKGGAGPCGGN | GYWGQG | Camelus |
| | SVQAGGSLRLS | | GKEREGVA | | AKNTVYLQMNSLKPEDTA | WAANLGRF | TQVTVSS | |
| | CAASV | | AIY | | LYYCVA | | | |
| BAD00647.1 | EVQLVESGGG | LTDSFYC | MAWFRQAP | TSGGT | TYYADSVKGRFTISQDNA | VPRFLRCDYYFS | DYWGQG | Camelus |
| | SVQAGGSLRLS | | GKEREGVGI | | KKTNVLLMNNLKPEDTAI | RGTF | TQVTVSS | |
| | CAASG | | IN | | YYCAA | | | |
| BAD00648.1 | AVQLVESGGG | LTYSLCT | MDWYRQAP | RGSLK | TYYADSVKGRLNISKDNA | GRAYLDDPTWLK | DYWGQG | Camelus |
| | SVQAGGSLRLS | | GKEREGLA | | KSTFYLQLRSLKPEDTAM | GTGF | TQVTVSS | |
| | CAASG | | AIY | | YYCAG | | | |
| BAD00649.1 | QVQLVESGGG | DTGTGGH | MGWFREAP | TGGGV | TWYADSVRGRFAASQDN | ADSCVTFARVQG | PYWGKGT | Camelus |
| | SVQAGGSLRLS | YC | GKEREEIVA | | AKNTVSLQMNSLESEDTA | GTLDYSSI | LVTVSS | |
| | CAVSG | | LY | | MYYCAA | | | |
| BAD00652.1 | QVKLEESGGG | DTGSLHY | LAWFRQHS | ISNGVG | TYYADSIKGRFTISRDPG | AGRTKYLRLVAS | HYWGQG | Camelus |
| | SVQVGGSLTLS | | GKEREGVA | GR | KEITLYLKMDNLNSEDTA | GLSTLSTQAY | TPVTVSS | |
| | CVVSG | | SIN | | SYYCA | | | |
| BAD00655.1 | QVQLVESGGG | ATYNLYNG | LGWYRQAP | VHDGS | TYYADSVKGRFTISQDNA | DRSCLPLGNRL | CLLGPGD | Camelus |
| | SVQAGGSLRLS | KC | GKEREGVA | | QNTVYLQMNGLKPEDTAI | | QVTVSS | |
| | CAASG | | HIG | | YYCAQ | | | |
| BAD00656.1 | QVQLVESGGG | SIDNGYC | IAWFRQAP | GGGGS | YAYDGSMTGRVTISQDTT | RRRVAICSPGVG | GDWGQGI | Camelus |
| | SVQAGGSLNLA | | GEEREVVA | SE | KTTVFLEMSSLRPDDTAI | WTAY | QVNVSS | |
| | CKASQ | | VIE | | YYCAA | | | |
| BAD00657.1 | QVKLEESGGG | YTSSRYC | MGWFRQAP | SGGYN | TDYADSVKGRFTISQDNT | NFSPNYALSCRTT | YYWGQGT | Camelus |
| | SGQAGGSLRL | | GKEREWVA | | KNTVYLQMNSLKPEDTAI | LGD | QVTVSS | |
| | SCASSG | | RIN | | YYCAA | | | |
| BAD00662.1 | QVQLVESGGA | FDFADSD | MGWYRQV | SAGI | PLYADSVKGRFTISRDNA | DRIRLGFPRQTPA | SDWGQG | Camelus |
| | SAQAGESLRLS | | PGNECELA | | KNAVYLQMNSLKVGDTG | CTDLRALF | TQVTVSS | |
| | CTASG | | SSIS | | MYYCAA | | | |
| BAD00663.1 | AVQLVESGGG | DTARNYY | WAWFRQVP | TGAGS | RNYADSVKDRFTISRDDT | DARTGGDLRRAS | QSWGRG | Camelus |
| | SVQAGGSLRLS | | GQEREWVA | SIQ | KNAIYLQMSTLKPEDTAM | TY | TQVTVSS | |
| | CAASG | | WID | | YYCGA | | | |
| BAD00665.1 | DVQLVESGGG | ATSRSSC | MGWFRQAP | STAIS | TNYADSVKGRFIISRDNA | GRYGIVNFARCEE | VHWGQG | Camelus |
| | SVEAGGSLRLS | | GKEREAIAG | | ENEVYLQMNNLKPEDTAI | SDF | TQVTVSS | |
| | CKVSG | | IS | | YYCAS | | | |
| BAD00666.1 | QVQLVESGGG | SGISYIM | MTWYRQAP | SDGS | TYYAVSVRGRFTISKGRA | SLECCPVSPSDG | DYWGQG | Camelus |
| | LVQAGGSLTLS | CC | GKERELIST | | KNTLSLQMNNLNVNDTA | TPRLTKVEF | TQVTVSS | |
| | CAPSG | | IS | | VYYCAQ | | | |
| BAD00667.1 | QVQLVESGGG | ANYCSYD | IGWYRQAP | LDGR | TDYADSVKGRFTVSQDN | ELLCYGDYSFMT | YRWGQG | Camelus |
| | SVQAGGPLALS | | GKEREFVS | | SKRTSYLQMNSLKPEDTA | GQ | TQVTVSS | |
| | CEASG | | RID | | MYFCKA | | | |
| BAD00668.1 | EVQLVESGGGL | FTHSSYC | IGWFRQTP | SGGGS | TYYADSVKGRFTISQDKA | DIASYDTSPCTVIA | FDYGQGT | Camelus |
| | VQAGGSLTLSC | | GQERENVA | | KNTVSLQMNNLQPEDTA | GLEY | QVTVSS | |
| | AASG | | NIN | | TYYCAA | | | |
| BAD00669.1 | QVQLVESGGG | FDGIHC | MAWYRLAP | SGGR | TAYADSVKGRFTISRDNT | NPFRCDWSYVPP | LYWGQGT | Camelus |
| | SVQAGGSLRLS | | GTEREGVA | | KNTVFLQMNSLKPEDTAI | ATAF | QVTVSS | |
| | CSASG | | TFS | | YLCAA | | | |
| BAD00672.1 | AVQLVESGGG | YTYTSSS | MGWFRQAP | SGGGN | AFYADSVKGRFIISQDHV | DPKLVCGSVAPTI | SYWGQGT | Camelus |
| | SVQAGGSLKLS | GC | GKEREGVA | | QNTVYLQMNNLKPEDTAI | LLFRLLSMG | QVTVSS | |
| | CAVSG | | TID | | YYCAA | | | |
| BAD00675.1 | DVQLVESGGD | DTYNKR | LTWFRQSP | Y | DRTNYADSVKGRFTISQA | RRSSNKPYFDLR | NYWGQG | Camelus |
| | SVQAGGSLRLS | | GREREGIAT | | KSTVYLQMNSLNPEDTA | SY | TQVTVSS | |
| | CAASG | | IF | | MYYCAL | | | |
| BAD00676.1 | QVQLVESGGG | DTDNLYS | LSWFRQAP | RGGGN | PKYSDSVKGRFTISQDVA | RKDAHVWTSLLY | NYWGQG | Camelus |
| | SVQAGGSLRLS | | GKEREGVA | | SNMVYLQMNSLKPEDTAI | PNQY | TQVTVSS | |
| | CTASG | | GIR | | YYCAA | | | |
| BAD00677.1 | QVQLVESGGG | TTNLNMC | MGWFRQSP | AGGPS | TYYDDSVRGRFVISRDIT | KRLSCADNWVRV | DYWGRGT | Camelus |
| | SVQPGGSLSLS | | GKEREGVA | TYDAT | KKTVYLQMNSLKAEDTAV | SAP | QVTVSS | |
| | CEVSG | | SFY | | YYCAA | | | |
| BAD00679.1 | EVQLVESGGG | YRYSFCS | MAWYRQAP | DDGS | TYYADSVKGRFTISQDNA | VVGGYCYHPYTM | DYWGKGT | Camelus |
| | SVQAGGSLRLS | | GKERELVS | | KKTVYLQMNNLKPEDTA | | LVTISS | |
| | CVVSG | | STI | | MYYCKI | | | |
| BAD00680.1 | QVKLEESGETS | LTFDNVH | MGWYRKTP | SSGE | IWYHMSVQGRFTISRVNE | EGVDWFKGGCS | GRWSQG | Camelus |
| | VMAGGSLRLS | | GSECEMVA | | KRTAYLQMDNLAPSDTA | | TRVTVSS | |
| | CSVSD | | EIK | | MYYCSA | | | |
| BAD00681.1 | QVQLVESVGD | FTETTCV | MGWYRQA | SDGG | TWYKDSVKGRFTISQEYV | IVAPPHERCGELE | RYWGQG | Camelus |
| | SVQAGGSLRLS | | PGKERELV | | KKTVYLEMNSLEPEDTAM | RAY | TQVIVSS | |
| | CVASG | | SSIL | | YYCMI | | | |
| BAD00682.1 | QVKLEESGGG | YTYDSNI | MGWFRQAP | TAGGG | ASYATSVQGRFIISQDDN | DYDPDYSDYNAG | GYWGQG | Camelus |
| | SVQAGGSLRLS | | GKEREGVA | | KNAVYLQMNNLKPEDTA | KELLPSDF | TQVTVSS | |
| | CAASG | | WIY | | MYYCAA | | | |
| BAD00683.1 | AVQLVDSGGG | YTDSSGC | MGWFRPAP | GELGS | TYYADSVKGRFTISQDTA | RPRAGPYDDCLG | YVWGQGT | Camelus |
| | SAQTGGSLRLS | | GKEREGVAI | | KNTVVLLMNSLKPEDTAI | SYWGGRFE | QVTVSS | |
| | CVASG | | IK | | YYCGA | | | |
| BAD00685.1 | DVQLVESGGG | FTFSKCS | MGWYRQA | IDGT | TYVVDSVKGRFVISQDNA | RDAPLGDCYVSS | DYWGKGT | Camelus |
| | SVQAGGSLRLS | | PGKERELV | | KDTVYLQMNSLKPEDTA | WSSQTM | LVTISS | |
| | CAASG | | SSIQ | | MYYCYT | | | |
| BAD00686.1 | EVQLVESGGG | FTNSDRC | MGWFRQTP | FDGDI | IYYADSVKDRFLISRDNAK | RQFSVCAGALMP | DDWGQG | Camelus |
| | SVQAGGSLRLS | | GKEREGVA | | STLYLQMNSLKPEDTAIY | SAY | TQVTVSS | |
| | CAASG | | SIN | | YCAA | | | |
| BAD00687.1 | QVQLVESGGG | FTSNSDYC | IAWFRQAP | SGGGA | THYAESVTGRFTISRDNA | DYGGWCRVKER | TYWGQGT | Camelus |
| | SVQAGGSLRLS | | GKEREGVA | | KNVVILHMNNLKPEDTAIY | GY | QVTVSS | |
| | CAASG | | AIS | | YCAA | | | |
| BAD00688.1 | QVKLEESGGG | HLDSEYC | MAWFRQAP | RHGDS | TTYGDSVKGRFTISQDNA | QYFCLKATMTSN | ILWGQGT | Camelus |
| | SVQAGGSLRLS | | GKEREGVA | | KNAVYLQMDSLKVEDTAI | RY | QVTVSS | |
| | CETSE | | SLK | | YYCAL | | | |
| BAD00690.1 | DVQLVESGGG | YIYSSSC | MGWIRQVP | SGGGT | THYHPSVKDRFTISQDNA | SNRSRFCLSYYS | DVWGQG | Camelus |
| | SVQAGGSLRLS | | GKEREGVG | | KNTIYLQMNTLKPEDTAIY | DYVDMGVI | TQVTVSS | |
| | CVASV | | GIY | | YCAA | | | |
| BAD00691.1 | QVQLVESGGG | WISSRYC | LIWFRQAPG | TGGGV | TYYSDSVKGRFTISQGNT | FLVGFDDLVCRP | NFWGQGL | Camelus |
| | SVQAGGSLRLS | | KEQEGVASI | | KNTWYLQMNNLKPEDTSI | DVSIYPS | QVTVSS | |
| | CTVSG | | N | | YTCGT | | | |
| BAD00693.1 | QVQLVESGGG | FTFDSSD | MGWYRQA | SGRA | IYYGDSVKGRFTISRDNN | YVDVDGSKDITCG | YRSQQGT | Camelus |
| | SVQTGGSLRLS | | PGNECELV | | KNTVYLQMNSLKPEDTA | RRSDFG | QVTVSS | |
| | CTTSG | | ATIT | | MYYCAA | | | |
| BAD00695.1 | QVQLVESGGG | TFDINAC | VSWFRQPP | YSDDG | TYYADSVKDRFTISQDNE | AVGSLRGQCLGR | NFWGQGT | Camelus |
| | SVQAGGSLRLA | | GKDREGVA | | NTKKTVYLQMDNLKPEDT | RLPY | QVTVSS | |
| | CEVSG | | GIN | | AIYYC | | | |
| BAQ56198.1 | QVQLQESGGD | SGYTESV | MGWFRQAP | IPGGS | TYYDDDVKGRFTISQDNA | RNAGGRFRAWA | NYWGQG | Camelus |
| | SVQAGGSLRLA | KW | GQEREGVA | | KNTVYPQMNSLKPEDTA | GGGD | TQVTVSS | |
| | CAASA | | VIS | | MYYCAA | | | |
| BAQ56201.1 | QVQLQESGGG | YIYSNYC | MAWFRQAP | GRDDR | TIYAASLQGRFTISRDNAK | DTSPLCGPATWR | DYWGQG | Camelus |
| | SVQAGGSLRLS | | GKEREGVA | | NTVYLQMNNLKPEDTAIY | NINGY | TQVTVSS | |
| | CAASG | | HIK | | YCAA | | | |
| BAR73350.1 | QVQLQESGGG | YTYRSYC | MAWFRQAP | SRGGT | TYYADSLKGRFTISQDNA | RYSATCPRTLSGF | TYWGQGT | Camelus |
| | SVQAGGSLRLS | | GEEREGVA | | KNTVYLEMNSLKPEDTAI | | QVTVSS | |
| | CAASG | | AIN | | YYCAA | | | |
| CCF72105.1 | QVQLRESGPG | DSITANY | WSWIRQSP | YSGS | TVYSKSHGSRASITRDTS | SGSLDTNDALVA | AYWGQGT | Camelus |
| | LVKPSQTISLT | YD | GKELEWIAA | | KNQISLQLNSVTPEDTAV | WAF | QVTVSS | |
| | CTVSG | | VA | | YYCAR | | | |
| CCF72114.1 | QVQPVESGGG | YGSCKYD | TNWYRQAP | DDRS | TFYADSVKGRFTISEDND | NIVMYGPCPRR | EFWGQGT | Camelus |
| | SVQAGESLRLS | | GKEREFVS | | NVKNFVYLQMNSLKPED | | QVTVSS | |
| | CAASL | | RIK | | TAMYVC | | | |
| 022284 | GGGSVQAGGS | YSNCPLT | WSWYRQFP | PDGN | TKYTYSVKGRFTMSRGS | ALQPGGYCGYGA | CLWGQGT | Camelus |
| | LRLSCAASG | | GTEREFVS | | TEYTVFLQMDNLKPEDTA | | QVTVSS | |
| | | | SMD | | MYYCKT | | | |
| 022285 | GGGSVQAGGS | DSFSRFA | MSWFRQAP | SNGR | TTEADSVQGRFTISRDNS | VSLMDRISQH | GCRGQGT | Camelus |
| | LRLSCTASG | | GKECELVS | | RNTVYLQMNSLKPEDTA | | QVTVSL | |
| | | | SIQ | | VYYCGA | | | |
| 022286 | GGGSVQTGGS | FSFSTSC | MAWFRQAS | SGGGR | TYVAESVKGRFAISQDNA | VPAHLGPGAILDL | KYWGQGT | Camelus |
| | LRLSCAVSG | | GKQREGVA | TYYN | KTTVYLDMNNLTPEDTAT | KKY | QVTVSS | |
| | | | AIN | | YYCAA | | | |
| 022287 | GGGSVQGGGS | YTYGSFC | MGWFREGP | NGGTN | TYYADSVKGRFTISQDST | ELSGGSCELPLLF | DYWGQG | Camelus |
| | LRLSCAISG | | GKEREGIAT | | LKTMYLLMNNLKPEDTGT | | TQVTVSS | |
| | | | IL | | YYCAA | | | |
| 022288 | GGGSVQAGGS | DTGT | MGWFRQAP | PDGM | TFIDEPVKGRFTISRDNA | DWKYWTCGAQT | GQWGQG | Camelus |
| | LTLSCVYTN | | GKECERVA | | QKTLSLRMNSLRPEDTAV | GGYF | AQVTVSS | |
| | | | HIT | | YYCAA | | | |
| 022291 | GGGSAQAGGS | IPLNGYY | IAWFRQAP | GGRDV | TYYADSVTGRFTISRDSP | GSRFSSPVGSTS | NYWGQGI | Camelus |
| | LRLSCAAHG | | GKGREGVA | | KNTVYLQMNSLKPEDTAI | RLESSDY | QVTASS | |
| | | | TIN | | YFCAA | | | |
| 022292 | GGGSVQPGGS | ATYSDYS | IGWIRQAPG | TGATS | KFYVDFVKGRFTISQDNA | ADPSIYYSILGIEY | KYWGQGT | Camelus |
| | LTLSCTVSG | | KDREVVAA | | KNTVYLQMSFLKPEDTAI | | QVTVSS | |
| | | | AN | | YYCAA | | | |
| 022293 | GGGSVQAGGS | FPYSTFC | LGWFRQAP | SAGGN | TYYADAVKGRFTISQGNA | DSPCYMPTMPAP | DDFGQGT | Camelus |
| | LRLSCTGSG | | GKEREGVA | | KNTVFLQMDNLKPEDTAI | PIRDSFGW | QVTVSS | |
| | | | GIN | | YYCAA | | | |
| 022294 | GGGSVQAGGS | YTITDYC | MAWFRQAP | VVRSD | TDYADSVKGRFTISQGNT | TSSFYWYCTTAP | NVWGQG | Camelus |
| | LRLSCAASD | | GKERELVA | TRL | KNTVNLQMNSLTPEDTAI | Y | TQVTVSS | |
| | | | AIQ | | YSCAA | | | |
| 022295 | GGGSVQVGGS | HTDSSTC | IGWFRQAP | FGDGG | TNYRDSVKGRFTISQLNA | TEIEWYGCNLRTT | TRWGQGT | Camelus |
| | LRLSCVAST | | GKEREGVA | | QNTVYLQMNSLKPEDSA | F | QVTVSS | |
| | | | SIY | | MYYCAI | | | |
| 022296 | GGGSVQVGGS | GTPDRVPK | LAWFRQAP | TKDGK | TFYADSVKGRFTIFLDND | NQLAGGWYLDPN | AIWGQGT | Camelus |
| | LKLSCKISG | S | EKEREGIAV | | KTTFSLQLDRLNPEDTAD | YWLSVGAY | HVTVSS | |
| | | | LS | | YYCAA | | | |
| 022297 | GGGSVQAGGS | SPSSTYC | LGWFRQAP | TDGSV | IYAADSVKGRFTISQDTAK | RLTEMGACDARW | NYWGRGT | Camelus |
| | LRLSCNVSG | | GKEREGVT | | KTVYLQMNNLQPEDTAT | ATLATRTFAY | QVTVSS | |
| | | | AIN | | YYCAA | | | |
| 022299 | GGGSVQAGGS | KYMPCTYD | MTWYRQAP | IDGK | TTYADSVKGRFTISQDSA | DSYPCHLL | DVWGQG | Camelus |
| | LRLSCASSS | | GKEREFVS | | KNTVYLQMNSLKPEDTA | | TQVTVSS | |
| | | | SIN | | MYYCKI | | | |
| 038135 | QVQLVESGGG | AAFRSSR | MAWFRQAP | TDAS | TNYPDSVKGRFTISRDNA | LPTSF | TCGGQGT | Camelus |
| | SVQAGGSLRLS | | GKECEWVS | | KNTVYLQMSSLKPEDTAV | | QVTVSS | |
| | CAYSG | | TIG | | YYCEK | | | |
| 038136 | QVQLVESGGG | VNHCINV | MSWYRQVP | NDGT | TRYAGDVKGRFTISQDNA | EPLSGGRRYGSC | NYWGQG | Camelus |
| | SVQAGGSLRLS | | GKGREFVS | | KNTVYLEMNSLKPEDTA | GL | TQVTVSS | |
| | CAASG | | SIA | | MYYCLR | | | |
| 1kxt_F | QVQLVASGGG | YTFSSYP | MGWYRQA | SDGS | ANYADSVKGRFTISRDNA | GPGSGKLVVAGR | NYWGQG | Camelus |
| | SVQAGGSLRLS | | PGKECELS | | ANTAYLQMDSLKPEDTAV | TCYGP | TQVTVSS | |
| | CAASG | | ARIF | | YYCAA | | | |
| 038138 | QVQLVESGGG | YTYSSCT | MTWYRQAP | GDGR | ISYADSVKGRFTISRDNA | SPYSGSRCPIPT | NFWGQGT | Camelus |
| | SVQAGGSLRLS | | GKEREFVS | | GNLVYLQMNSLKPEDTA | | QVTVSS | |
| | CAASG | | VID | | MYYCKA | | | |
| 1kxv_D | QVQLVESGGG | NTLCTYD | MSWYRRAP | NDGT | TTYVDSVAGRFTISQGNA | SLRYGLPGCPI | IPWGQGT | Camelus |
| | TVPAGGSLRLS | | GKGRDFVS | | KNTAYLQMDSLKPDDTA | | QVTVSS | |
| | CAASG | | GID | | MYYCKP | | | |
| 1kxq_H | QVQLVESGGG | YTDT | VGWFRQAP | RRTGY | TYSADSVKGRFTLSQDN | GNSVRLASWEGY | FYWGQGT | Camelus |
| | SVQAGGSLSLS | | GKEREGVA | | NKNTVYLQMNSLKPEDT | | QVTVSS | |
| | CAAST | | AIY | | GIYYCAT | | | |
| 038141 | QVQLVESGGG | YTYTRRC | MAWFRQAP | IDGGR | TDYADSAKGRFTISQDRA | DGGRLDPYCSIKA | RYWGQG | Camelus |
| | SVQTGGSLRLS | | GKEREGVA | | KNTVYLQMNSLKPEDTA | YAY | TQVTVSS | |
| | CAASG | | LIY | | MYYCAG | | | |
| 1g6v_K | QVQLVESGGG | YTVSTYC | MGWFRQAP | GGS | TYYGDSVKGRFTISQDNA | STVASTGWCSRL | HYRGQGT | Camelus |
| | SVQAGGSLRLS | | GKEREGVA | | KNTVYLQMNSLKPEDTAI | RPYDY | QVTVSS | |
| | CAASG | | TIL | | YYCAG | | | |
| 038143 | QVQLVESGGG | ITFGSHC | MTWFRQAP | SGSVT | TKYADSVKGRFTISRDNA | NYYCTFVPGNY | AFWGQGT | Camelus |
| | LVQAGGSLRLS | | GKEREGVA | | KNTVYLEMNSLKPEDTAI | | QVTVSS | |
| | CVTSG | | SIT | | YYCAG | | | |
| 038144 | DVQLVESGGG | YTASTYC | MAWFRQAP | RSSS | TYYDVSVKGRFTVSQDN | IEEYCGGTYWLR | KHWGQG | Camelus |
| | SVQAGGSLRLS | | GKEREGVA | | AKNTVYLQMNSLKPEDTA | PNKY | TQVTVSS | |
| | CAASG | | TIN | | IYYCAA | | | |
| 4ppt_A | QVQLVESGGG | YPHPYLH | MGWFRQAP | SGGGG | TLYADSVKGRFTISRDKG | GGYELRDRTY | GHWGQG | Lama |
| | LVQAGGSLRLS | | GKEREGVA | | KNTVYLQMDSLKPEDTAT | | TQVTVSS | |
| | CAASG | | AMD | | YYCAA | | | |
| 1mvf_B | QVQLVESGGG | FTYSRKY | MGWFRQAP | IDNGN | TIYADSVQGRFTISQDNA | SSRWMDYSALTA | NSWGQG | Camelus |
| | SVQAGGSLRLS | | GKEREGVA | | KNTVYLQMNSLKPEDTA | KAY | TQVTVSS | |
| | CAASG | | AIF | | MYYCAA | | | |
| 3eba_A | QVQLVESGGG | YTYI | SGWFRQAP | SSDGT | TYYADSVKGRFTISQDNA | TEVAGWPLDIGIY | DYWGQG | Camelus |
| | SVQAGGSLRLS | | GKGLEWVA | | KNTVYLQMNSLKPEDTA | | TQVTVSS | |
| | CSASG | | AIR | | MYYCAA | | | |
| 1ri8_A | DVQLVESGGG | YKDRNYC | MGWFRRAP | SSGR | TAYADSVKGRFTISRDVA | GWSSLGSCGTNR | NYWGQG | Camelus |
| | SVQAGGSLRLS | | GKEREGVA | | LDTAYLQMNSLKPEDTA | NRY | TQVTVSS | |
| | CAVSG | | VID | | MYYCAA | | | |
| 1zmy_A | QVQLVESGGG | YTIGPYC | MGWFRQAP | MGGGI | TYYADSVKGRFTISRDNA | DSTIYASYYECGH | DSWGQG | Camelus |
| | SVQAGGSLRLS | | GGEREAVA | | KNTVTLQMNSLKPEDTA | GLSTGGYGY | TQVTVSS | |
| | CTASG | | AIN | | MYYCAA | | | |
| 1zv5_A | DVQLVESGGG | VTYKNYC | IGWFRQAP | SDGGI | TYYADSVKGRFTISQDNA | GYRNYGQCAT | RYWGQG | Camelus |
| | SVQAGESLRLS | | GKDREGVV | | KNTVYLQMNSLKPEDTAS | | TQVTVSS | |
| | CAASG | | FIN | | YYCAA | | | |
| 1zvy_A | DVQLVESGGG | STDSIEY | MTWFRQAP | THTGN | TYYTDSVKGRFTISQDKA | TRKYVPVRFALD | DYWGQG | Camelus |
| | SVQAGGSLRLS | | GKAREGVA | | KNMAYLRMDSVKSEDTAI | QSSY | TQVTVSS | |
| | CAASG | | ALY | | YTCGA | | | |
| 2p4a_D | QVQLVESGGG | YPWTYIY | MGWFRQAP | SGGGG | TLYADSVKGRFTISRDKG | GGDALVATRY | GRWGQG | Camelus |
| | LVQAGGSLRLS | | GKEREGVA | | KNTVYLQMDSLKPEDTAT | | TQVTVSS | |
| | CAASG | | AMD | | YYCAA | | | |
| 3eak_B | QVQLVESGGG | GSEYSYST | LGWFRQAP | SMGGL | TYYADSVKGRFTISRDNS | VRGYFMRLPSSH | RYWGQG | Camelus |
| | LVQPGGSLRLS | FS | GQGLEAVA | | KNTLYLQMNSLRAEDTAV | NF | TLVTVSS | |
| | CAASG | | AIA | | YYCAA | | | |
| 3g9a_B | DVQLQESGGG | DTFSSYS | MAWFRQAP | RDGT | TTYAGSVKGRFTISRDDA | DSGTQLGYVGAV | DYWGKGT | Camelus |
| | SVQAGGSLRLS | | GKECELVS | | KNTVYLQMVNLKSEDTA | GLSCLDYVM | QVTVSS | |
| | CAASG | | NIL | | RYYCAA | | | |
| 3jbc_7 | QVQLQESGGG | YTQSSAC | MGWFRQAP | RFFGT | AYYADSVKGRFTISQDKA | GQGCLTTIQALGG | NAWGQG | Camelus |
| | SVQTGGSLRLS | | GKEREGVA | | KNTVYLQMNSLKPEDTAI | AYGY | TQVTVSS | |
| | CAASE | | GIS | | YYCAA | | | |
| 3jbd_7 | QVQLQESGGG | FTFSHGY | MAWFRQAP | TSGVS | AYYADSVLGRFTISQDNA | TSISCSSGY | MFWGQG | Camelus |
| | SAQTGGSLRLS | | EKEREWVA | | KSTLYLQMNNLKPEDTA | | TQVTVSS | |
| | CAASG | | CVR | | MYYCAA | | | |
| 3jbe_7 | QVQLQESGGG | YQYSLLC | MAWFRQVL | TYNGA | MRYADTVKGRFTVSQDK | GRWRFGDICHEG | NYWGQG | Camelus |
| | SVQAGGSLRLS | | GEGREGVA | | DKNTVYLQMNSLKPEDT | SGY | TQVTVSS | |
| | CAASG | | FIT | | AIYYCAA | | | |
| 3jbg_7 | QVQLQESGGG | YIPSAN | CMRWFRQA | RGGY | TWHADSVKGRFTISGDN | SNTCPGASADF | RSWGQG | Camelus |
| | SVQAGGSLRLS | | PKEREWVA | | AKTAAYLQMNSLKPEDTA | | TQVTVSS | |
| | CAASE | | SVL | | IYYCAY | | | |
| 3ogo_H | QVQLVESGGAL | FPVNRYS | MRWYRQAP | SAGDR | SSYEDSVKGRFTISRDDA | NVGF | EYWGQGT | Camelus |
| | VQPGGSLRLSC | | GKEREWVA | | RNTVYLQMNSLKPEDTA | | QVTVSS | |
| | AASG | | GMS | | VYYCNV | | | |
| 3qsk_B | QVQLVESGGG | YHHPYIY | MGWFRQAP | SGGGG | TLYADSVKGRFTISRDKG | GGHHLRDHTY | GQWGQG | Camelus |
| | LVQAGGSLRLS | | GKEREGVA | | KNTVYLQMDSLKPEDTAT | | TQVTVSS | |
| | CAASG | | AMD | | YYCAA | | | |
| 5c2u_B | QVQLQESGGG | DYYA | IGWFRQAP | SRDGS | TYYPDAVKGRFTISRDNA | DRRQRWGPYYYL | VYWGQGT | Camelus |
| | LVQPGGSLRLS | | GKEREGVA | | KNTVYLQMNSLKPEDTAV | SALEY | QVTVSS | |
| | CVVSG | | AIS | | YYCAA | | | |
| 5e7f_C | QVQLVESGGG | FTFDDSD | MGWYHQA | SDGS | TYYADSVKGRFTISRDNA | ATTTVASPPVRHV | GYWGQG | Camelus |
| | SVQAGGSLRLS | | PGNECELV | | KNTVYLQMNSLKPEDTA | CN | TQVTVSS | |
| | CTASG | | SAIF | | MYYCAA | | | |
| 5fuc_V | DVQFVESGGG | YIYSTYC | MGWFRQAP | TNSGR | TYYADSVKGRFTISQDNA | RPSIRCASFSATE | KDWGQG | Camelus |
| | SVHAGGSLRLN | | GKEREGVA | | KNTVYLQMNSLKPEDTAI | Y | TQVTVSS | |
| | CATSG | | HIY | | YYCAA | | | |
| 5ku2_7 | QVQLQESGGG | YAVSLYS | MGWFRQAP | SSGVD | TTYADSVKGRFTISRDNA | GFGLSLSRYTY | AHWGQG | Camelus |
| | SVQTGGSLTLS | | GKELEGVA | | KDTMYLQMNSPKPEDTAI | | TQVTVSS | |
| | CAASG | | GIS | | YRCAA | | | |
| 5m7q_B | QVQLQESGGG | NTGR | MGWFRQAP | RLGGY | TSYAGPVKGRFTISQDNA | DSRPIYSGTW | RYWGQG | Camelus |
| | SVQAGGSLRLS | | GKEREKVAI | | KNTVYLLMNSLKPEDTAI | | TQVTVSS | |
| | CAVSE | | IT | | YYCAA | | | |
| 5my6_B | QVQLQESGGG | YIFNSCG | MGWYRQS | GDGD | TWHKESVKGRFTISQDN | CYNLE | TYWGQGT | Camelus |
| | SVQAGGSLKLT | | PGRERELV | | VKKTLYLQMNSLKPEDTA | | QVTVSS | |
| | CAASG | | SRIS | | VYFCAV | | | |
| BAD00201.1 | DVQLVESGGG | ATYCTYD | MSWYRQAP | SDGS | ARYADSVKGRFTISRDNA | VFKSWCSDGLGT | NYWGQG | Camelus |
| | SVQAGGSLRLS | | EKDYEFVSV | | KNTVYLQMNSLKPEDTG | TLP | TQVTVSS | |
| | CAASG | | ID | | MYYCKT | | | |
| BAD00202.1 | EVQLVESGGG | YDFSANN | LYWLRQAP | SDGT | TDYADSVKGRFTISRDNA | DISAPPGIGGTCA | DYYGQGT | Camelus |
| | SVQPGGSLRLS | | GKECEFVS | | ENKVYLQMNSLKPEDTA | FLG | QVTVSS | |
| | CAARG | | SID | | VYYCAA | | | |
| BAD00203.1 | EVQLVESGGG | YTFSSYS | MAWFRQAP | SDGS | TNYADSVKGRFTISRDNA | DGGYYSCGVG | FERGQGT | Camelus |
| | SVQAGGSLRLS | | GKECELVS | | KNTVYLQMNALKPEDTAV | | QVTVSS | |
| | CVASG | | SID | | YYCAA | | | |
| BAD00205.1 | EVQLVESGGG | YTSSMNA | MGWFRQAP | RGGK | AYYADSVKGRFTVSRDN | TDESPLRRRFSLL | DWWGRG | Camelus |
| | SVQAGGSLKLS | | GKEREGVA | | VKNTVDLQMKGLKAEDT | DRRRY | TQVFVSS | |
| | CGLSG | | AVS | | ATYYCAA | | | |
| BAD00206.1 | AVQLVESGGG | FPFNGYC | MAWFRQAP | EGRL | TYYNDAVKGRFTISRDNT | KSYMCGSTLWRR | NDWGQG | Camelus |
| | VVHAGGSLTLS | | GQEREGVA | | KSTAELQMNNLRPEDTA | IDQY | TQVTVSS | |
| | CATSG | | AIS | | RYFCAT | | | |
| BAD00207.1 | AVQLVESGGG | YTYSSAR | IGWFRQAP | TDGVT | TYYADAVKGRFTISRDNA | RTSPYSGGWFRV | NGWGQG | Camelus |
| | SVQTGGSLRLS | | GKEREGVA | | KNTVYLQMNSLKPEDTA | SQY | TQVTVSS | |
| | CVASG | | AIL | | MYYCAI | | | |
| BAD00209.1 | QVQLVESGGG | YTISGIC | MGWFRQAP | PGGTG | TYYADSVKGRFTISRDNA | ACATSCVGGYCR | RYWGQG | Camelus |
| | SVQAGGSLRLS | | GKEREGVA | | KNTVDLQMNGLNPEDTAI | GNGY | TQVTVSS | |
| | CAASG | | GIS | | YYCAA | | | |
| BAD00210.1 | EVQLVESGGG | YTISKNR | MAWFRQAP | SGGSS | TLYADSVKGRFTISRDNA | VLRGIGYPNLRSD | KYWGQGT | Camelus |
| | SVQTGGSLRLS | | GKEREGVA | | RNAVYLQMNSLKPEDTG | AY | QVTVSS | |
| | CAASG | | TIS | | TYYCAG | | | |
| BAD00211.1 | DVQLVESGGG | ITYCTGD | RSWYRQAP | NDGT | ASYADSVKGRFTISQDIV | DFVDGTWCAIKF | THWGQGT | Camelus |
| | SEQAGGSLRLS | | GKEREFVS | | KKSVYLRMNSLKPEDTA | GR | QVTVSS | |
| | CAAPN | | SIN | | MYYCKT | | | |
| BAD00212.1 | EVQLVESGGG | FTFANSV | MVWYRQG | TDGT | TYYSTSVKGRFTISRDNA | DFQASTVGRCDG | AKWGQGT | Camelus |
| | SVQAGDSLRLS | | SGNECKLV | | KNTVYLQMNNLKAEDTA | YGY | QVTVSS | |
| | CTTSG | | SSIS | | MYYCAA | | | |
| BAD00213.1 | AVQLVESGGG | NYC | MAWFRQAP | RDGRT | TAYADSVKGRFTISRGNE | YVGGSYSCGTLE | KYWGQGT | Camelus |
| | SVQAGGFLRLS | | GKEREGVA | | KNTVYLLMNNLKAEDTAT | NDGY | QVTVSS | |
| | CVASV | | AIN | | YYCAA | | | |
| BAD00214.1 | EVQLVESGGG | NTYSTNL | MGWFRQAP | CGRGT | TFYADSVKGRFTISQDNA | GSVRGIWSGTSQ | KYWGQGT | Camelus |
| | SVQAGGSLRLS | | GKEREGVA | | KKMVYLQMELLRPEDTGI | Y | QVTVSS | |
| | CAAPG | | AIC | | YYCAS | | | |
| BAD00216.1 | EVQLVESGGD | STYSGNC | MAWFRQAP | TDDDT | TYYADSVKGRFTISQDTA | RDAWRRIGSWRD | DYWGQG | Camelus |
| | SVQAGGSLRLS | | GKEREGVA | | KNTLYLQMNSLKPEDTA | VAIY | TQVTVSS | |
| | CVASS | | VVY | | MYYCAT | | | |
| BAD00217.1 | EVQLVESGGG | YTSGRNY | MAWFRQAP | STGGS | ARYADSVKGRFTISQDLS | GKPYGDMLDARG | KYWGHGT | Camelus |
| | SVQAGGSLRLS | | GKEREGVG | | NDTMYLQMNNLKPEDTG | Y | QVTVSS | |
| | CAASG | | RIY | | MYYCAA | | | |
| BAD00235.1 | QVQLQESGGG | YTTCNSD | MNWYRQAP | SDGS | TSYADSVKGRFTISCDNA | VVLCGHSDYE | TYWGQGT | Camelus |
| | SVQAGGSLRLS | | GKEREFVS | | KNTVHLQMNSLKPEDTA | | QVTVSS | |
| | CAATR | | GID | | MYYCKR | | | |
| BAD00242.1 | QVQLQESGGG | YTHCNYG | MSWHRQAP | SDGS | TSYADSVKGRFTISQDNA | ILLCGDSDYA | THWGQGT | Camelus |
| | SVQAGGSLRLS | | GKEREFVS | | KNTVYLQMDSLKPEDTA | | QVTVSS | |
| | CAASG | | AID | | MYYCKR | | | |
| BAD00221.1 | EVQLVESGGG | YTFCSYD | MNWYRQVP | SDGL | TSYADSVKGRFTISLDIAK | DPGPFSDSRCAY | NAWGQG | Camelus |
| | SVQAGGSLRLS | | GKEREFVS | | NTVYLQMNSLKPEGTAM | | TQVTVSS | |
| | CAASA | | AID | | YYCKT | | | |
| BAD00222.1 | EVQLVESGGG | YTYCSYD | MSWYRQAP | SDGS | TSYADSVKGRFTISQDNA | DTVPFFLMGPYG | NYWGQG | Camelus |
| | SVQAGGSLRLS | | GKEREFVS | | KNTVYLQMNSLKPEDTA | GSCHG | TQVTVSS | |
| | CAASG | | AID | | MYYCKT | | | |
| BAD00224.1 | EVQLVESGGGL | FTFSWAY | MSWFRQAP | SDGSN | TYYKDSLKGRFTISRDNA | GQLLG | RSRGQGT | Camelus |
| | VQPGESLRLSC | | GKELEWVS | | KNTLYLQMNSLKSEDTAL | | QVTVSS | |
| | AASG | | GIN | | YYCNI | | | |
| BAD00226.1 | QVQLVQSGGG | FTFDDSD | MGWFHQAP | SNGN | TYYVDSVQGRFTISRDNA | RNDLVSSNTPPS | NYWGQG | Camelus |
| | SVQAGGSLRLS | | GNECELVS | | KNTVYLQMNSLKPEDTA | NCHPYGY | TRVTVSS | |
| | CTASG | | SIS | | MFYCAT | | | |
| BAD00228.1 | EVQLVESGGG | FTYSTNC | MGRFRQVP | TRRCS | TYYADSVKGRFTISQDNA | TEQVFFCSWLRG | GWWGQG | Camelus |
| | SVQAGGSLRLS | | GKEREGVA | | KNTVYLQMNSLKPEDTA | VDF | TQVTVSS | |
| | CAGSG | | TIY | | MYYCAA | | | |
| BAD00236.1 | QVQLVQSGGG | HTYCSYD | MSWYRQAP | SDGS | TTYADSVKGRFTISQDNA | GVRGGYCPID | NYWGQG | Camelus |
| | SVQAGGSLRLS | | GKEREFVS | | KNTVYLQMNSLKPEDTA | | TQVTVSS | |
| | CAASG | | AID | | MYYCKS | | | |
| BAD00237.1 | QVQLQESGGG | YTTSSCS | MAWYRQAP | SDGS | TYYADSVKGRFTISQDNA | KFKPPLFSCKLGY | NSWGQG | Camelus |
| | SVQAGGSLRLS | | GKERELVST | | KNTVDLQMNSLKPEDTA | | TQVTVSS | |
| | CAASG | | | | MYYCNM | | | |
| BAD00240.1 | QVQLVQSGGG | YTYSSYC | MGWFRQAP | SGGGR | TYYTDSVKGRFTISQDNA | EWYGGSWYPISQ | GYWGQG | Camelus |
| | SVQAGGSLRLS | | GKEREGVA | | KNTVYLQMNSLKPEDTAI | IPYGDCDF | TQVTASS | |
| | CAASG | | TIN | | YYCAA | | | |
| BAD00243.1 | EVQLEESGGG | YTYCRYD | MSWYRQAP | SDGT | TMYADSVKGRFTISRDNA | EIMCGDSDYA | SQWGQG | Camelus |
| | SVQAGGSLSLS | | GKEREFVS | | KNTATLQMNSLKPEDTA | | TQVTVSS | |
| | CAASG | | SID | | MYYCKR | | | |
| BAD00244.1 | QVQLVQSGGG | YTACSYD | MSWYRQAP | TDGS | TSYADSVKGRFTISQDNA | DGVYCSGGYRW | DYWGQG | Camelus |
| | SVQAGGSLRLS | | GKEREFVS | | KNTVYLQMNSLKPEDTA | S | TQVTVSS | |
| | CAASG | | AIE | | MYYCKT | | | |
| BAD00245.1 | QVQLVQSGGG | FTARSYF | MGWFRLAP | SRAGA | TYYADSVKGRFTISQDNA | AVGWLSGAWTW | QYWGQG | Camelus |
| | SVQAGGSLRLA | | GKEREGVA | | ENTVYLQMNSLKPEDTAI | GSKY | TQVTVSS | |
| | CAASG | | AIN | | YYCAA | | | |
| BAD00247.1 | QVQLQESGGG | YTYRSNY | MGWFRQAP | SGGGS | TRIADSVKGRFTISQDNA | GRYWYSM | DYWGKGT | Camelus |
| | SVQAGGSLRLS | | GKERERVA | | KNTVYLQMNSLKPEDTA | | LVTISS | |
| | CVASG | | HIN | | MYYCGA | | | |
| BAD00252.1 | QVQLQESGGG | GTYSTNY | MGWFRQAP | TGGRS | TDYADAVKGRFTISQDNA | GFRGLLSRVLSPS | RYWGQG | Camelus |
| | SVQAGGSLRLS | | GKEREGVA | | KNTVYLQMNSLKPEDTA | NY | TQVTVSS | |
| | CVASR | | AIY | | MYYCAA | | | |
| BAD00254.1 | QVQLQESGGG | YIYCGYSI | MTWYRQAP | LDGT | TTYADSVKGRFTISQDNA | C | NYWGQG | Camelus |
| | SCRLEGLLKLS | | GKEREFVA | | KNTVYLQMNSLKPEDTA | | TQVTVSS | |
| | CTASM | | GTD | | MYYCKR | | | |
| BAD00256.1 | QVQLVQSEGG | KTYCNYD | MNWYRQAP | SDGS | TSYADSVKGRFTISQDNA | ILLCGDSDYE | SHWGPGT | Camelus |
| | SVQAGGSLRLS | | GKEREFVS | | KNTVYLQMNSLKPEDTA | | QVTVSS | |
| | CAASG | | SID | | MYYCKR | | | |
| BAD00257.1 | EVQLVESGGG | YRVCNSD | MSWYRQAP | SDSS | TSYADSVKGRFTISQDNA | VVLCGDSDYE | TTWGQGT | Camelus |
| | SVQAGGSLRLS | | GKEREFVS | | KNTVYLQMNSLKPEDTA | | QVTVSS | |
| | CAASK | | GID | | MYYCKI | | | |
| BAD00261.1 | QVKLEESGGG | YKFSICG | MGWYRQA | RDGR | TTYADSVKGRFTISQDNA | ADQFDCSWVGGY | NAWGQG | Camelus |
| | SVQAGGSLKLS | | PGKQRELV | | KSTLYLQMNGLKPEDTAV | | TQVTVSS | |
| | CAASG | | STIT | | YFCAA | | | |
| BAD00262.1 | QVQLVESGGG | YTYNTYC | VGWFRQAP | SGSVF | TYYADSVKGRFTISEDKA | EGTQLFNRAKCG | KTWGQGT | Camelus |
| | SVQAGGSLKLS | | GMEREGVA | | KKTWYLQMNSLKPEDTAI | TWSAY | QVTVSS | |
| | CVGSG | | GMY | | YYCAI | | | |
| BAD00263.1 | QVQLVESGGG | YTASYIY | MAWFRQAP | SEDGR | TSYADSVKGRFIISQGVA | VSDYDTGPPLLPL | KYWGQGT | Camelus |
| | SVQAGGSLRLS | | GKEREGVA | | KNTVDLQMNNLKPEDSA | ETYGY | QVTVSS | |
| | CTASG | | GIY | | TYYCAV | | | |
| BAD00264.1 | QVQLVESGGG | YIPFRDYD | LNWFRRAP | RDGG | TAYAASAKGRFTMSRDN | DLSLRC | NGGGQGT | Camelus |
| | SVQAGGSLRLS | | GKECEFVS | | AKSMVYLRMNNLKPEDT | | QVTVSS | |
| | CTASG | | RIV | | AVYYCAE | | | |
| BAD00266.1 | QVQLVESGGG | DTSGTYC | MAWFRQVP | SGDSG | ILYADPVKGRFTISQDNAK | TPTAYGGSFCLM | NYWGQG | Camelus |
| | SVQAGGSLRLS | | GKEREGVA | GGT | NSVYLEMNSLKPEDAAIY | LSGGY | TQVTVSS | |
| | CVASG | | SIN | | YCAA | | | |
| BAD00267.1 | DCQLVESGGG | YDTYC | MGWFRQAP | TGGGS | AYHDSVKGRFTISQDNV | ARPHAYCNGVTA | LSWGQGT | Camelus |
| | SVQAGGSLRLS | | GKERDWVA | | KNTVYLQMNSLKPEDTAI | PLNF | QVTVSS | |
| | CAASG | | VIN | | YYCVA | | | |
| BAD00270.1 | EVQLVESGGG | FTFDDSE | MAWYQQAP | SSGG | TSYAESVKGRFIISRDNAK | QDCSGAYCYTMD | PCGGQGT | Camelus |
| | SVQAGGSLRLS | | GNECELVA | | NTVYLQMNSLEPEDTAM | PN | QVTVSS | |
| | CTASG | | TIS | | YYCAT | | | |
| BAD00271.1 | DVQLVESGGG | VTYSSNY | MGWFRQAP | TDGRS | TYYADSVKGRFAVSLDNA | VRWRYGSTCRSA | NYWDWG | Camelus |
| | SVQAGGSLRLS | | GKEREGVA | | KNTVSLQINSLKVEDTAM | LFASGVN | QGTQVTV | |
| | CAASG | | VIC | | YYCAA | | | |
| BAD00272.1 | QVKLEESGGG | YSTNRCI | MAWYRQAP | TGT | TYYAASVKGRFTISQNNA | PSCGEVADGVLG | SFWGQGT | Camelus |
| | SVQAGGSLRLS | | GKERELVS | | KNTVYLQMNALKPEDTA | WGDF | QVTVSS | |
| | CTASG | | SIN | | MYYCNM | | | |
| BAD00274.1 | DVQLVESGGG | STYCDID | MGWYRQA | PDGS | ATYADSVKGRFTMSQDG | EKSRGPRCYGY | NTWGQGT | Camelus |
| | SVQAGGSLRLS | | PGKEREFV | | AKNTVNLQMNSLKPEDT | | QVTVSS | |
| | CTISG | | SLMD | | AKYYCKI | | | |
| BAD00280.1 | EVQLVESGGG | LPSDVVA | MAWYRRAP | SGNQ | PYYADFVAGRFIISQDNT | MFFFGPDRKAK | ITFGQGTQ | Camelus |
| | SGQAGDSLRLS | | GKERELVA | | KKTLFLQMNSLKPEDTAT | | VTVSS | |
| | CATSG | | SLP | | YYCNS | | | |
| BAD00283.1 | DVQLVESGGG | LTISTAC | MGWFRQAP | KGIGG | TWYAASVKGRFTISQDNA | DLSRLCQYRMTA | AHRGQGT | Camelus |
| | SVQAGGSLRLS | | GKEREGVA | | KNTVYLQMNSLEPEDTGI | PRDF | QVTVTS | |
| | CAASG | | SIN | | YYCAA | | | |
| BAD00285.1 | EVQLVESGGG | YTYSSYC | MGWFRQAP | SFGGS | TYYADSVKGRFTISQDNA | STRWLLPHEQSN | NYWGQG | Camelus |
| | SVQAGGSLRLS | | GKEREGVA | | KKTVYLQMNSLKPEDTAI | SLQY | TQVTVSS | |
| | CAASG | | HIN | | YYCAA | | | |
| BAD00286.1 | QVQLVESGGG | FTFDDSD | MGWYHQA | SDGR | TYYEDSVKGRFTISRDNA | PSLAGGSWEGYD | GYWGQG | Camelus |
| | SVQAGGSLRLS | | PGNECELV | | KNTVFLQMNNLKPEDTA | C | TQVTVSS | |
| | CTASG | | GSIS | | MYYCAS | | | |
| BAD00289.1 | AVQLVDSGGG | YTSCPGN | MAWYRQAP | GDGS | AKYAESVKGRFTISQDND | ERPSSYRLGCIHS | AYWGQGT | Camelus |
| | SVQAGGSLRLS | | GKEREFVSI | | KNAVYLQMNSLKPEDTAT | Y | RVTASS | |
| | CAASG | | IE | | YYCKV | | | |
| BAD00291.1 | DVQLVESGGG | NVDSNNC | MGWFRQAP | LGGPG | TDYADSVKGRFTISQDNT | AKGFLFTGSCYS | AYWGQGT | Camelus |
| | SVQAGGSLRLS | | GKEREVVA | | ENTLYLQMNSLKPEDTG | GSWSDSL | QVTVSS | |
| | CVVSG | | TIY | | MYYCAA | | | |
| BAD00293.1 | QVQLVESGGG | DTIRSTSM | MGWFRQAP | TDGS | TIYADSVKDRFAISQDNV | GNCYAGSWCCV | NFWGQGT | Camelus |
| | SVESGESLTLS | | GKECELVAT | | KNSVYLQMNSLKPEDTA | APRRRF | QVTVSS | |
| | CTADA | | IR | | VYYCAV | | | |
| BAD00294.1 | EVQLVVSGGG | YTGSWCS | MGWFRQAP | SDGD | TYYDDSVKGRFTISQDYA | ETGGRPLRVGYCI | MHWGQG | Camelus |
| | SVQAGGSLRLS | | GREREMIAV | | KSMVFLPMNSLEPEDTA | DGT | TQVTVSS | |
| | CAASG | | IT | | MYYCNM | | | |
| BAD00295.1 | QVQLVESGGG | YTGTTCR | MAWYRQAP | SHGD | TYYAESVKGRFTISQDND | IACPAGVSCTRCY | EFWHWG | Camelus |
| | SVQAGGSLKLS | | GKERVLVS | | KKTVYFQMNSLKPEDTA | SEP | QGTQVTV | |
| | CAASG | | SIT | | MYLCNT | | | |
| BAD00296.1 | QVQLVESGGE | DSRSGDIL | SGWFRQAP | RRGGT | TYYSNSVKGRFTISQDKS | TTSGLWARRRRS | NYWGQG | Camelus |
| | SVEAGGSLRLS | A | GKEREGVA | | KNTVYLTMNSLAPEDTAI | DW | TQVTVSS | |
| | CVSSG | | AIG | | YYCAA | | | |
| BAD00297.1 | EVQLVESGGG | YTSSYPC | MAWFRQAP | ADGG | TAYADSVKGRFTISRDGD | KPRRGCVFYRSA | DWWGQG | Camelus |
| | SVEAGGSLRLS | | GKEREGVA | | KNTIDLLINSLKLEDTAIYY | Y | TPVTVSS | |
| | CAAAT | | VAD | | CAA | | | |
| BAD00298.1 | DVQLVESGGG | SPYC | MGWFRQAP | RRGIS | TFDSDHLKGRFTITQDNA | DNRVLYCGEGML | NYRGQGT | Camelus |
| | SVEAGGSLRLS | | GGSQEGIA | | ENTVYLIMNSLIPEDTAIY | GPTEY | QVTVSS | |
| | CVASF | | AVN | | YCAA | | | |
| BAD00300.1 | QVKLEESGGG | YTGILTC | MGWFRQVP | AR | SYYTDSVEGRFTISRDNY | KRTGVCGLGGNF | TDWGRGT | Camelus |
| | SVEAGGSLTLS | | GKEREEVA | | KNMVQLHMTRLTPEDTG | | QVTVSS | |
| | CTAPE | | YIG | | MYYCGA | | | |
| BAD00302.1 | QVQLVESGGG | PINT | LAWFRQAP | PRYFR | TFYADSVKGRFTISEGDD | SAGRLDEPLGAR | LTWGSGL | Camelus |
| | SVQAGGSLTLS | | GAEREGVA | RDN | EDTVYLQMNNLQPEDTA | NY | QVTVSS | |
| | CKNTV | | AIY | | MYYCTA | | | |
| BAD00303.1 | AVQLVESGGG | FTYTAYT | MGWFRQTP | SGGAS | TYYTDSVKGRFTISRGNM | SPSLSASAWSTGI | EFWGPG | Camelus |
| | SVQAGGSLSLS | | EKERERVA | | KNTLSLQMLSLIPEDPAV | SAF | MQVTVFS | |
| | CAAFG | | AIS | | YYCAA | | | |
| BAD00304.1 | AVQLVESGGG | YTNDNYC | VAWFRQAP | KVGGG | TWYADSVKGRFTISQDH | GSTWETCT | DYWGQG | Camelus |
| | SVQSGQSLRLS | | GKEQEAVA | K | ARSAKYLQMDSLKPEDT | | TQVTVSS | |
| | CTVFR | | GLT | | AMYYCAA | | | |
| BAD00305.1 | QVKLEESGGG | NTLTVNC | MGWFRQTP | ADGA | FSYYMDSVKGRFTISQDS | TTYALCRTWYTAA | TYWGQGT | Camelus |
| | SVQAGGSLRLS | | GKEREGVA | | SNTVYLEMDSLKPEDTA | AAYGY | QVTVSS | |
| | CKRSG | | AIA | | MYYCAA | | | |
| BAD00308.1 | AVQLVESGGG | FTYC | MAWFRQGP | SGGGT | YYFDDSMKPRFTISRETA | GSVVGCLGHTFG | TDWGQG | Camelus |
| | SVQAGESLKLS | | GKEREGVA | | KNTVHLQMTSLKPEDTAI | F | AQDTVSS | |
| | CTASL | | AID | | YYCAV | | | |
| BAD00313.1 | EVQLVESGGG | DDYRGFY | MGWFRQAP | IDIYNN | SGYADSAKGRFTISYDNV | ASDPVYYSATSD | YNWGQG | Camelus |
| | SVQIGGSLRLS | | GKEREGVG | ARP | KNTMYLQMSNLKAEDTG | RLIDYAY | TQVTVSS | |
| | CAASG | | SIA | | TYYCAA | | | |
| BAD00314.1 | AVQLVESGGG | VGFSFYT | MAWFHQAP | LDGT | TNYADSVKGRFTISRDNG | GVVSGTVVLDTC | AYWGQGT | Camelus |
| | SVQAGGSLRLS | | GKECELVSI | | KNTADLQMNSLILEDTGV | PPRSHES | QVTVSS | |
| | CTASG | | IS | | YYCAA | | | |
| BAD00315.1 | EVQLVESGGG | YSFSGYC | MGWFRQVP | TFGGT | TLYADSVKARFTISRDNA | CGPRSSFDNCAR | FYWGRGT | Camelus |
| | SVQAGGSLRLS | | GKEREGVA | | KNTMWLQMDSLKPEDTA | GESGY | QVTVSS | |
| | CAASG | | TIN | | IYYCAR | | | |
| BAD00319.1 | QVKLEESGGG | YTYCRYD | MSWYRQAP | GDSS | TSYADSVKGRFTISQDNA | ILNTIATMFDDAPV | GYWGQG | Camelus |
| | SVQAGGSLRLS | | GKEREFVS | | KNTVYLQMNSLIPEDTAM | QPCAF | TQVTVSS | |
| | CAASG | | AID | | YYCKT | | | |
| BAD00320.1 | AVQLVESGGAS | DWDSRKW | MAWFRKAP | TVDDS | TYYADSVKGRFAISRDNA | DSMIAGALNDRG | RFWGQGT | Camelus |
| | VETGGSLRLSC | | GSRREGVA | | KSTLYLQMNGLKPEDTA | Y | QVTVSS | |
| | AVSG | | SIY | | MYYCAS | | | |
| BAD00321.1 | AVQLVESGGG | AAEFRYC | ISWFRQAP | RDGI | TTYADSVKGRFTISQNNA | NPPSGSRACPY | DVWGQG | Camelus |
| | SVQAGGSLRLS | VYT | GKEREFVS | | KNTVFLQMDSLQPGDTA | | TQVTVSS | |
| | CVASP | | SIN | | MYFCKT | | | |
| BAD00323.1 | QVKLEESGGG | LISC | MAWFRQAP | TPVSS | TFYSDSVKGRFTISQDNA | PGKLYYGCDFWS | TYWGQGT | Camelus |
| | SVQTGGSLRLS | | GKEREEVA | | TNTVYLQMDSLKPEDTA | GY | RVTVSA | |
| | CVASE | | AIY | | MYYCAA | | | |
| BAD00325.1 | AVQLVESGGG | YAAT | LGWFRQAP | RDGF | TKYGDSVKGRFTVSRDN | AFLVWGLGDCPD | GAWGQG | Camelus |
| | SVQPGESLRLS | | GKECELVAT | | NKNTMYLEMTSLKPDDA | DRA | TQVTVSS | |
| | CLVSG | | IS | | GVYYCAH | | | |
| BAD00326.1 | QVQLVESGGG | LSLTHFC | MGWFRQD | PPVDT | TYYADSAKGRFTISRDNA | CSVCSGLSCGRP | VHWGQG | Camelus |
| | SVQAGGSLRLS | | PGKEREEV | | KNAVYLQMNSLKPDDTA | | TQVTVSS | |
| | CIASG | | ATIH | | TYYCAA | | | |
| BAD00328.1 | EVQLVESGGG | YTHCDYD | MSWYRQAP | SDGS | VNYADSVKGRFTISQDNA | HGVTWSASRGGR | NFWGQGT | Camelus |
| | SVQAGGSLRLS | | GKEREFVS | | KNTVYLQMNSLKPEDTA | WQDCQSGL | QVTVSS | |
| | CAVSG | | SFD | | MYYCKI | | | |
| BAD00329.1 | EVQLVESGGG | FPNNVNC | VAWVRQGP | TYGS | PYLADSVKGRFTVSLDRP | GTCHDEDGTMKL | AYWGRGT | Camelus |
| | SVQAGGSLRLS | | GKEREGVA | | ENTVYLEMNNLKPEDTGT | NVKGHD | QVTVSS | |
| | CVASE | | GIY | | YICAA | | | |
| BAD00330.1 | QVQLVESGGG | YGYCAYD | MSWYRQTP | SDGS | TSYADSVKGRFTISRDNA | RLRVSVFGCPMG | NYWGQG | Camelus |
| | SVQAGGSLRLS | | GKEREFVS | | KNAVYLQMNSLKPEETA | GN | TQVTVSS | |
| | CAASG | | GID | | MYYCKI | | | |
| BAD00331.1 | QVQLVESGGG | YGYSTDC | MGWFRQAP | GTSI | TYYADSLKGRFTISRDNA | EAGVYPYCSGAW | NYWGQG | Camelus |
| | SVQAGGSLRLS | | GKEREGVA | | RNTLYLQMNSLKPEDTA | DRRSAY | TQVTVSS | |
| | CAASG | | AIH | | MYYCAL | | | |
| BAD00332.1 | EVOLVESGGG | YTFSSGT | MGWFRQAP | SDGD | TNYADSVKGRFTISRDNA | PLTLSRYDCYSSS | GYWGQG | Camelus |
| | SVQAGGSLRLS | | GKGCELVS | | KNTVYLQMNSLKPEDTAV | RSNPL | TQVTVSS | |
| | CAASG | | STI | | YYCAA | | | |
| BAD00333.1 | AVQLVESGGG | YDHCTYD | MSWYRQAP | SDDM | ITYAESVKGRFTISRDNAK | TTAHCSGGECCG | HYWGKGT | Camelus |
| | SVQAGGSLRLS | | GKEREFVS | | STVYLQMNSLKPEDTATY | SFQM | LVTISS | |
| | CAASG | | TID | | YCKS | | | |
| BAD00334.1 | QVKLEESGGG | DTYSSHC | MGWFRQAP | GGL | TYYADSVKGRFTISQDNR | RGGGCWYPWWD | NYWGQG | Camelus |
| | SVQAGGSLRLS | | GKEREGVA | | KNTVYLQMTSLKPEDTA | AY | TQVTVSS | |
| | CAASG | | AIG | | MYYCAA | | | |
| BAD00338.1 | QVQLVESGGG | CTYCRC | MGWFRQAP | RESGT | TYSADSVKGRFTISQDNG | VPTSQWAACPPE | RYWGQG | Camelus |
| | SVQAGGSLRLS | | GKEREIVAR | | KNTVYLHMNTLKPEDTAI | Y | TQVTVSS | |
| | CVASG | | IN | | YYCAA | | | |
| BAD00339.1 | QVQLVESGGG | FTFNRCG | MAWYRQAA | TDGG | GSYADVVKGRFTISQDKA | QLSPEFGKQCA | SNWGQG | Camelus |
| | SVQAGGSLRLS | | GKEREWIS | | KDKVYLQMNNLKPEDTA | | TQVTVSS | |
| | CTAPG | | SIN | | MYSCKT | | | |
| BAD00340.1 | QVQLVESGGG | TYTTDS | MAWFRQTP | TSSGR | TSYADPVKGRFTISQDNA | SYYRDDHSADLD | HLWGQGT | Camelus |
| | SVQAGGSLRLS | | GKKREGVA | | KNTVYLQMNNLKPEDTG | AAEF | QVTVSS | |
| | CAVSG | | RIY | | MYYCAL | | | |
| BAD00341.1 | EVQLVESGGG | SYNMHC | MGWFRQTT | TGAGE | VWYVDSVKGRFTISHDN | DIAPCSGGYCVC | NIWGQGT | Camelus |
| | SVQAGGSLRLS | | GEEREGLA | | AKKMLYLEMNNLQPEDT | STRQKKY | QVTVSS | |
| | CETLE | | SIY | | ATYYCAA | | | |
| BAD00342.1 | EVQLVESGGG | FTFDLAD | MAWYIQPP | SEGV | TYYADAVKGRFTISRDNA | DMGGLWSEWGV | EYSGQGT | Camelus |
| | SVHAGGSLRLS | | GNECELVS | | KNTVYLPMNSLKPEDTA | PSSHCIDF | QVTVSS | |
| | CTTSG | | TIN | | MYYCAA | | | |
| BAD00344.1 | DVQLVESGGG | YTGSTGYC | IAWFRQAP | SSGGS | RYSADSVKGRFTLSQDN | RRYDCFATSWAY | NYWGQG | Camelus |
| | SVHAGGSLRLS | | GKEREGVA | | AKNTVYLHMNSLKPEDTA | EPAY | TQVTVSS | |
| | CAVSG | | TIN | | IYYCAA | | | |
| BAD00347.1 | EVQLVESGGG | YALGDVC | VGWFRQAP | TTYPT | TVTSDSVKGRFTISQDRIK | KSRFVKPCAPAS | TYWGQGT | Camelus |
| | SVQAGGSLRLS | | GKEREGVA | GGGA | NTVYLQMNSLNPEDTAM | DF | QVTVSS | |
| | CTTSN | | AIY | | YYCAA | | | |
| BAD00348.1 | DVQLVESGGG | FTIGHSV | MGWFRQAP | SDGR | TDYVDSVNGRFTVSRDN | LYLIPHLGAPVQC | GDWGQG | Camelus |
| | SVQAGGSLRLS | | GKECELVST | | ADNTIHLQMNSLKPEDTA | RRAF | TQVTVSS | |
| | CAASG | | IF | | VYYCAT | | | |
| BAD00350.1 | AVQLVESGGG | DIDRIRC | MAWFRQVP | TTNSY | TYYQDSVKGRFTISRDSA | ANRCTLGSWEGF | MYWGQG | Camelus |
| | SVQAGGSLRLS | | GKEREGVA | | GITLFLQMNSLQPEDTAM | | TQVTVSS | |
| | CVTAG | | GIL | | YYCEA | | | |
| BAD00351.1 | DVQLVESGGG | YTFCKYA | MTWYRQAP | SDGS | INYADSVKGRFTISQDNA | GFSPYCTDG | PYQGQGT | Camelus |
| | SVQAGGSLRLS | | GKDREFVS | | KNTVYLQMNSLKPEDTA | | QVTVSS | |
| | CAASG | | GIE | | MYYCKT | | | |
| BAD00352.1 | QVQLVESGGG | FTTACRY | MSWYRQAP | WDGS | TVYADSVKGRFTISQDNA | DSGSYRTFWCRD | VHWGQG | Camelus |
| | SVQAGGSLRLS | D | GKEREFVS | | KSTVYLQMNNLKPEDTA | DN | TQVTVSS | |
| | CSVSG | | SIH | | MYYCKI | | | |
| BAD00353.1 | QVQLVESGGD | YTIRPYC | MGWFRQAP | IGGTI | PFYADSVKGRFTISQDTA | RSGFCRREFEHD | DNWGQG | Camelus |
| | SVQAGGSLRLS | | GKEREGVA | | KNTVYLQMDSLLPKDTAI | AY | TQVTVSS | |
| | CAASG | | VMT | | YYCAA | | | |
| BAD00354.1 | EVQLVESGGG | VTNSRYS | IGWFRQAP | TGGM | TNYVTSVKGRFTISQDNA | GYRSYYRDYALL | NSWGQG | Camelus |
| | SVQAGGSLRLS | | EKEREAVA | | KNTVYLQMNSLKPDDTAI | SDGY | TQVSVSS | |
| | CVVSG | | AIN | | YYCAL | | | |
| BAD00355.1 | AVQLVESGGG | STYS | VAWFRQTP | TNHRV | KYYGDSVKGRFTISQDNT | KPSYQSGHWSVG | NFWGQGT | Camelus |
| | SVQDGGSLRLS | | GKEREGVA | | KSTVYLQMNSLKPEDTG | NLY | QVTVSS | |
| | CVVSG | | VIF | | MYYCAA | | | |
| BAD00356.1 | QVKLEESGGG | LMYREYY | MGWFRQAP | APSNS | AQYANSVKGRFTISRDKA | GRGRFRTGLDAV | DAWGQG | Camelus |
| | SVQAGGSLRLS | | GKEREGVA | | KNVMYLQMNNLKPEDTAI | EF | TQVTVSS | |
| | CAASG | | VIS | | YYCAQ | | | |
| BAD00357.1 | AVQLVESGGG | NIYS | MAWFRQAP | LGSII | QYYADSVKGRFTASQDR | REEYTPGHWAQT | HNWGQGI | Camelus |
| | SVQAGGSLRLS | | GKQREGVA | | DKRTMYLQMNSLEVEDT | STY | QVTVSS | |
| | CVASG | | TVY | | GVYYCAV | | | |
| BAD00360.1 | QVQLVESGGG | YTYRRIY | MAWFRQAA | RDIYTG | THYADSAKGRFTVSQDN | GPLYSGLWYRPS | EFWGQGT | Camelus |
| | SVQAGGSLRLS | | GKEREGIAA | HTN | AKTTVYLQMNSLEPEDTG | SY | QVTVSS | |
| | CVASG | | AY | | MYYCAA | | | |
| BAD00361.1 | QVQLVESGGG | RVYS | MAWFRQAP | PGSII | TYHADSLKDRFTASQDR | REYYSPGHWAVE | RNWGQGI | Camelus |
| | SVQAGGSLRLS | | GKQREGVA | | AKRTMYLQMNSLKVEDT | STY | QVTVSS | |
| | CVASG | | TVY | | GMYYCAV | | | |
| BAD00363.1 | QVQLVESGGG | NTWYS | VGWFRLAP | RGSFI | TYYADSVKGRFTISHDNA | KPVYKSGHWTDD | TYWGQGT | Camelus |
| | SVQAGGSLRLS | | GKEREGVA | | KNTVYLQMNSLKSEDTAI | RGY | QVTVSS | |
| | CVASA | | TIY | | YYCAS | | | |
| BAD00365.1 | QVQLVESGGG | LNYKGYY | IGWFRQAP | SPSNW | PEYANSVKGRFTISRDRA | GRGRFKTGLNAA | DAWGQG | Camelus |
| | SVQAGGSLRLS | | GKEREGVA | | ENIVDLQMNSLKPEETAIY | EY | TQVAVSS | |
| | CVVSG | | VIS | | YCAQ | | | |
| BAD00366.1 | QVQLVESGGG | RPECSYD | ISWYRQAP | TTGRT | TRYAEAVKGRFTISRDKA | EGATLICRDY | SYWGLGT | Camelus |
| | SVQAGGSLRLS | | GKEREFVA | SVDGR | KNTVYLQMNSLQPDDTA | | QVNVSS | |
| | CLRSG | | VIE | | MYYCHA | | | |
| BAD00368.1 | EVQLVESGGG | YVYS | TAWFRQTP | RDVGI | TYYADSMKGRFAISQDNP | KPTYQGGPWWK | NSWGQG | Camelus |
| | SVVAGGNLRLS | | GQEREGVA | | KNTVYLELHNLQPQDTA | PDGY | TQVTVSS | |
| | CVASG | | TIY | | MYYCAA | | | |
| BAD00369.1 | EVQLVESGGG | SVYS | MAWFRQAP | PGSRI | QYYADSVKDRFTASQDR | REEYAPGHWAQT | HNWGQGI | Camelus |
| | SVQAGGSLRLS | | GKQREGVA | | AKRTMYLQMNSLEVEDT | STY | QVTVSS | |
| | CVASG | | TVY | | GMYYCAV | | | |
| BAD00370.1 | AVQLVESGGG | NMNSWYS | MVWFRQAP | RDFDI | TYYADSVKGRFTISRDNT | KPVYQGGPWYDE | TYWGQGT | Camelus |
| | SVQAGGSLRLS | | GKEREGVA | | KNTVYLQMNNLKSEDTAI | AGY | QVTVSS | |
| | CVLSG | | TIY | | YYCAA | | | |
| BAD00372.1 | AVQLVDSGGD | YTGNSYC | LGWFRQPP | SGGP | NTYYADSVKGRFTIPQGS | ARLPEEGTCSNL | EYWGQGT | Camelus |
| | SVQAGGSLRLS | | GKEREWVA | | TRLVYLQMNSLKPEDTAI | RFSSDDF | QVIVSS | |
| | CVASG | | AKD | | YYCAA | | | |
| BAD00373.1 | AVQLVESGGG | RTYS | MAWFRQVP | TEASI | TYYAASVEGRFTISLDRT | RIVYNPGHWAQV | NTWGQGI | Camelus |
| | SVPAGGSLRLS | | DKEREGVA | | KSTVYLQMNSLKPEDSGI | STY | QVTVSS | |
| | CAASG | | TAY | | YYCAS | | | |
| BAD00374.1 | EVQLVESGGG | GTYS | TAWFRQAP | SVPGI | QYYADSVKGRFTVSRDN | KKSYGSGHWSMT | DYWGQG | Camelus |
| | SVQAGGSLRLS | | GREREGVA | | AKNTIYLQMNTLKPSDTA | SWY | TQVTVSS | |
| | CVASE | | VTY | | MYYCAA | | | |
| BAD00376.1 | EVPLVESGGGL | FSISSCC | MKWYRQAP | SAANT | LPYADFPVGRFAISRDGA | YCTSGGTCGPPN | NYRGQGT | Camelus |
| | VQAGGSLRLSC | | GKERELVS | YY | KNILYLQMNSLKPEDTAV | FN | QVTVSS | |
| | VASG | | SIT | | YYCAA | | | |
| BAD00377.1 | AVQLVESGGG | KTYC | MGWYRQA | PDYN | VRYYGTSVEGRFSISKGN | REEYGQCATSNR | SSWGQGT | Camelus |
| | SVQGGGSLTLS | | PGKEREGV | | NREVLLQMNSLKPEDTA | PNPDGF | QVTVSS | |
| | CVASG | | AVIY | | MYYCAA | | | |
| BAD00379.1 | AVQLVDSGGG | YSSVTFC | VGWFRQVP | SGGGS | VHYTDSVKGRFAISQDNG | AATNYGCDRLQY | NYWGQG | Camelus |
| | SVQAGGSLRLT | | GKERERVA | | ANTVHLVMNNLKPEDTAI | W | TQVTVSS | |
| | CAVSG | | TIN | | YYCAA | | | |
| BAD00380.1 | EVQLVESGGD | NSYS | MAWFRQAP | TDYNL | AYAADSVKGRFTISQDRA | RLQYGLGLHWSD | DYWGQG | Camelus |
| | SVQTGGSLRLS | | GKEREGVA | | KNTVYLQMNSLKPEDTA | TAAY | TQVTVSS | |
| | CVNSA | | TIY | | MYYCAT | | | |
| BAD00382.1 | DVQLVESGGG | SEYIYS | MAWFRQAP | AVADI | TYVADSVKDRFIISRENAE | RMAYSPDHWQS | QHWGQG | Camelus |
| | SVQAGGSLRLS | | GSPREGVA | | NTVALVMSDLKAEDSAM | SSAY | TQVTVSS | |
| | CTAST | | TIY | | YYCAA | | | |
| BAD00383.1 | QVQLVESGGG | KAYS | MAWFRQAP | TDVPG | TYYADDVKGRFAISQDRA | RLQYGKGLHWTN | NYWGQG | Camelus |
| | SVQAGGSLRLS | | GKEREGVA | V | KNTIYLQLNSLKPEDTGM | SDAY | TQVTVSS | |
| | CVNSV | | TIY | | YFCAT | | | |
| BAD00384.1 | QVKLEESGGG | YIFSNKN | MAWFRQAP | TGSGS | AYYADSVKGRFTISRDNA | DLSGRMRVSRVL | TYWGQGT | Camelus |
| | SVQAGGSLRLS | | GKEREGLA | | KNTVYLQMNSLKPEDTA | VATSY | QVTVSA | |
| | CATSG | | AIY | | MFFCAG | | | |
| BAD00386.1 | AVQLVESGGG | YIYSN | MGWFRQAP | TGAGT | TYYADSVKGRFTISRDNN | TRPYWSRSDYLD | NYWGQG | Camelus |
| | PVQAGGSLTLS | | GKEREGVA | | AKNMLYLHMNSLKPEDT | PRDY | TQVTVSS | |
| | CAASG | | ATN | | AIYYCA | | | |
| BAD00388.1 | AVQLVESGGG | YTYS | MGWFRQAP | TGGLR | TYYADSVKGRFTISRDNY | KDRRELIFRPSEA | NYWGQG | Camelus |
| | SVQAGGSLRLS | | GKEREGVA | | KNTVYLQMNSLKPEDTAI | GTY | TQVTVSS | |
| | CEASG | | AIS | | YYCAS | | | |
| BAD00391.1 | AVQLVESGGG | FTYSDSS | LAWFRQVP | TTSGD | TYHAASVKGRFTISQDKA | KRPWYGGTSEFF | NAWGQG | Camelus |
| | SVQAGGSLRLS | | GKEREGVA | | NHRVYLQMNSLKPEDTA | KEKNY | TQVTVSS | |
| | CAASG | | RIY | | MYFCAA | | | |
| BAD00393.1 | DVQLVESGGG | FTVSDCW | MNWFRQAP | GDGSR | TEYSESVKGRLTISKDNA | DPHDGFWFF | DHWGQG | Camelus |
| | LVQPGGSLRLS | | GKGLEWVS | | KNTLYLQMNTLRPDDTAV | | TQVTVSS | |
| | CAASG | | KIK | | YYCAR | | | |
| BAD00396.1 | EVQLVESGGG | NTFCSLD | MSWYRQAP | VGGGT | TNYADSVKGRFTISRDNA | VGL | GYWGQG | Camelus |
| | SVQAGESLRLS | | GKEREFVS | | KNTLYLQLNSLKTEDTAM | | TQVTVSL | |
| | CAASG | | NID | | YYCAN | | | |
| BAD00484.1 | EVQLVESGGG | YIGSFQC | VGWFRQSP | SDGAA | TYYADPVKGRFTISRDNA | WVLDYAM | DNWTKGT | Camelus |
| | SVQAGGSLRLS | | GKERELVS | | ELTLNLQMNSLKPEDTAV | | LVTISS | |
| | CAASG | | GIT | | YYCAN | | | |
| BAD00501.1 | AVQLVDSGGG | FTFSGTL | MSWFRQAP | TDGGN | TQYCDSVKGRFTISRDNA | AGGAFLPT | SFWGQGT | Camelus |
| | LVQPGGSLRLT | | GKGLEWVS | | KNTLFLQMNGLRPEDTA | | QVTVAS | |
| | CLASG | | GQH | | RYYCVI | | | |
| BAD00506.1 | QVQLVESGGD | FTFSSYD | MSWFRQAP | NRGSV | ADYLDSVKGRFTISRDNA | TASTTMYVPS | NYWGQG | Camelus |
| | LVPPGGSLRLS | | GKGLEWVS | | KNTLHLQMDGVQPEDTA | | TQVTVSS | |
| | CAASG | | GIW | | VYYCAT | | | |
| AAQ19976.1 | DVQLQASGGG | DLFSIVA | MGWYRQR | EGGG | TNYAYDVHGRFTISRDNA | LRGQYRRSEY | DYWGAGT | Lama |
| | LVQAGGSLRLS | | PGKQRELV | | KNTVYLQMNNPNPDDTA | | QVTVSS | |
| | CTASG | | AGIT | | VYYCNI | | | |
| AAQ19977.1 | DVQLQASGGG | SFSRFNV | VGWYRQAP | SGGS | TNYSPSVKGRFTISRDNA | VHTRVIIQQ | SYWGQGT | Lama |
| | LVQAGESLRLS | | GRQRELVA | | KNTVYLQLNSLKPDDTAV | | QVTVSS | |
| | CGGFG | | NMN | | YYCRY | | | |
| AAQ19978.1 | DVQLQASGGG | RSISTYG | MGRFRQTP | WSGGN | EYYADSVKGRFTISRDKS | RAIGNYGSRDED | GSWGQGI | Lama |
| | LVQAGDSLRLS | | GKEREFVA | | KNIVYLRMNSLKTEDTAV | F | QVTVSS | |
| | CTASG | | AIS | | YYCAA | | | |
| AAQ19979.1 | DVQLQASGGG | RMYTIND | MGWYRQA | VGGT | TNYKDSVKGRFTISRDNA | DIRDTLWDSR | LYWGQGT | Lama |
| | VVQPGGSLRLS | | PGNQRELV | | KKTVCLQMNSLKPDDTA | | QVTVSS | |
| | CAASG | | ARIS | | VYYCNA | | | |
| AAQ19980.1 | DVQLQASGGG | RTFSMYA | MAWFRQAP | WSGNT | TRYADSLKGRFIISRDNAA | RSRYSSDF | DQWGQG | Lama |
| | LVQAGASLRLS | | GKEREFVA | | KTVDLQMDKLKPEDTAAY | | TQVTVSS | |
| | CAASG | | AIN | | ICAD | | | |
| AAQ19981.1 | DVQLQASGGG | RTFTTGG | AAWFRQAP | RSGGG | TYYADSAKGRFIISRDNA | RRSVSWGAPSN | DYWGQG | Lama |
| | LVAVGDSLRLT | | GKEREFVA | | KNTGYLQMDSLKPEDTA | WYLTREY | TQVTVSS | |
| | CMASG | | AIS | | VYYCAR | | | |
| AAQ19982.1 | DVQLQASGGG | RIDTTYA | VAWFRQAP | WRGS | TYVANSVKDRFSVSRDN | KDVRGY | GYWGQG | Lama |
| | KVQAGDSLRLS | | GKEREFVA | | AKNTVYLQMNSLKPEDTA | | TQVTVSS | |
| | CAASE | | AIH | | VYYCYM | | | |
| AAQ19985.1 | DVQLQASGGG | RTFNTYV | VGWFRQAP | SSGGD | VHYASSVTGRFIMSRDDA | RNAYTFSALEHQ | PYWGQG | Lama |
| | TVQPGASLKLA | | GQGREFVA | | QNTEYLEMNGLKIEDTAV | Y | AQVTVSS | |
| | CKVSG | | TFS | | YYCAL | | | |
| AAL40827.1 | EVQLQASGGG | SLSRITV | MGWYRQA | SSGG | TDYADSVKGRFTISKDNA | KSRDSAGLSW | DYWGQG | Lama |
| | LVQPGGSLRLS | | PGKQRELV | | KALMYLQMTSLRPEDTAV | | TQVTVSS | |
| | CAASG | | AIIT | | YYCVG | | | |
| AAQ19988.1 | DAQLQASGGG | STSSINS | IGWYRQAP | GGGS | TVYADSVKGRFTTSSDKP | GTVPGRW | DYWGPGT | Lama |
| | LVHAGGSLRLS | | GKQRELVA | | KNIEYLQMNSLKPEDTAV | | QVTVSS | |
| | CAASG | | GFA | | YYCSA | | | |
| AAQ19989.1 | DVQLQASGGG | LTSRKYA | VGWFRQAP | WSGYS | HFYSEGARGRFTMSRDN | DPGVSEYALGLE | KYWGQGT | Lama |
| | SVQAGDSLTLS | | GQEREYIGT | | AKNTASLRMNSLKPSDTA | Y | QVTVSS | |
| | CAASG | | IS | | VYYCAA | | | |
| AAQ19990.1 | DVQLQASGGG | RTFSTYA | MGWFRQAP | WSGVS | TYYADSVKGRFTISRDNA | GSPL | NYWGQG | Lama |
| | LVQAGASLRLS | | GKEREFVA | | KNTVYLQMNSLKPEDTAV | | TQVTVSS | |
| | CAASG | | TIS | | YYCNV | | | |
| AAV66930.1 | QVKLQESGGG | GAFSTYD | LGWYRQAP | RGGHA | THYADSVEGRFTISRDNA | VGPPLRGWNLAY | HYWGQG | Lama |
| | LVQAGASLRLS | | GKEREFVA | | KNTMYLQMDSLSPEDTAI | | | |
| | CVDSG | | AII | | YYCNA | | | |
| AAV66932.1 | QVKLHSSGGG | SIFRITE | MGWYRQA | RDHS | TQYAESVTGRFTISRDVA | MHLTAVYVRQ | PVWGQG | Lama |
| | SVQPGGSLTLT | | PGSQREMV | | KNTVYLEMNNLKPDDTAV | | | |
| | CSASG | | AFVS | | YTCHA | | | |
| AAV66938.1 | QVQLQESGGG | ATFSINR | MGWYRQA | SRDD | TDYADSVKGRFTIWRDD | GAFIRLSRKTY | DYWGQG | Lama |
| | MVQLGGSLKLS | | PGKEREMV | | ANNTVYLQMVNVKAEDT | | | |
| | CVASG | | ARIT | | AIYYCNV | | | |
| AAV66950.1 | DVQLQASGGG | SIFSIGL | MRWYRQAP | SGGN | INYLNSVKGRVTISRDNA | EVRTTAVGSAF | AFWGQG | Lama |
| | LVQPGGSLSLS | | GKQREWIA | | KNTVYLQMNSLMPEDTA | | | |
| | CAASG | | TID | | VYVCNA | | | |
| AAV66951.1 | QVKLQQSGGG | LTFSTYD | WGWYRQA | WTGGS | LYYADSVKGRFTISRDNA | PIATQNP | ASWGQG | Lama |
| | LVQAGGSLRLS | | PGKGREPV | | KNTVYLQMNSLKPEDTAI | | | |
| | CAASG | | AVID | | YYCNA | | | |
| AAV66952.1 | QVKLQESGGR | RTFSTYD | MGWYRQA | SSGSS | TYYADSVKGRFTISRDNA | ELQRLNP | GSWGQG | Lama |
| | LVQAGGSLRLS | | PGKEREVV | | KNTVYLQMNSLKPEDTAI | | | |
| | CAASG | | AVIS | | YYCNA | | | |
| ABC47604.1 | GGGLVQAGGS | RTFYNYA | MGWFRQAP | WSGGS | TLYTDSVKGRFTISRANG | DADAQPMGIIENY | DYWGQG | Lama |
| | LRLSCAASG | | GKEREFVA | | QNTVYLQMNSLKPEDTA | | | |
| | | | AIS | | VYYCAA | | | |
| ABQ52434.1 | EVQLVESGGGL | SIFSLT | MGWYRQA | PGGD | TNYADFVKGRFTISRDNA | RTRNWG | TVWGQGT | Lama |
| | VQPGGSLRLSC | | PGKERELVT | | RSIIYLQMNSLKPEDTAVY | | QVTVSS | |
| | SFPG | | SAT | | YCYA | | | |
| ABQ52435.1 | EVQLVESGGEL | LTFSSYN | MGWFRRAP | WSGRD | TFYADSVKGRFTISRDNA | NPWPVAAPRSG | TYWGQGT | Lama |
| | VQAGGSLRLSC | | GKEREFVA | | KNTVYLQMSSLKPEDTAV | | QVTVSS | |
| | AASG | | SIT | | YYCAA | | | |
| ABQ52436.1 | EVQLVESGGGL | SIFSFA | MSWYRQAP | SDDR | VTYADSVKGRFTISRDNIK | QTDLRDWTVR | EYWGQGT | Lama |
| | VQPGESLTLSC | | GKERELVA | | RTAGLQMNSLKPEDTAV | | QVTVSS | |
| | VVAG | | RIG | | YYCNA | | | |
| ABQ52437.1 | EVQLVESGGGL | SIFTFA | MSWYRQAP | TDDE | TMYKDSVKGRFTISRDNV | RTDYRDWTVR | EYWGQGT | Lama |
| | VQPGGSLTLSC | | RKERELVA | | KRTAGLQMNNLKPEDTA | | QVTVSS | |
| | VAAG | | RIG | | VYYCNA | | | |
| ABS29543.1 | EVQLVESGGGL | VTFTPYQ | MGWYRQA | TGGSR | TNYADFAKGRFTISRDDV | YYAMIGHA | RNWGQG | Lama |
| | VQAGGSLRLSC | | PGKQRALV | | KNTVYLQMNNLKPEDTA | | TQVTVSS | |
| | TSST | | ADIS | | VYYCNT | | | |
| ABS29544.1 | EVQLVESGGG | LTFTPYR | MAWYRQAP | SGDGR | TNYADFAKGRFTISRDNIK | FVSFVGIA | RSWGQG | Lama |
| | FVQAGESLTLS | | GKQRDLVA | T | NTVFLRMTNLKPEDTAVY | | TQVTVSS | |
| | CTSST | | DIS | | YCNT | | | |
| ABS29545.1 | EVQLVESGGGL | LTFTPYR | MGWYRQA | GGDGR | TNYADFAKGRFTISRDNV | YVAIVGHA | RSWGQG | Lama |
| | VQAGDSLTLTC | | PGKQRDLV | T | KNAVYLQMNNLKPEDTAI | | TQVTVSS | |
| | TSPT | | ADIS | | YYCNT | | | |
| ABS29546.1 | EVQLVESGGGL | LTFTPYR | MGWYRQTP | PGDGS | KNYAGFAQGRFTISRDNI | YVAFVGRA | RTWGQGT | Lama |
| | VQAGGSLTLSC | | GKQRDLVA | T | KNTVYLQMNDLKPEDTA | | QVTVTS | |
| | TSST | | DIS | | VYYCNT | | | |
| ABS29547.1 | EVQLVESGGGL | IDFNLNA | MGWFRQAP | SADT | TNYRDFVKGRFTISINDAK | PFPTPSH | YHWGQG | Lama |
| | VQPGGSLRLSC | | GKQRELVA | | NTLYLQMDSLKPEDTAVY | | TQVTVSS | |
| | QFSG | | AIT | | YCNT | | | |
| ABX79392.1 | QVKLEESGGGL | RDFSDYV | MGWFRQAP | RNGLT | TRYADSVKGRFTISRDND | NSAGTYVSPRSR | DYWGQG | Lama |
| | VQAGDSLRVS | | GKEREFVA | | KNMVYLQMNSLKPEDTA | EY | TQVTVSS | |
| | CAASG | | AIS | | VYYCAV | | | |
| ABX79398.1 | QVQLVESGGG | RDFSDYV | MGWFRQAP | RNGIT | TRYADSVKGRFTISRDND | NSAGTYVSPRSR | DYDGWG | Lama |
| | LVQAGDSLRLS | | GKEREFVA | | KNTVYLQMNSLKPEDTAV | | QGTQVTV | |
| | CVDSG | | AIS | | YYCAT | | | |
| ABX79396.1 | QVQLVESGGG | GTFSSYA | MGWFRQAP | GRSSI | RNYDDSVKGRFAISRDSA | DTVFRSFVVGNV | KEWGQGT | Lama |
| | LVQAGGSLTLS | | GKEREFVA | | KNTVYLQMNSLKPEDTAV | | QVTVSS | |
| | CAASG | | AIS | | YYCAA | | | |
| ABX79402.1 | QVQLVESGGG | SIFSLDA | WGWYRQA | SDGS | TSYADSVKGRFTISRDNA | RFQSLY | NSWGQG | Lama |
| | LVQPGGSLRLP | | PGKQREMV | | NNTFYLQMNSLKPEDTAV | | TQVTVSS | |
| | CAASG | | ALVG | | YYCYA | | | |
| ABX79400.1 | QVKLEESGGGL | SIFDIDA | WGWYRQA | STGS | TSYADSVKGRFTLSRDNV | RFDSLY | NSWGQG | Lama |
| | VQPGGSLRLSC | | PGKQREMV | | NNTMYLQMNSLRPEDTA | | TQVTVSS | |
| | AASV | | ALVG | | VYYCYA | | | |
| ABX79401.1 | QVKLEESGGGL | LPFGINA | IGWYRQGP | SDGR | TILEDSVKGRFTISRDNAK | EKGGSP | LYWGQGT | Lama |
| | VQVGGSLRLSC | | GNQRDLVA | | KTVYVQMNNLKPEDTAV | | QVTVSS | |
| | AHSG | | RIT | | YYCAA | | | |
| ACD81985.1 | QVQLEESGGG | RTSSNTF | VGWFRQAP | RSDDR | TYYAASVRGRFTISGDSA | TRTWLVTGQSDY | PYWGQGT | Lama |
| | LVQAGGSLRLS | | GKEREFVA | | KNVVALQMSSLRPEDTA | | QVTVSS | |
| | CAASG | | AIR | | VYYCAA | | | |
| ACG68627.1 | EVQLQASGGG | GTLSDYH | VGWFRRPP | WSGG | TSYTNSVKGRFIISRDNEK | KYRDGERPY | DYWGQG | Lama |
| | LVQAGDSLRLS | | GKERERVA | M | NIVYLQMTRLKPEDTAVY | | TLVTVSS | |
| | CEAAR | | AIS | | YCAA | | | |
| ACG68622.1 | EVQLQASGGG | RTFSSYD | MGWFRQAP | RSGTV | LAYADSVKGRFTISRDNV | DRWENIRRGSV | RSWGQG | Lama |
| | LVQAGGSLRLS | | GKEREFVA | | KNTGYLQMNSLKPEDTA | | TLVTVSS | |
| | CAASG | | VIS | | VYYCAT | | | |
| ACG68628.1 | EVQLQASGGG | GTLSDYH | VGWFRQPP | WSGG | TSYTNSVKGRFIISRDNAK | KYRDGERPF | DYWGQG | Lama |
| | LVQAGDSLRLS | | GKERERVA | M | NIVYLQMTRLKPDDTAVY | | TLVTVSS | |
| | CEAAR | | AIS | | FCAA | | | |
| ACG68629.1 | DVQLQASGGG | HTFSEIG | MGWFRQAP | WSGTS | TYYADSVKGRFTISRDNA | RIQARFLDSSAF | DYWGQG | Lama |
| | LVQPGGSLKLS | | GKVREFVA | | KNTMFLQMNTLRPDDTA | | TQVTVSS | |
| | CAASG | | SIS | | VYYCAA | | | |
| ACG68631.1 | EVQQASGGGL | RTETTSA | IAWFRQAP | ASGLG | INYSGTVKGRFTISRDAD | GFHYIAAIRRTTDF | HFWGPGT | Lama |
| | VQAGGSLRLSC | | GKEREFVA | | KTTVYLQMNSLTPEDTAV | | LVTVSS | |
| | AASG | | QIS | | YYCAA | | | |
| ACG68632.1 | EVQLQASGGG | GTLSDYH | VGWFRRPP | WSGG | TSYTNSVKGRFIISRDNEK | KYGGGERPY | DYWGQG | Lama |
| | LVQAGDSLRLS | | GKERERVA | M | NIVYLQMTRLKPEDTAVY | | TQVTVSS | |
| | CEAAR | | AIS | | YCAA | | | |
| ACJ09035.1 | GGGLVQAGGS | RTFSSYI | MAWFRQAP | WGGD | TYYADSVKGRFTVSRHN | NDNYCSGYGCYD | DYWGPG | Lama |
| | LRLSCVASG | | GKEREFVA | | AKNTVYLQMNSLKPEDA | YMGY | | |
| | | | ASS | | AVYYCAE | | | |
| ACN89786.1 | QVQLQDSGGG | RTFSSYA | MGWFRQPP | RSGS | AIYAYPVKGRFTMSRDNA | ARSGVPSSRPTD | DYWGQG | Lama |
| | LVQAGGSLRLS | | GKEREWVS | | KNTVYLEMNSLKPEDTAV | Y | TQVTVSS | |
| | CEASG | | TIS | | FYCAA | | | |
| AFN61318.1 | QVQLVQSGGG | RTFSSYA | MAWFRQAP | WSGAN | IYVADSVKGRFTISRDNA | KLGFAPVEERQY | DYWGQG | Lama |
| | LVQAGGSLRLS | | GKEREFVA | | KDTVYLQMNSLKPEDTAV | | TQVTVSS | |
| | CAASG | | AIS | | YYCAV | | | |
| AFN61319.1 | QVQLVQSGGG | SFFSINV | MGWYRQA | SDGN | TNYADSVKGRFTISRDNA | RIWSGL | DYWGQG | Lama |
| | LVQPGGSLRLS | | PGKERESV | | KNAVYLQMNSLKPEDTA | | TQVTVSS | |
| | CTASG | | AVIT | | VYFCNA | | | |
| AGH30286.1 | EVQLQASGGG | RTSSMYS | MVWFRQAP | WTSSL | TYYADSLKGRFTISRDNA | DTKTGGGGY | EYWGQVT | Lama |
| | LVQAGGSLRLS | | GKEREFVA | | KNTVYLQMNSLKPEDTAI | | VTVSS | |
| | CAASG | | GII | | YYCAA | | | |
| AGH30281.1 | EVQLQASGGG | SIFSSDV | MGWFRQAP | DDGG | TNYADSVKGRFTISRDNA | RYYSGGYR | NYWGQVT | Lama |
| | LVQPGGSLRLS | | GKERELVAF | | ENTVSLQMNSLKPEDTAV | | VTVSS | |
| | CAASG | | IT | | YYCNA | | | |
| AGH30284.1 | DVQLQASGGG | SIFSSDV | MAWFRQAP | DDGG | TNYADSVKGRFTISRDGA | RYYSGTYR | SYWGQGT | Lama |
| | LVQPGGSLRLS | | GKERELVA | | KSMVSLQMNSLKPEDTA | | QVTVTV | |
| | CAASG | | MIT | | VYYCNA | | | |
| AGH30289.1 | EVQLQASGGG | PTYDSYG | MAWFRQGP | LSHST | TYYADSVKGRFTISRGNA | GNLRIAVPPSSVG | DYWGQG | Lama |
| | LVQAGGSLRLS | | GQGREFVA | | ENTVYLQMNSLKPEDTAV | Y | TQVTVTV | |
| | CAASG | | AIS | | YTCAI | | | |
| AGH30297.1 | DVQLQASGGG | NIDTIDV | MGWYRQA | SQGS | TNYADSVKGRFTISRDNA | WILSTDHSYK | HYWGQG | Lama |
| | LVQAGGSLRLS | | PGKQRELV | | KNTVYLQMNNLEPEDTA | | TQVTVTV | |
| | CAASG | | ADIT | | VYYCAQ | | | |
| AGH30295.1 | EVQLQASGGG | NINTIDV | MGWYRQA | RLAS | ANYADSVKGRFTISRDNA | WILSTDHSYM | HYWGQG | Lama |
| | LVQAGGSLRLS | | PGKQRELV | | KNTVYLQMNNLEPKDTA | | TQVTVTV | |
| | CAASG | | ADIT | | VYYCAQ | | | |
| AGH30293.1 | EVQLQASGGG | RTDSTYA | MAWFRQAP | YTGGT | THYADSVKGRFTISRDVA | KRSSWYRPFGVD | GSWGQG | Lama |
| | LVQAGGSLRLS | | GKEREFVA | | KDIMYLQMNSLKPEDTAV | EF | TQVTVTV | |
| | CAASG | | AIT | | YYCAE | | | |
| AGH30294.1 | DVQLQASGGG | PIYESYG | MAWFRQGP | LSSST | TYYGDSVKGRFTISRDNA | GNLRIAVPPTSVG | DYWGQG | Lama |
| | LVQAGGSLRLS | | GQGREFVA | | QNMVYLQMNSLKPEDTAI | Y | TQVTVTV | |
| | CAASG | | AIH | | YFCAI | | | |
| AGH30298.1 | EVQLQASGGG | GTFSNPS | MGWFRQAP | WSAGS | TYYADSVKGRFTISRDNA | TYYNGEYYLLRAD | QHWGQG | Lama |
| | LVQAGGSLRLS | | GKEREFVA | | KNTVDLRMTSLKPEDTAV | RY | TQVTVTV | |
| | CAASG | | AVS | | YYCSA | | | |
| 4wem_B | QVQLQESGGG | NVDRIDA | MGWFRQAP | EGGI | LNYGDFVKGRFTISRDNA | SHWGTLLIKGI | EHWGKGT | Lama |
| | LVQAGGSLRLS | | GKQREFVG | | KNTVYLQMSNLKSEDTG | | QVTVSS | |
| | CEASG | | YIS | | VYFCAA | | | |
| 4wen_B | QVQLQESGGG | SISSINA | MGWYRQA | NTGV | TEFADSVKGRFTISRDNA | TDWGTLLIKGI | DHWGKGT | Lama |
| | LVQPGGSLRLS | | PGSKREFV | | KTTVDLQMNSLKPEDTAV | | QVTVSS | |
| | CTASG | | AHIT | | YYCAA | | | |
| 4weu_E | QVQLQESGGG | LTFDTYA | MGWFRQAP | WTGIS | TYYADIAKGRFTISRDNAK | QKSLNVPAPW | DYWGQG | Lama |
| | LVQAGGSLRLS | | GKKREYVA | | NTLYLQMDSLKPEDTAVY | | TQVTVSS | |
| | CAASG | | AIS | | YCAA | | | |
| AGN90987.1 | QVQLQESGGG | LTFDTYA | MGWFRQAP | WTGIS | TYYADIAKGRFTISRDNAK | QRSLNVPAPW | DYWGQG | Lama |
| | LVQAGGSLRLS | | GKKREYVA | | NTLYLQMDSLKPEDTAVY | | TQVTVSS | |
| | CAASG | | AIS | | YCAA | | | |
| 4b41_B | EVQLVESGGGL | SIISNNA | MGWYRQA | SGGR | TTYADSVKGRFTISRDNA | ASLVRGPL | DHWGQG | Lama |
| | VQPGGSLRLSC | | PGKQRELV | | KTTVYLQMNSLKPEDTAV | | TQVTVSS | |
| | AASR | | ARIS | | YYCNA | | | |
| 4b5e_B | EVQLVESGGGL | RSFSRDA | MGWFRQAP | LNGGR | TYSADSVKGRFTISRDND | REGDVGLVSYKR | PYWGQGT | Lama |
| | VQAGGSLRLSC | | GKERDVVA | | KNTVYLQMSNLKPEDTAV | SSNY | QVTVSS | |
| | AASG | | AIN | | YYCAA | | | |
| 5h8o_A | QVQLQESGGG | FTFSRYA | MSWYRQAP | SGGGT | IYYADSVKGRFTISREDAK | G | GFWGQG | Lama |
| | LVQPGGSLKLS | | GKERESVA | | NTVYLQMNSLKPEDTAVY | | TQVTVSS | |
| | CAASG | | RIS | | YCYV | | | |
| AHA50077.1 | EVQLQASGGG | RTFSDLS | MGWFRQAP | WSVGT | TYYADSVKGRFTISRDNA | TYYTGEYYLLQAD | QHWGQG | Lama |
| | LVQAGGSLRLS | | GKEREFVA | | KNTVDLQMISLKPEDTAV | RY | TQVTVTV | |
| | CAASG | | AVS | | YYCSA | | | |
| AHA50078.1 | EVQLQASGGG | RTFSDLS | MGWFRQAP | WSVGT | TYYADSVKGRFTISRDNA | TYYTGEYYLVQA | DRYQHW | Lama |
| | LVQAGGSLRLS | | GKEREFVA | | KNTVDLQMISLKPEDTAV | | GQVTVTV | |
| | CAASG | | AVS | | YYCSA | | | |
| AHA50079.1 | EVHLQASGGG | RTFSDLS | MGWFRQAP | WTPGT | TYYADSVKGRFTISRDNA | TYYTGEYYLVQA | QHWGQG | Lama |
| | LVQEGGSLRLS | | GKEREFVA | | KNTVDLQMISLKPEDTAV | DRY | TQVTVTV | |
| | CAASG | | AVS | | YYCTA | | | |
| AHH24256.1 | QVKLEESGGGL | LTFRNFH | MAWFRQVA | WSRDR | QYYPDPVKGRFTITRDNA | RTASASGDWYKG | QYWGQG | Lama |
| | VQAGGSRRLS | | GKEREVVA | | KNTVYLQMNSLKPEDTAV | SY | TQVTVSS | |
| | CATSG | | AIS | | YYCAA | | | |
| AHH24257.1 | QVKLEESGGGL | STFSINA | LGWYRQAP | SDGT | VYYTDSVKGRFTISRDNA | AGKRIGSDGSIWF | GSWGQG | Lama |
| | VQAGGSLRVS | | GKARELVA | | KNTVSLQMSSLKPEDTAV | AVASF | TQVTVSS | |
| | CTASV | | AIG | | YYCNA | | | |
| AHY24762.1 | QVQLVESGGG | RTFSTST | LGWFRQAP | WLGGR | TNYADSVKGRFTISRDSA | RRLGV | DYWGQG | Lama |
| | LVQAGGSLRLS | | GKEREFVA | | KNTLFLQLNSLKPEDTAV | | TQVTVSS | |
| | CAASG | | AIS | | YYCYA | | | |
| AHY24764.1 | QVQLVESGGG | SIFRFYA | MGWYRQA | RGGI | TNYADSVKGRFTISRDNA | VGPLGSTP | REWGQG | Lama |
| | LVQPGASLRLS | | PGKQRELV | | KNTVYLQMNSLKPEDTAV | | TQVTVSS | |
| | CAASR | | ASIT | | YYCNR | | | |
| AHY24765.1 | QVQLVESGGG | SIFRFYA | MGWYRQA | RGGI | TNYADSVKGRFTISRDNA | RRIGR | DYWGQG | Lama |
| | LVQPGGSLRLS | | PGKQRELV | | KNTVYLQMNSLKPEDTAV | | TQVTVSS | |
| | CAASR | | ASIT | | YYCYA | | | |
| AKQ22868.1 | EVQLVESGGGL | RTFSRTS | MGWFRQAP | WGRGS | TYYADSVKGRFTISRDNA | GQEGFYTLVPRN | SYWGQGT | Lama |
| | VQAGGSLRLSC | | GKEREFVA | | KNTVYLQMNSLKPEDTAV | SRNW | QVTVSS | |
| | AASG | | AIN | | YYCAA | | | |
| AKQ22869.1 | EVQLVESGGGL | FTVDNYA | IGWFRQAP | SGGW | KFYPDSMKGRFSISRDNA | DLTNHCGNYDKG | GSWGQG | Lama |
| | VQPGGSLRLSC | | GKEREGVS | | KNTVYLQMNSLKPQDTA | F | TQVTVSS | |
| | AASG | | CIS | | VYYCGT | | | |
| AKQ22870.1 | EVQLVESGGGL | NSLRIGT | MAWYRQAP | SGGS | IDYTDSVKGRFTISRDNA | RSYYSASGAMYT | VIWGQGT | Lama |
| | VQPGGSLRLSC | | GKQREMVA | | KNTVFLQMNSLKPEDTAV | | QVTVSS | |
| | AASG | | TVT | | YYCYA | | | |
| ARG41544.1 | EVOLVESGGGL | RTFSTYP | MAWFRQAP | RGGIT | SYYADSVKGRFTISRDNA | YKASATAYTRGR | VHWGQG | Lama |
| | VQAGGSLRLSC | | GKEREFVA | | KNTVYLQMNSLKPEDTAV | PDEI | TQVTVSS | |
| | AASS | | TIS | | YYCAQ | | | |
| ARG41545.1 | EVQLVESGGG | RYH | MGWFRQAP | SSGGS | TSYADSVKGRFTISRDSA | RSGLWMATSTQG | DYWGQG | Lama |
| | TVKAGGSLRLS | | GKEREFVT | | KSTVYLQMNSLKPEDTAV | HY | TQVTVSS | |
| | CAAPR | | AIS | | YFCAA | | | |
| ARG41546.1 | EVQLVESGGGL | FSLDNYG | IGWFRQAP | STSLT | RYYAASVKGRFTISRDNS | TDRWPGIEWYRG | DNWGQG | Lama |
| | VQPGGSLRLSC | | GKEREGVS | | KNTVYLQMNSLNPEDTA | EY | TQVTVSS | |
| | AASG | | YIS | | VYYCAS | | | |
| ATN23974.1 | QVKLQESGGG | AFFRAGP | MGWYRQA | RDRT | TDYADSVKGRFTISRDDA | LGT | GFFGQGT | Lama |
| | SVQEGGSLRLS | | PGRQRDLV | | KNTVYLQMNSLKSEDTAV | | QVTVSS | |
| | CAASG | | ALIR | | YFCNP | | | |
| ARG41548.1 | EVOLVESGGGL | RTFRSDV | MGWFRQAP | ENGDIL | TRFEGSAKGRFTISRDNA | RWGTITTVSHQY | HFWGQGT | Lama |
| | VQAGGSLRLSC | | GRGREFVA | | NDTVYLQMSSLKPEDTAI | | QVTVSS | |
| | APSE | | AIA | | YYCAA | | | |
| ARG41549.1 | EVQLVESGGGL | PTFSDYA | MAWFRQAR | WIGGS | TYYADSVKGRFTISRDSA | ARLGTYYGSYIRA | EYWGQGT | Lama |
| | VQTGGSLRLSC | | GKEREFVA | | KDTMYLQMNTLKPEDTA | YFNRGRY | QVTVSS | |
| | ARSG | | SIT | | DYYCAI | | | |
| ARG41551.1 | EVQLVESGGGL | RIFSVYR | VGWFRQAP | NRNGA | TFYADSVKGRFTISRDSA | RDQGTTEY | HYWGQG | Lama |
| | VQAGGSLRLSC | | GKEREIVAS | S | KNTVYLQMRSLRPEDTA | | TLVTVSS | |
| | AASG | | IN | | VYYCAA | | | |
| ARG41553.1 | EVQLVESGGGL | RYP | MGWFCQAP | RSGAS | TYYADSVKGRFTIARDSA | KENYYGDYGLAQ | DYWGQG | Lama |
| | VQAGGSLRLSC | | GGEREFVA | | KNTVYLEMNSLKPEDTAV | NY | TQVTVSS | |
| | AASG | | AIS | | YYCAA | | | |
| ARG41554.1 | EVQLVESGGGL | SSTYE | MGWFRQAP | WNGG | TYYADSVKGRFTISRDNA | AYGLRDAFRMYR | PYWGQGT | Lama |
| | VQAGGSLRLSC | | GKEREFVA | R | KMTVYLQMNSLKPEDTA | SEY | QVTVSS | |
| | AASG | | GIN | | AYYCSA | | | |
| ARG41555.1 | EVQLVKSGGGL | RTFSSYA | MGWFRQAP | WNGG | TYYADFVKGRFTISRDNA | GHLTSTGVLHPA | DYWGQG | Lama |
| | VQVGGSLRLSC | | GKERELVA | R | KNTVYLQMNSLKPEDTAV | DYYNWDEY | TQVTVSS | |
| | AASG | | AIN | | YYCAA | | | |
| ARG41556.1 | EVOLVESGGGL | RYV | MGWFRQAP | RSGGS | TTYADSVKGRFTISRDSA | WSYYGVAYTSTT | DYWGQG | Lama |
| | VQAGGSLRLSC | | GQEREFVT | | ENTVYLQMNSLKPEDTAV | SF | TLVTVSS | |
| | ATSG | | SIS | | YYCAA | | | |
| ARG41557.1 | EVQLVESGGGL | FTLDYYA | IGWFRQAP | SSDGS | TYYADSVKGRFTISRDNA | DLKRRCRDYARP | DYWGQG | Lama |
| | VQPGGSLRLSC | | GKEREGVS | | KNTVYLQMNSLKPEDTAV | QRGN | TQVTVSS | |
| | AASG | | CIS | | YYCAT | | | |
| ARG41559.1 | EVQLVESGGAL | RTFSHYA | MGWFRQAP | WDGDS | TSYANSLKGRFTISRDNA | GPNFSTLARRY | DYWGQG | Lama |
| | VQAGDSLRVS | | GKQREFVA | | KNTGYLYMNSLIPEDTAV | | TLVTVSS | |
| | CVASG | | AIS | | YYCAA | | | |
| ARG41560.1 | EVQLVKSGGGL | RVA | MGWFRQPP | ASGAT | KYYADSVKGRFTIFRDNA | RLRWDSDYTSGG | DYWGQG | Lama |
| | VQAGGSLRLSC | | GKEREFVA | | NTTVYLQMNSLKPEDTAV | RY | TQVTVSS | |
| | AASG | | AIS | | YYCAA | | | |
| ARG41562.1 | EVQLVESRGGT | RTFSNYA | AGWFRQAP | AKGGV | TYYVDFVKGRFTISRDNA | DGSYGTILATIAEN | KDWGQG | Lama |
| | VQAGGSLRLSC | | GKEREFVA | | KNTVYLQMNSLKPEDTAV | SRISLL | TLVTVSS | |
| | AASG | | GIS | | YYCAA | | | |
| ARG41563.1 | EVQLVESGGG | RIA | MGWFRQAP | ASGGS | TEYADSVKGRFTISRDSS | RLWNQREY | PYWGQGT | Lama |
| | FVQAGGSLRLS | | GKEREFVA | | KSTAYLQMNSLKPEDTAV | | QVTVSS | |
| | CAASV | | RIS | | YYCAA | | | |
| ARG41564.1 | EVQLVESGGGL | RISSTYR | MGWFRQAP | WSGG | VLYTDSVKGRFTISTDNG | RNYGTTEY | GYWGQG | Lama |
| | VQAGGSLRLAC | | GKEREFVA | G | KNMVYLQMNSLRPEDTA | | TQVTVSS | |
| | AASG | | ASR | | VYYCAG | | | |
| ARG41565.1 | EVQLVESGGGL | LTFSDYA | MGWFRQAA | WGGR | TYYGDFAKGRFTISRENS | KRGMADIAYTHAT | DYWGQG | Lama |
| | VQTGGSLRLSC | | GKEREFVG | H | KNTVYLQMNSLKPEDTAV | SY | TQVTVSS | |
| | AASG | | VIS | | YTCAR | | | |
| ARG41566.1 | EVQLVESGGGL | RYA | MGWFRQAP | KSGGS | TYIADSVKGRFTISRHNAK | NGFLGTSGRRVD | DYWGQG | Lama |
| | VQAGGSLRLSC | | GKEREFVG | | STAYLQMNNLRPEDTAV | QY | TQVTVSS | |
| | AASG | | VIS | | YYCAA | | | |
| ARG41567.1 | EVQLVESGGGL | FTLDNHA | IGWFRRAP | SSSGT | TAYADSVEGRFTISRDNA | RFQGGFLGCTFA | GYWGQG | Lama |
| | VQPGGSLRLSC | | GKERERIGC | | KNTVYLQMNSLKPEDTAV | PQTF | TQVTVSS | |
| | AASG | | IS | | YYCAA | | | |
| ARG41568.1 | EVQLVESGGGL | RYV | MGWFRQAP | RSGGS | TNYADSVKGRFSVSRDS | SNRYGTNVLVTTA | DYWGQG | Lama |
| | VQAGGSLRLSC | | GKEREFVA | | AKNTVYLQMNDLKPEDT | LY | TQVTVSS | |
| | EASG | | VIS | | AVYYCAA | | | |
| ARG41569.1 | EVQLVESGGGL | RTFSVYP | MGWFRQAP | RRGAI | SYYQDSVKGRFTISRDSA | YKASSSSYTRGR | VYWGQGT | Lama |
| | VQAGGSLRLSC | | GKEREFVA | | NDTVYLQMNSLRPEDTA | PDEI | QVTVSS | |
| | AASG | | TIS | | VYYCAQ | | | |
| ARG41570.1 | EVQLVESGGGL | GIFDNYA | MGWIRQAP | WSESS | TYYAASVKGRFTISRDNA | WFWISSTWSYFS | NYRGPGT | Lama |
| | VQAGGSLRLSC | | GKEREFVA | | KNTVYLQMNSLKPEDTAV | ENEP | LVTVSS | |
| | AASG | | GIR | | YSCAA | | | |
| ARG41574.1 | EVQLVESGGGL | IYFRLYT | MNWYRQAL | NDGS | TNYGASIKGRFTISRDNA | H | DYWGQG | Lama |
| | VQAGGSLRLSC | | GKQREYVA | | KNTVYLQMNNLNPEDTA | | TQVTVSS | |
| | VVSG | | MIT | | VYYCNA | | | |
| ARG41575.1 | EVQLVESGGG | RYR | MGWFRQAP | ASGGS | TYYADSVKGRFTIARDNA | KVNYYGDYDLAQ | DYWGQG | Lama |
| | SVQAGGSLRLS | | GKEREFVA | | KTMVYLQMNSLKPEDTA | NY | TQVTVSS | |
| | CAASG | | VIS | | VYYCAA | | | |
| ARG41576.1 | EVQLVESGGGL | SIFSVNA | MGWYRQA | SGRS | PAYADSVKGRFTISRDNA | KGEYYSRSQY | NVWGQG | Lama |
| | VQPGGSLRLSC | | PGKQRELV | | ENTVYLQMNSLKPEDTAV | | TQVTVSS | |
| | AASG | | ASMV | | YYCNI | | | |
| ARG41577.1 | EVQLVESGGGL | RSFSGDT | MGWFLQAP | WSSRS | TNYADSVKGRFTISRDNA | GPPSPYIYSRPDL | TYWGQGT | Lama |
| | VQAGGSLRLSC | | GKEREFVA | | KNTVYLQMNTLKPEDTAV | Y | QVTVSS | |
| | AASG | | GIN | | YYCAA | | | |
| ARG41578.1 | EVQLVESGGG | RVA | MGWFRQAP | ASGGS | SSYADSVKGRFTISRDSA | RARTLGWVSADV | DYWGQG | Lama |
| | SVQAGGSLRLS | | GKEREFVA | | KSTVYLQMNSLEPEDTAV | SAY | TQVTVSS | |
| | CAASG | | AIS | | YYCAA | | | |
| ATN23917.1 | KVKLQESGGG | SAFSINS | MYWYRQAP | SAGA | TTYASSLKDRFTISRDNA | GG | STWGQGT | Lama |
| | AVEIGGSLRLS | | GKVREVVA | | KNTVYLHMSSLKVEDTAV | | QVTVSS | |
| | CVASG | | MIT | | YYCDA | | | |
| ARG41580.1 | EVQLVESGGGL | NFFNIIT | MGWFRQAP | AGRS | ISYLDSVKGRFTIVRDNAK | TGHRSVTGGIY | VTWGQGT | Lama |
| | VQAGGSLRLTC | | GKERELVA | | NTVILEMNSLTPEDTAVY | | LVTVSS | |
| | AASG | | VDT | | YCYA | | | |
| ARG41582.1 | EVQLVESGGGL | RAFSSYA | MGWFRQAP | GRGGV | TYYAASVKGRFTISRDNA | GPNIGVLTDPAYS | GDWGQG | Lama |
| | VQAGGSLRLSC | | GKEREFVA | | KNTVLLQMSSLKPEDTGV | G | TLVTVSS | |
| | AASG | | VIS | | YYCAA | | | |
| ARG41583.1 | EVQLVESGGGL | RSFGSYH | MGWFRQAL | SGGGL | LDYEDSVKGRFTISRDNA | TARVWGSWFTSD | DYWGQG | Lama |
| | VQAGGSLRLSC | | GKEREFVA | | KNTVYLQMNSLTPEDTAV | Y | TLVTVSS | |
| | AASG | | AIS | | YYCAA | | | |
| ARG41584.1 | EVQLVESGGGL | RAYRNYV | MGWFRQG | PDDGS | ILSSNSVRGRITISSDNAK | GTTPSMLARKY | DYWGQG | Lama |
| | VQAGGSLRLSC | | PGKEREFV | | NTVYLQMSTLAPEDTAIY | | TLVTVSS | |
| | VASG | | ATIR | | YCAY | | | |
| ARG41587.1 | EVQLVESGGGL | RTFSTYA | LGWFRQAP | GRGGT | TYYAGSVKGRLTISRDNA | GSDFGAVVDNRP | DYWGQG | Lama |
| | VQAGDSLRLSC | | GKEREFVA | | KNTVYLQMNSLKPEDTAV | | TLVTVSS | |
| | AASG | | VIS | | YYCAA | | | |
| ARG41588.1 | EVQLVESGGGL | IPFSRYH | MGWFRQAP | WSGQN | TYYADSVKGRFTISRDNA | GSRYYTDIIPNYY | RYWGQG | Lama |
| | VQAGGSLRLSC | | GKEREFVA | | KNTGNLQMNSMKPEDTA | | TLVTVSS | |
| | AASG | | SVS | | VYYCAA | | | |
| ARG41589.1 | EVQLVESGGGL | DTFSTYG | MGWFRQAP | WNRR | TYYADSVKGRFTISRDNA | VRGDNLFHTRPR | DYWGQG | Lama |
| | VQAGGSLRLSC | | GKEREIVAR | | KNAAYLEMNSLKPEDTAV | DY | TLVTVSS | |
| | AASG | | IT | | YMCAA | | | |
| ARG41590.1 | EVQLVESGGG | RYA | MGWFRQVS | ASGGS | TYYADSVKGRFTISRDNA | TSGGIFRGLYYDT | NYWGQG | Lama |
| | VVQTGGSLRLS | | GKEREFVA | | KTTLAYLQMISLKPEDTAV | RNY | TLVTVSS | |
| | CAASG | | FIS | | YYCA | | | |
| ARG41594.1 | EVQLVESGGGL | RTFSIYS | MGWFRQAT | WSGTR | TYYADSVKGRFTISGDIAK | GGSRGYVAAPDR | DYWGQG | Lama |
| | VQAGDSLRLSC | | GKEREFVA | | NTVYLQMNNLKPEDTAV | W | TLVTVSS | |
| | AASG | | AIR | | YSCAA | | | |
| ARG41595.1 | EVQLVESGGGL | IYFRLYT | MGWYRQA | STRS | THYADSVKGRFTISRDNA | HNGQG | DFWGQGT | Lama |
| | VQTGGSLRLSC | | PGNQRELV | | KNTLYLQMNSLKPEDTAV | | LVTVSS | |
| | AASG | | ALIT | | YYCNA | | | |
| ARG41596.1 | EVQLVESGGG | RYG | VGWFRQPP | KSGGS | TYYEDSVKGRFTISRDGA | DGGGYSAYYYYT | EYWGQGT | Lama |
| | VVQAGGSLRLS | | GKEREFVS | | KNTVYLQMNSLKPEDTAV | HQTEY | LVTVSS | |
| | CAASG | | AVS | | YYCAA | | | |
| ARG41597.1 | EVQLVESGGGL | RYV | MGWFRQAP | RSGAT | TNYADSVKGRFTISRDSA | SGRYYTAAVEGA | DYWGQG | Lama |
| | VQAGGSLRLSC | | GKEREFVA | | KITVYLQMDSLKPEDTAV | NY | TLVTVSS | |
| | AASG | | AIT | | YYCAA | | | |
| ARG41598.1 | EVQLVESGGAL | RTFSRYA | MGWFRQAP | WDGDS | TSYANSLKGRFTISRDNA | DRGRTTAW | TYWGEGT | Lama |
| | VQAGDSLRVS | | GKQREFVA | | KNTGYLYMNSLIPEDTAV | | LVTVSS | |
| | CVASG | | AIS | | YYCAA | | | |
| ARG41599.1 | EVQLVESGGGL | GTLNGYA | MAWFRQAP | WSGS | KYYADSVKGRFTISRDNA | RRGGGNYYTRAV | DYWGQG | Lama |
| | VQAGDSLRLSC | | GKERDVVA | W | KGTVYLQMNSLKPEDTA | DF | TLVTVSS | |
| | AASG | | TIN | | VYRCAA | | | |
| ARG41601.1 | EVQLVESGGGL | RSFSRST | MGWFRQAP | WAGTT | TYYHDSVKGRFTISRDNA | GRDARILRNARDY | DYWGQG | Lama |
| | VQSGDSLRLSC | | EKEREFVAV | | KNTVYLQMNSLKPEDTAV | | TLVTVSS | |
| | AASG | | IS | | YYCAG | | | |
| ARG41605.1 | EVQLVESGGGL | GTFDDYA | MGWFRQR | WNGA | TYYLNHIKGRFTISRDNAK | ERTLGWGVNPEA | ASWGQGT | Lama |
| | VQVGASLRLSC | | PGEEREFV | M | NTAYLQMNNLEPGDTAV | Y | LVTVSS | |
| | RASG | | AVIS | | YYCAA | | | |
| 4bfb_E | QVQLQESGGG | FTFSSAI | MTWVRQAP | SDGSI | TTYADSVKGRFTISRDNA | A | GRRGPGT | Lama |
| | LVQPGGSLRLS | | GKGREWVS | | RNTLYLQMNSLKPEDTAV | | QVTVSS | |
| | CAASG | | TIG | | YYCTS | | | |
| ATN23916.1 | QVKLQQSGGG | AFFRAGP | MGWYRRAP | RNGR | TIYAPSLKDRFTISRDDDN | NVRTAVAGRN | DYWGQG | Lama |
| | SVQEGGSLRLS | | GNERELVA | | NILYLQMSDLTPGDTAVY | | TQVTVSS | |
| | CASSG | | GIS | | YCNL | | | |
| ATN23921.1 | KVKLQESGGGL | HQLYRPP | VTWYRRAP | GGGT | TIYRDAAKGRFTISRDDV | GKSAYGGY | NYYGQGT | Lama |
| | VRAGESLTLAC | | GKQRELLAF | | KNQVYLQMTNLNPEDTG | | QVTVSS | |
| | AASG | | IT | | VYYCGA | | | |
| ATN23926.1 | QVKLQESGGG | ITFSMYA | MVWHRQAP | SGGS | TRYADSVKDRFTISRDNA | LLGNI | PHWGQG | Lama |
| | LVQAGGSLRLS | | GKQRELVA | | GSTLTLQMNSLKPEDTAV | | TQVTVSS | |
| | CAASG | | GIS | | YYCHA | | | |
| ATN23930.1 | EVKLQESGGG | IAVTNYL | VNWYRRAP | SGGG | RYYTDIAKDRFTISRVVAN | RGFPVVQGALS | EYWGQGT | Lama |
| | SVQAGGSLRLS | | GKPRELVA | | NTVLLHMNSVKPEDTAVY | | QVTVSS | |
| | CTASG | | SIS | | ICRL | | | |
| ATN23928.1 | KVQLQESGGG | ITFGRNI | RRWYRQGS | SWGT | TAYAASVKGRFTISRDNG | VSPRYPYT | TYWGQGT | Lama |
| | LVQAGGSLRLS | | GKQRELVA | | ENTVYLQMNSLKPEDTAV | | QVTISA | |
| | CAASG | | SID | | YTCNA | | | |
| ATN23929.1 | KVQLQQSGGG | SISDFAA | MAWYRQAP | SAGA | LLYAEPVKGRFTISRDNA | YAEA | IYWGQGT | Lama |
| | SVTPGGSLRLS | | GKERDWVG | | KNTVYLQMNSLKPEDTAV | | QVTVSS | |
| | CAASG | | TIF | | YYCRL | | | |
| ATN23931.1 | KVQLQESGGG | IIQSINA | MSWYRRAP | SGGT | AAYADSVKDRFTISRDVL | YDDGT | VYWGQGT | Lama |
| | LVQSGGSLTLS | | GKQREFVAI | | KNTMWMQMDSLKPEDS | | AVTVSS | |
| | CAATG | | IS | | GSYYCRV | | | |
| 4w2o_G | KVQLQESGGG | GTFSINT | LGWYRRAP | SGGI | TRYADSVKGRFTISRDNG | RNWGGGLD | VYWGQGT | Lama |
| | LVQAGGSLRLS | | GKEREFVA | | KNTVYLDMNSLKPEDTAV | | QVTVSS | |
| | CAASG | | RIS | | YYCMY | | | |
| 4w2q_G | KVQLQESGGG | FTFRSSA | MGWYRRAP | TTGT | ADYGDFVKGRFTISRDNA | DPYGMESL | RYWGQG | Lama |
| | LVQVGGSLRLS | | GKQRELVA | | ENTVDLHMNSLKPEDTAV | | TQVTVSS | |
| | CKASG | | SLT | | YYCHE | | | |
| ATN23973.1 | QVQLQESGGG | FTLAEYG | VGWFRQAP | VGGT | THSIDSVKGRFTISRDNM | YSSAYDR | NYWGQG | Lama |
| | LVQPGGSLRLS | | GKERELVAL | | KNTVYLQMNSLNVEDTA | | TQVTVSS | |
| | CTASG | | IA | | VYYCNA | | | |
| CAH18017.1 | LQESGGRLVEA | GTFSWYA | MGWFRQAP | RGGGS | SYYADSVKGRFTISRDNA | GRGAPSDTGRPD | DYWGQG | Lama |
| | GGSLRLSCAVS | | GKEREFVA | | KNTVYLQMNSLKPEDTAV | EY | TQVT | |
| | G | | TIS | | YYCAA | | | |
| CAH18020.1 | LQESGGRLVEA | GTFSWYA | MGWFRQAP | RGGGS | SYYADSVKGRFTISRDNA | GRGSPSDTGRPD | DYWGQG | Lama |
| | GGSLRLSCLVS | | GKEREFVA | | KNTVYLQMNSLKPEDTAV | DY | TQVT | |
| | G | | TVS | | YYCAA | | | |
| CAH18014.1 | LQESGGRLVEA | GTFSWYA | MGWFRQAP | RGGGS | SYYADSVKGRFTISRDNA | GRGAPSDTGRPD | DYWGQG | Lama |
| | GGSLRLSCLVS | | GKEREFVA | | KNTVYLQMNSLKPEDTAV | DY | TQVT | |
| | G | | TVS | | YYCAA | | | |
| CAH18844.1 | LQESGGGLVQ | TIFSIND | MGWYRQA | SDGT | SAYEDSVKGRFTISRDDA | LRASTAGWEPRF | GSWGQG | Lama |
| | PGGSLRLSCVA | ISINH | PGKERELV | | KNMVYLQMNRLKPEDTA | | TQVT | |
| | SG | | AAIT | | VYYCNG | | | |
| CAH18845.1 | LQESGGGLVQ | ITFSDYA | MAWFRQAP | GS | TDYSDSVKGRFTISRDNA | DYGWARPSRHSV | DYWGQG | Lama |
| | AGGSLRLSCTT | | GKGREFVA | | KNTVYLQMNSLRPEDTA | RPEMY | TQVT | |
| | SG | | RSG | | VYYCAG | | | |
| CAH18846.1 | LQESGGGLVPP | RTFSDYS | MAWFRQAP | WGGG | PYYGDSVKGRFTISRDNA | TLDWGTIARMSR | DYWGQG | Lama |
| | GGSLRLSCAAS | | GKDSEFVG | | KNRMYLQMNSLKPEDTA | AGMY | TQVT | |
| | E | | VIS | | TYYCAA | | | |
| CAJ55284.1 | LQESGGGLVQ | RTFSSYA | MGWFRQAP | WSGGS | TYYADSVKGRFTISRDNA | GFALPPS | DYWGQG | Lama |
| | AGGSLRLSCAA | | GKEREFVA | | KNTVYLQMNSLKPEDTAV | | TRVT | |
| | SG | | RIN | | YYCTA | | | |
| CAH18850.1 | LQESGGGLVQ | SIFSPND | MGWYRQA | YSGH | TTYADSVKGRFTISRDTT | FSKWSS | DYWGQG | Lama |
| | PGGSLRLSCAA | | PGLLRELVA | | KKTMYLEMNSLKPEDSG | | TQVT | |
| | SG | | RID | | VYYCGL | | | |
| CAH18851.1 | LQESGGGLVQ | RTGNINT | MTWFRQAP | WGGW | TDYADSVKDRFTISRDGA | DSKYYTVYRSRV | EYWGQGT | Lama |
| | AGDSLRLSCAA | | GKEREFVA | SGGT | KNTMYLQMNSLKFEDTA | TY | QVT | |
| | SG | | GVT | | VYYCAA | | | |
| CAH18852.1 | LQESGGGLVQ | ITFSDYA | MAWFRQAP | GS | TDYADSVKGRFTISRDNA | DLGWARVRRLITR | DYWGQG | Lama |
| | AGGSLRLSCVA | | GKEREFVA | | KSTVYLQMNSLRPEDTAV | PEMY | TQVT | |
| | SG | | RSG | | YYCAG | | | |
| CAH18853.1 | LQESGGGLVQ | RTFSDYA | MGWFRQAP | GS | TYYADSVKGRFTISRDNA | SSWWATAGTGYR | DYWGQG | Lama |
| | AGGSLGLSCAA | | GKEREFVS | | KNTVYLQMNRLKPEDTG | APSWY | TQVT | |
| | SG | | GIG | | VYYCAS | | | |
| CAH18855.1 | LQESGGGLVQ | ITFSDYA | MAWFRQAP | GS | TDYADSVKGRFTISRDNA | DAGWIRSPRHIAR | DYWGQG | Lama |
| | AGGSLRLSCAA | | GKEREFVA | | KNTVYLQMNSLRPEDTA | PEMY | TQVT | |
| | SG | | RSG | | VYYCAG | | | |
| CAF32440.1 | LQESGGGLVQ | TVFSIND | LGWYRQAP | ADGT | SAYEDSVKGRFIISRDDA | LRASNAGWEPRF | GTWGQG | Lama |
| | PGGSLRLSCVA | ISINH | GKERELVA | | KKMVYLQMNSLKPEDTA | | TQVT | |
| | SG | | AIT | | VYYCNG | | | |
| CAH18858.1 | LQESGGSLVQP | SSVSINH | MGWYRQA | SDGE | SAYEDSVKGRFAISRDNL | LRATSAGWELRF | GSWGQG | Lama |
| | GGSLRLSCVAS | | PGKERELV | | KNMVYLQMNTLKAEDTA | | TQVT | |
| | G | | AAIT | | MYYCNY | | | |
| CAJ55287.1 | LQESGGGLVQ | RSVDNYA | MGWFRQAP | WWSG | TEYADSVKGRFTISRDNA | ERGTYFAGRSQD | DDWGRG | Lama |
| | AGDALTLSCAA | | GKELEFVAA | SR | NGMVYLRMSSLRPEDTA | EY | TQVT | |
| | SG | | IS | | VYYCAA | | | |
| CAH18862.1 | LQESGGGLVQ | ITFSLYT | MGWFRQAP | WTGSS | TYYADSVKDRFTTSRDIA | GYRIDTQPMDRD | YYWGQGT | Lama |
| | AGDSLRLSCQA | | GKEREFVS | | KKTVYLQMNSLKPEDTAV | FY | QVT | |
| | SG | | AIT | | YYCAA | | | |
| CAF32446.1 | LQQSGGGLVQ | RAFGYYY | MGWFRQAP | WYDGS | TSYPNSVKGRFTISRDNA | DRSLTVVASSW | RYWGQG | Lama |
| | AGGSLRLSCAA | | GKEREFVA | | KNTVDLQMNSLKSEDTA | | TQVT | |
| | SG | | AIS | | VYYCAG | | | |
| CAH60923.1 | LQESGGGLVQ | RASSSYA | MGWFRQAP | WSGGF | TYYADSVKGRFTISRDNA | RDYRLWSPYQYE | DYWGQG | Lama |
| | AGGSLRLSCAA | | GKEREFVA | | KNTVYLQMNSLKPEETAV | Y | TQVT | |
| | SG | | AIS | | YYCVA | | | |
| CAH60897.1 | LQESGGGLVQ | SSFSIRT | MGWFRQAP | WSGGN | TYYTDFVKGRFTISRDNA | GFAYRSVTYSTR | EYWGQGT | Lama |
| | AGGSLRLSCAA | | GKEREFVA | | KNTVYLQMNSLNPEDTAI | PSFY | QVT | |
| | SG | | AIS | | YYCAA | | | |
| CAH60898.1 | LQESGGGLVQ | LTFSNYV | TGWLRQAP | RSGIS | TDYADSVKGRFTISRDNA | GGGGTYYRRNYK | DYWGQG | Lama |
| | AGGSLSISCAT | | GKDREFVA | | KNTVYLQMNSLKPEDTAV | Y | TQVT | |
| | SG | | SIS | | YYCAA | | | |
| CAH60899.1 | LQESGGGLVQ | LIFSNYV | TGWFRQAP | RSGVS | TDYTDSVKGRFTISRDNA | GGGGTYYQQNYK | DYWGQG | Lama |
| | AGDSLSISCAT | | GKDREFVA | | KNTVYLQMNSLKPEDTAV | Y | TQVT | |
| | SG | | SIS | | YICAA | | | |
| CAH60900.1 | LQESGGGLVQ | RDFSTYA | LAWFRQAP | WTGGS | TYYADSVEGRFTISRDNA | DLPPYGSSWYPP | DYWGQG | Lama |
| | AGGSLRLSCAA | | GKEREFVA | | KNTVYLQMNSLKPEDTAV | RY | TQVT | |
| | SG | | AIT | | YYCAA | | | |
| CAH60902.1 | LQESGGRLVQ | RAFSDYA | VGWFRQAP | WSGGY | TYYADSVKGRFTISRDNA | RHYRLWSPYQYD | DYWGQG | Lama |
| | AGGSLSLSCAA | | GKEREFVA | | KNTAYLQMNSLKPEDTAI | Y | TQVT | |
| | SG | | AIN | | YYCVA | | | |
| CAH60914.1 | LQQSGGGLVQ | RASSSYA | MGWFRQAP | WSGGY | TYYADSVKGRFTISRDNA | RDYRLWSPYQYD | DYWGQG | Lama |
| | AGGSLSLSCAT | | GEEREFVA | | KNTVYLQMNSLKPEDTAV | Y | TQVT | |
| | SG | | AIS | | YYCVA | | | |
| CAH60922.1 | LQESGGGLVQ | SSFSIRT | MGWFRQAP | WSGGN | TYYTDFVKGRFTISRDNA | GFAYRSVTYSSR | EYWGQGT | Lama |
| | AGGSLRLSCAA | | GKEREFVA | | KNTVYLQMNSLKPEDTAI | PSFY | QVT | |
| | SG | | AIS | | YYCAA | | | |
| CAH60939.1 | LQQSGGGSVQ | STFVINP | MRWYRQAP | FNGA | TNYADSVKGRFTISNNNA | VVWVGSESY | DYWGQG | Lama |
| | AGGSLRLSCAA | | GKQRELVA | | KNTVFLQMNSLKPEDTAV | | TQVT | |
| | SA | | GIT | | YYCNV | | | |
| CAH60956.1 | LQESGGGLVQ | GTFSIYT | MGWFRQAP | RSGIS | TDYGDSVKGRFTISGDNA | DKTTYWNIPRDEY | DFWGQGT | Lama |
| | AGGSLRLSCAA | | GKEREFVA | WKGAM | KNTVFLQMNSLKPEDTA | | QVT | |
| | SG | | AIT | | MYYCAA | | | |
| CAH60927.1 | LQESGGDLVQ | STLSIKA | MAWYRQAP | SRGS | PKYADSVKGRFTISRDNA | RTTFLTEGWR | NYWGHGT | Lama |
| | PGGSLRLSCAA | | GKQREMVA | | KNTVSLQMNSLKPEDTAV | | QVT | |
| | SG | | AIT | | YYCNA | | | |
| CAH60928.1 | LQESGGGLVQ | SFGYIGG | MGWYRQTP | SDLS | ADYADSVKGRFTISRDNA | RRPSSSTIL | DDWGQG | Lama |
| | PGGSLRLSCAA | | GKQREFVA | | RHTVYLEMNNLKPEDTG | | TQVT | |
| | SG | | WIT | | VYYCNA | | | |
| CAH60957.1 | LQQSGGGLVQ | GTFSIYT | MGWFRQAP | RSADS | TDYADSVKGRFTISRDNA | DKTTFWNIPRDEY | DYWGQG | Lama |
| | AGNSLTLSCAA | | GKEREFVA | WNGA | KNTVYLQMNSLKPEDTAV | | TQVT | |
| | SG | | AIS | M | YYCTA | | | |
| CAH60933.1 | LQESGGGLVQ | GTSSIYT | MGWFRQAP | RSAIS | TDYADSVKGRFTISTDNA | DRTTSWNIPRDEY | DYWGQG | Lama |
| | AGGSLRLSCAA | | GKEREFVA | WKGAS | KNTVYLQMNSLKPEDTAI | | TQVT | |
| | SG | | AIS | | YFCVA | | | |
| CAH60934.1 | LQESGGGLVQ | INSRIYR | TGWYRQAP | DGGS | TNYGDSVKGRFTISRDNA | NTVANLGR | NYCGQGT | Lama |
| | PGGSLRLSCVA | | GNQRELVA | | KNTVYLQMNNLKPEDTA | | QVT | |
| | SG | | RIS | | VYQCCV | | | |
| CAH60935.1 | LQQSGGGLVQ | NTFVINP | MGWYRQA | FTGT | TNYADSVKGRFTASRDN | VVWVGPKSY | DSWGQG | Lama |
| | AGGSLRLSCTA | | PGKQRELV | | TKNTVFLQMNSLKPEDTA | | TQVT | |
| | AG | | AEVT | | VYYCNA | | | |
| CAH60937.1 | LQESGGGLVQ | TIFSLHA | MGWYRQA | RAGT | TDYGDSVKGRFTISRDNA | RTIVPVPK | NYWGQG | Lama |
| | PGGSLRLSCAS | | PGKQRELV | | ENTVYLQMGSLKPDDTA | | TQVT | |
| | SR | | ATIT | | VYYCNA | | | |
| CAH60938.1 | LQESGGGLVQ | RAFT | VAWFRQAP | WIGSS | TLYADSVKGRFTISRDNA | TRALAIATTSEKY | DYWGQG | Lama |
| | AGDSLRLSCVA | | GKEREFVS | | KNTVYLQMNSLKPEDTAV | | TQVT | |
| | SG | | GIR | | YYCAA | | | |
| CAH60940.1 | LQESGGGLVQ | NTFVLNP | MRWYRQAP | FIGT | TNYADSVKGRFTISTDNA | VVWVGSKSY | DSWGQG | Lama |
| | AGGSLRLSCAA | | GKQRELVA | | KKTVFLQMNSLKPEDTAV | | TQVT | |
| | SA | | GVT | | YYCNV | | | |
| CAH60941.1 | LQESGGGLVQ | TTVSSNT | MDWHRQA | RGDV | LTYSDSVKGRFIISRDPTK | GLNIGTGIIPH | KYWGQGT | Lama |
| | AGGSLRLACAA | | PGKKRELV | | NMVYLQMNELKPEDTAV | | QVT | |
| | SG | | ARIS | | YYCAA | | | |
| CAH60942.1 | LQESGGGLVQ | IIFRFNA | MGWYRQE | SGGTT | INYADSVKGRFTISRDNT | YPGFQLTTP | KWWGQG | Lama |
| | PGGSLRLSCAA | | PGKQREFV | | QKTVYLQMNSLKYDDTA | | TQVT | |
| | SG | | AGIS | | VYFCAA | | | |
| CAJ34301.1 | QLQASGGGLV | LTFSNYV | MGWFRQAP | WSGW | KTDSNSAKGRFTISRNNA | AAAKTRLPQIVYR | GIWGQGT | Lama |
| | QAGGSLRLSCA | | GKEREFVA | | KNTVDLQMNSLKPEDTA | TTGDY | QVTVSS | |
| | ASG | | GIS | | VYYCAA | | | |
| CAJ34302.1 | QLQASGGGLV | LTFSNYV | MGWFRQAP | WSGW | KTDSNSAKGRFTISRNNA | AAARTRLPQIVYR | GIWGQGT | Lama |
| | QAGGSLRLSCA | | GKEREFVA | | KNTVDLQMNSLKPEDTA | TTGDY | QVTVSS | |
| | ASG | | GIS | | VYYCAA | | | |
| CAJ55317.1 | LQQSGGGLVQ | RAFQYYY | MGWFRQAP | WYDGS | TSYADSVKGRFTISRDNA | DRGLTAVASSW | RYWGQG | Lama |
| | AGGSLRLSCAA | | GKEREFVA | | KNTVDLQMNSLKSEDTA | | TQVT | |
| | SG | | AIS | | VYYCAG | | | |
| CAJ55264.1 | LQESGGGLVQ | LIFNNHY | LGWFRQAP | WYDGS | TSYADSVKGRFTISRDSA | DRGLTASPSSW | RYWGQG | Lama |
| | AGGSLRLSCAA | | GKEREFVA | | KNTVDLQMNSLKSEDTA | | TQVT | |
| | SR | | AIS | | VYYCAG | | | |
| CAJ55266.1 | LQESGGGLVQ | LTFSSYY | MGWFRQTP | WYDDS | TSYADSVKNRFTISRDNA | GRSLTVVASSW | RYWGQG | Lama |
| | AGGSLRLSCAA | | GKEREFVA | | KNTVYLQMSSLKPEDTAV | | TQVT | |
| | SG | | AIG | | YYCAG | | | |
| CAJ55279.1 | LQQSGGGMVQ | LIFNNHY | LAWFRQAP | WYDGS | TSYTNSVKGRFTISRDNA | DRGLTSVASSW | RYWGQG | Lama |
| | AGGSLRLSCAA | | GKERMFVA | | KNTVDLQMNSLKSEDTA | | TQVT | |
| | SQ | | AIS | | VYYCAG | | | |
| CAJ55270.1 | LQESGGGLVQ | LTFSRYY | LAWFRQAP | WYDYS | TYYADSVKGRFTISRDNA | GRSLTDVPGSW | SYWGQGT | Lama |
| | AGGSLRLSCAA | | GKERELVAT | | KNTMYLQVNSLKPEDTAV | | QVT | |
| | SG | | IG | | YYCAG | | | |
| CAJ55280.1 | LQQSGGGLVQ | RAFNYYY | MGWFRQAP | WYDAS | TSYADSVKGRFTISRDNA | DRGLTDVPSSW | RYWGQG | Lama |
| | AGGSLRLSCAA | | GKEREFVA | | KNTVDLQMNSLKSEDTA | | TQVT | |
| | SG | | AIS | | VYYCVG | | | |
| CAJ55281.1 | LQQSGGGLVQ | LSFNHYY | MGWFRQAP | WYDHS | TSYADSVKGRFTISRDNA | DRGLTAVDSSW | RYWGQG | Lama |
| | AGGSLRLSCQA | | GKNREFVA | | KNTVDLQMNALKSEDTA | | TQVT | |
| | SR | | AIS | | VYYCVG | | | |
| CAJ55285.1 | LQESGGGLVQ | RTFSSNA | MGWFRQAP | FGGHS | TNYRDSVEGRFTISRDDV | STGSQATMNLRS | TYWGQGT | Lama |
| | AGGSLRLSCAA | | GKEREFVG | | KNTVYLQMNSLKPEDTAV | Y | QVT | |
| | SG | | AIS | | YYCAA | | | |
| CAJ55286.1 | LQESGGGLVQ | RTVSSKA | MGWFRQAP | WGGHS | ANYRDSVEGRFTISRDDS | STGSQATMSFRS | GSWGQG | Lama |
| | AGGSLRLSCAA | | GKEREFVG | | KNTVYLQMNSLKPEDTAV | Y | TQVT | |
| | SG | | SIS | | YYCAA | | | |
| CAJ55289.1 | LQQSGGGLVQ | RTLSTYP | MGWFRQAP | WRG | SSTDTGDSVKGRFTTFKD | GRSYEARSFSAN | AYWGQGT | Lama |
| | AGASLRLSCTA | | GKEREFVA | | NASLYLQMKGLKPEDSA | DY | QVT | |
| | PG | | AVD | | VYYCAA | | | |
| CAJ55290.1 | LQESGGGLVQ | ITLSFYG | MGWFRQAP | SNGDS | TYYEDSVKGRFTISRDNA | AFRLSGSHLFDRL | VHWGQG | Lama |
| | AGGGLRLSCAA | | GGEREFVA | | KSTVFLQMNRLKPEDTAV | YY | TQVT | |
| | SG | | AIT | | YYCGA | | | |
| CAJ55294.1 | LQQSGGGLVQ | RTFSSYS | VGWFRQAP | WSGSS | TYSADSVKGRFTISRDNA | DRSRAEWLVTNE | DYWGQG | Lama |
| | AGGSLRLTCAA | | GNEREFVA | | KNTAYLQMNSLKPEDTAV | ADY | TQVT | |
| | SG | | AIS | | YYCAA | | | |
| CAJ55295.1 | LQESGGGLVQ | RTFSRYV | MGWFRQAP | GSGSS | TSYADSVKGRFTISRDNA | VLSFPSTKERDY | TYWGQGT | Lama |
| | AGGSLRLSCAA | | GKEREFVA | | KNAVYLQMNSLKPEDTA | | QVT | |
| | SG | | AIV | | VYYCAA | | | |
| CAJ55296.1 | LQQSGGGLVQ | RTVENYA | MGWFRQTP | WWSG | ADYSDSVKGRFTISRDNA | EPGTYFAGRFES | DYWGQG | Lama |
| | AGDPLTLSCAA | | GKEPEFVA | SR | KKTLYLQMSSLQPEDTGV | EY | TLVT | |
| | SG | | AIS | | YYCAA | | | |
| CAJ55299.1 | LQESGGGLVQ | SISRFND | MAWSRQAP | SGGN | TRYADSVKGRFTISRDNA | QLPTGWVRRRGS | DDWGQG | Lama |
| | PGGSLRLSCAA | | GEQREFVA | | KNTVYLQMTSLKVEDTAV | | TRVT | |
| | SG | | RID | | YHCNV | | | |
| CAJ55300.1 | LQQSGGGLVQ | RTFNSYA | MGWFRQAP | WGGG | TSYEDSVKGRFTISRDND | GDSTHHIRALSP | EYWGQGT | Lama |
| | AGGSLRLSCTA | | GKKRAFVA | S | KNTVYLRMNSLKPEDTAV | | QVT | |
| | SG | | AIS | | YYCAQ | | | |
| CAJ55302.1 | LQESGGGLVQ | RTFSR | YGWFRQAP | WSSGS | TYYADSVKGRFTISRDNA | SSLYLALQRAEY | DYWGQG | Lama |
| | AGGSLRLSCAA | | GKEREIVAS | | KNTVYLQMNGLKPEDTA | | TQVT | |
| | SG | | IR | | VYSCAA | | | |
| CAJ55303.1 | LQQSGGGLTQ | RTFGTYA | VGWFRQAP | RSGGS | TYYTDSVKGRFTISRDNA | RRHGEY | DYWGQG | Lama |
| | AGGSLRLSCAA | | GKGREFVG | | KNTVYLQMNGLKPEDTA | | TQVT | |
| | SG | | AIR | | VYYCAA | | | |
| CAJ55304.1 | LQESGGGLVQ | STFSSYV | MGWFRQAP | RRGGR | GVYSDSVKGRFTISRDNA | QRRGIPRY | EYWGQGT | Lama |
| | AGVSLRLSCAA | | GKEREFVA | | KNTLYLQMNSLKPEDTAV | | QVT | |
| | SG | | AIT | | YYCAA | | | |
| CAJ55305.1 | LQQSGGGLVQ | RTFTLEA | MGWFRQAP | WRSGS | MDYADSVKGRFTISRDIA | DRDTLRISGAGGA | DYWGQG | Lama |
| | AGDSLRLSCAA | | GKEREFVA | K | KNTVYLQMNSLKPEDTAV | M | TLVT | |
| | SG | | AID | | YYCAA | | | |
| CAJ55308.1 | LQESGGGLVQ | DFFSINN | MGWYRQA | SRGS | TNYADSVKGRFTISRDNA | DETSGWASLR | HYWGQG | Lama |
| | PGGSLRLSCAA | | PGKQRELV | | KNTVYLQMNSLKPEDTAV | | TQVT | |
| | SG | | ATIS | | YYCNA | | | |
| CAJ55311.1 | LQESGGGLVQ | RTFDNWT | LGWFRQAP | WTGGV | TDYADSVKGRFTISRDKA | RAGWDLNRFDY | RYWGQG | Lama |
| | AGGSLRLSCAA | | GKEREFVA | | KNTVALQMNSLKPENTAV | | TQVT | |
| | SG | | AIT | | YYCAA | | | |
| CAJ55312.1 | LQESGGGLVQ | RTFSSYT | MAWFRQAP | WSDGN | TYYADSVKGRFTISRDNA | DYSGLTTRWGAY | DYWGQG | Lama |
| | AGGSLRLSCAA | | GKEREFVSI | | KNTVYLQMNSLKAEDTAV | | TQVT | |
| | SG | | IS | | YYCAA | | | |
| CAJ55313.1 | LQESGGGLVQ | RTFSGGA | MGWFRQAP | WSGHS | TYYGDSVKGRFTISRNNA | RESAGWSSYR | NYWGQG | Lama |
| | AGGSLRLSCAA | | GKEREFVA | | RNTVYLQMNSLKPEDTA | | TQVT | |
| | SG | | AIS | | VYYCNA | | | |
| CAJ55314.1 | LQESGGGLVQ | ISFSIRD | MGWYRQA | SG | GTTNYVDSVKGRFTISRD | DWTTGWRTE | RSWGQG | Lama |
| | AGGSLRLSCAA | | PGKQRELV | | NAKVYLLMNILKPEDTAV | | TQVT | |
| | SG | | ATIS | | YYCAV | | | |
| CAJ55315.1 | LQESGGGLVQ | RTFSNYN | MGWFRQAP | WSGW | PYYADSVKGRFTISRDNA | DRSLTRSASSY | NYWGQG | Lama |
| | AGDSLRLSCAA | | GKEREFVA | SGGN | KNTVYLQMNSLKPEDTAV | | TQVT | |
| | SG | | VIG | | YYCAA | | | |
| CAJ55316.1 | LQQSGGGLVQ | RTFNSYN | MGWFRQSP | WYDSS | TNYADSLKGRFTISRDNA | GRSYSSNPAAY | NYWGQG | Lama |
| | AGGSLRLSCAT | | GKEREFVAL | | KNTMYLQMDSLKPEDTA | | TQVT | |
| | SG | | TS | | VYYCAA | | | |
| CAJ55319.1 | LQESGGGLVQ | SIRTFNT | MGWYRQG | NSGS | TNYADSVKGRFTISRDNA | DVQGGGWGSIQ | RYWGQG | Lama |
| | AGGSLRLSCAA | | TGNERELIA | | INTVYLQMNSLKPEDTAV | | T | |
| | SG | | SIT | | YYCNI | | | |
| CAJ55320.1 | LQESGGGLVQ | RTWNPSA | MGWFRQAP | RGGGS | VYYADSVKGRFTISREVD | QSPGMSGTYSRS | PYWGQGT | Lama |
| | AGGSLRLSCAT | | GKGREFVA | | KNAVYLQMNSLKSEDTA | DVY | QVT | |
| | SG | | AVS | | VYYCAA | | | |
| CAJ57593.2 | LQQSGGGLVQ | RTFSSSL | MGWFRQAP | WNGSV | ISYTDSVKGRFTISRDNAK | AALEYCTGTGCR | GYWGQG | Lama |
| | AGGSLRLSCAA | | GKEREFVA | | NTVWLQMNSLKPEDTAV | Y | TQVT | |
| | SG | | DID | | YYCAQ | | | |
| CAL18273.1 | QVQLQESGGG | RTGRNYD | MGWFRQAP | WNGG | TVYADSVKGRFTISRDNG | TSVRGLVASVRR | DYWGQG | Lama |
| | LVQAGGSLRLS | | GREREFVA | N | KNMMYLQMSSLKPEDTA | YEY | TQVTVSS | |
| | CAASR | | AIT | | VYYCAG | | | |
| 3qxw_E | QVQLVESGGG | RSSRSWA | MAWFRQAP | GDGRL | TTYGDSVKGRFTISRDNA | DDNYVTASWRSG | DYWGQG | Lama |
| | LVQAGGSLRLS | | GKEREFVA | | EYLVYLQMDSLKPEDTAV | P | TQVTVSS | |
| | CAASR | | KIS | | YYCAA | | | |
| CBX21160.1 | LQQSGGGSVQ | LAFSDYA | MGWFRQAP | QIGNN | PNYEDSVNGRFTIARDNA | DRSSLQLYASRV | DYWGQG | Lama |
| | AGGSLRLSCAV | | GKEREFVA | | KNTMYLQMNSLKPEDTA | GDEY | TQVTVSS | |
| | SG | | AIS | | VYYCAA | | | |
| CBX21183.1 | LQESGGGLVQ | FTFSSYA | MAWFRQAP | RSSGR | TYHADSVKGRFTVSRDN | SYFWSDTPFALN | RYWGQG | Lama |
| | PGGSLRLSCAA | | GKERVFVA | | AKNTAYLQMNSLSPEDTA | Y | TQVTVSS | |
| | SG | | ALD | | VYYCAA | | | |
| CBX21184.1 | LQESGGGLVQ | RTSSAFA | IGWFRQAP | WSTGR | TSSADSVRDRFTISRDTP | DPNGRGY | YYWGQG | Lama |
| | AGGSLRLSCAA | | GKEREFVG | | KNLVYLQMDSLKPEDTAV | | SQVTVSS | |
| | SG | | SII | | YYCAA | | | |
| CBX21185.1 | LQESGGGLVQ | RTFPIYG | LGWFRQAP | WSTGR | TYNADSVEGRFAISRDNA | DRDGRGY | VYWGQGT | Lama |
| | VGGSLRLSCAA | | GKEREYVA | | KNTVYLQMNSLRPEDAA | | QVTVSS | |
| | SG | | SIT | | VYYCAG | | | |
| CBX21180.1 | LQESGGGSVQ | LAFSNYH | MGWFRQAP | QIGNN | PNYEDSVNGRFTIARDNA | DRSSPSLRLVASR | DYWGQG | Lama |
| | AGGSLRLSCAV | | GKEREFVA | | KNTMYLQMNSLKPEDTA | VGDEY | TQVTVSS | |
| | SG | | AIS | | VYYCAA | | | |
| CBX21177.1 | LQESGGGLVQ | RTFTSYD | MGWFRQAP | WSGET | TYYADSVKGRFTISRDNT | HYGSRWKSVSVE | TYWGRGT | Lama |
| | AGGSLRLSCAS | | GKERELVA | | KDTVYLQTNNLKPEDTAV | NY | QV | |
| | SA | | AIN | | YYCAA | | | |
| CBX21165.1 | LQESGGGSVQ | LAFSNYH | MGWFRQAP | QIGNN | PNYEDSVNGRFTIARDNA | DRSSPSLRLVASR | DYWGQG | Lama |
| | AGGSLRLSCAV | | GKEREFVA | | KNTMYLQMNSLEPEDTA | VADEY | TQVTVSS | |
| | SG | | AIS | | VYYCAA | | | |
| CBX21166.1 | LQESGGGSVQ | LAFSNYH | MGWFRQAP | QIGNN | PNYEDSVNGRFTIARDNA | DRSNPSLRLVAS | DYWGQG | Lama |
| | AGGSLRLSCAV | | GKEREFVA | | KNTMYLQMNSLKPEDTA | RVGDEY | TQVTVSS | |
| | SG | | AIS | | VYYCAA | | | |
| CBX21168.1 | LQESGGGLVQ | RTASINA | IAWYRQAP | SVGR | SNYADAVEGRFTISRDND | AVGSRWY | ELWGQGT | Lama |
| | AGGSLRLSCAA | | GKEREFLA | | KNTVYLQMNSLKPEDTAA | | QVTVSS | |
| | SG | | RIN | | YYCAA | | | |
| CBX21169.1 | LQQSGGGLVQ | FTFSTYA | MGWFRQAP | RSSDS | TYYVDSVKGRFTVSRDN | SYFWSNTPFALN | RYWGQG | Lama |
| | PGGSLRLSCAA | | GKGREFVA | | AKNTAYLQMNSLSPEDTA | Y | TQVTVSS | |
| | SG | | ALD | | VYYCAA | | | |
| CBX21173.1 | LQQSGGGLVQ | STFSRYR | MGWFRQAP | WSGGS | TYYEDSVKGRFTISRDNA | SQWDGRTWTRP | EYWGQGT | Lama |
| | AGGSLSLSCAF | | GKEREFVG | | KNTVYLQMDSLASEDTG | HAY | QVTVSS | |
| | SG | | TIN | | VYYCAA | | | |
| CBX21176.1 | LQESGGGLVQ | QSFSGYA | MGWFRQAP | WSGNS | TDYGDFVKGRFTVSRDN | DLGAYGGLGLSY | DYWGQG | Lama |
| | TGGSLRLSCAL | | GKEQEFVA | | AKNTVYLQMNSMKPEDT | | TQVTVSS | |
| | SD | | AIN | | AVYYCAA | | | |
| CBX21179.1 | LQQSGGGLVQ | RTFTSYT | MAWFRQAP | GNGGE | TYVPDSVKGRFTISRDNA | EILYCSGYGCRDP | NYWGQG | Lama |
| | AGGSLRLSCAA | | GKEREFVG | | KNTVYLELNSLNPEDTAV | RLY | TQVTVSS | |
| | SG | | VVI | | YTCAA | | | |
| CBX21181.1 | LQQSGGGLVQ | GTFNPYA | MAWYRQAP | RSGDI | TYYADSVKGRFTISRDSA | STLLPTN | DYWGQG | Lama |
| | AGASLRLSCAT | | GREREFVA | | RNTIYLQMNSLKPEDTAV | | TQVTVSA | |
| | SE | | RIY | | YYCSA | | | |
| CBX21186.1 | LQESGGGLVQ | RTFRNYA | MGWFRQAP | WSGDN | TYYADSVKGRFSISMDNA | GFITGIHPYEY | HYWGQG | Lama |
| | AGGSLRLSCAA | | GKERDLVA | | KNTVLLQMNSLKPEDTAV | | TQVTVSS | |
| | SG | | RIE | | YYCAA | | | |
| 035502 | GGLVQSGGSL | FIFVRNP | MSWYRQSP | GASN | KEYADFAKGRFTISRENV | TINGR | DYWGQG | Lama |
| | TLSCEASG | | GKGREFVA | | KRTAYLIMTGLKPEDAAD | | TQVTVSS | |
| | | | AID | | YFCSI | | | |
| 035499 | GGDVQTGGSL | FSLTSST | IGWFRQAP | REKEE | DRYMNSVAGRFTISKDKT | GWTWDDCLHQE | HYWGQG | Lama |
| | RLSCSVPR | | GSGREAVA | | KNMMYLNMTGLKPEDTA | TY | TQVTVSS | |
| | | | CMT | | LYVCAV | | | |
| 035504 | GGLVQTGGSL | TLHSISD | MAWYRQPP | TDGS | TDYDDSVRGRFTITGNNA | VIVSVIRQWP | GNWGQG | Lama |
| | RLSCAASK | | GKRRKGVA | | ENTISLQMNNLRPEDSAV | | AQVTVIS | |
| | | | TIS | | YFCQA | | | |
| 035506 | GGLVQAGDSL | DISAFTT | MGYYRQFP | RAGF | ETYADAVKGRFTVFRDTS | PYIGR | AYWGRGT | Lama |
| | SPSCRPSM | | GQLRELVAT | | KNTVDLQMNDLKVEDTA | | QVTVSS | |
| | | | IT | | VYYCNA | | | |
| 035507 | GGSVQTGGSL | ISAVNQ | VRWFRRPP | SGGV | TKYGDSVKGRFVISHDNA | RIDWTPHEY | EVWGQGI | Lama |
| | RVSCAASG | | GMEREFVA | | DNSVVHLQMNSLKIEDTG | | EVTVSS | |
| | | | RIN | | VYYCN | | | |
| 035510 | GGSVQAGESL | NIFGLNA | VGWYRQAP | SDSN | TIYADSVKGRFTISRNNAK | VQRGRYGYEGDR | NYWGQG | Lama |
| | RLSCVASG | | GSQRELVA | | NTVYLQMNSLKPEDTAVY | | TQVTVSS | |
| | | | RIN | | YCNV | | | |
| 035512 | GGSVQAGGSL | DTYSSQC | MGWFRQAP | SGSGS | TAYADSVKGRFTISRDNA | DSESYGCGYSIVP | DYRGQGT | Lama |
| | RLSCAASG | | GKQREGVA | | KNTVYLQMNSLIPEDTAIY | GF | QVTVSS | |
| | | | VIN | | YCAA | | | |
| 035513 | GGSVKAGGSL | FADSIRC | LAWFRQAS | TGRHN | TYYDDDVKGRVTVSLDST | VYGYYNKPCARA | EYWGQGT | Lama |
| | TLSCKVSA | | GKDRDFIAA | | GAIVSLQVNTLEPADSGM | SSEY | QVTVSS | |
| | | | LH | | YYCAF | | | |
| 035514 | GGSVQAGGSL | DTPSLKC | MAWFRQAP | PVDNS | ITYADSVKGRFTISRDNAK | TRGTDPDCSKRL | GFWGQG | Lama |
| | KLSCLGSG | | GKGREGVA | | TTLSLQMNGLKPDDTAM | SAPRFF | TQVTVSS | |
| | | | VIA | | YYCAA | | | |
| 035515 | GGSVEAGGSL | YIYSGKC | LGWFRQAP | DARI | TYYDDSVKGRFTISVDRV | EGPQLLSSRLCL | SHWGQG | Lama |
| | NISCVVSE | | GEERERVA | | KNTVNLQMNSLKPEDTG | | TWITVSS | |
| | | | TIY | | MYYCAS | | | |
| 035517 | GGSGQAGGSL | YKYDNYC | VGWFRQAP | RSGGS | TIYAESVKGRFAISQDNTK | GSGDCEMIETAL | DAWGQG | Lama |
| | RLSCHVSG | | GKEREWVA | | GTVHLQMNNLEPEDTAK | | TTVTVSS | |
| | | | LIE | | YYCAA | | | |
| 035520 | GGSVQAGGSL | FIHNYNKY | MGWFRQSP | GFGRS | VYYHDDVKGRFTIYRDNA | ASLDVTASLYYMN | SDWGQG | Lama |
| | SLSCAASG | S | GKEREGVA | | KKMVFLQMNSLQPNDTAI | PAWW | TQVTVSS | |
| | | | AID | | YYCAS | | | |
| 035521 | GGSVQAGGSL | DTYSDCN | MAWYRQVT | VDGT | IHFEDNVKGRFTISQDDA | ECRVQVGYGPIQ | NYWGQG | Lama |
| | RLACAASG | | GKERELVS | | KKMLYLQMSNLSPEDTA | DY | TQVTVSS | |
| | | | VIL | | MYYCNT | | | |
| 035522 | GGSVQAGGTL | LTFSTYC | MGWFRQAP | AGGGS | TYYADSVKGRFTIFQDNA | DLDDCNEGGYIVT | SYWGQGT | Lama |
| | RLSCVGSG | | GKEREGVA | | KNTMYLQMNSLKPEDTAI | MS | QVTVSS | |
| | | | VIN | | YYCAA | | | |
| 035523 | GGSVQAGGSL | TTECYYD | MSWYCQAP | SDEG | SRYADSAKGRFTISQDNA | VVKWCPRRLTGL | TYWGQGT | Lama |
| | RLSCVHSG | | GKEREFVS | | KNTVLLQMNNLKPEDTA | | RVTVSS | |
| | | | GID | | MYYCRL | | | |
| 035525 | GGSVQAGGSL | EYTLKVHY | VAWFCQAP | TLDDR | TMYADSVKGRFAISRDDA | DFQGGHLLDARV | TYWGQGT | Lama |
| | RLSCTTTS | | GKEREGVA | | KNTVYLEMNTLKFEDTAM | Y | QVTVSS | |
| | | | AIY | | YYCAA | | | |
| 035528 | GGSVQAGGSL | IDYRPTY | VGWFRQAP | IGAES | GSYSKDVKDRFTVSQDT | TPSYSRNWRNY | SHWGQG | Lama |
| | RLSCSAST | | GKEREWVA | | AKRTVYLQMTSLNPEDTA | | TQVTVSS | |
| | | | GVY | | AYYCGS | | | |
| 035529 | GGSVQAGGSL | HTWNSYV | MGWFRQTP | IGFGS | TFYADSVKGRFTIREQRG | VYNQLWLVQLRA | THWGQGI | Lama |
| | TLSCTASG | | GKEREGVA | | MNTVHLQMNNLKPEDTG | TEY | QVPISS | |
| | | | VIS | | MYYCAA | | | |
| 5ovw_J | QMQLVESGGG | STLDDYA | IGWFRQAP | SSGDS | TNYADSVKGRFTVSRDN | AHRIFGGCLVIHS | VSWGQGT | Lama |
| | LVQPGGSLRLS | | GKEREGVS | | AKNTVYLQMNDLRPEDT | SGY | PVTVSS | |
| | CAAPE | | CIG | | AVYYCAA | | | |
| 5sv4_B | EVQLVESGGGL | RTLGDYG | VAWFRQAP | RSTII | TDYADSVRGRFSISADSA | IANPVYATSRNSD | GHWGQG | Lama |
| | VQAGDSLRLSC | | GKEREFVS | | KNTVYLQMNSLKPEDTAV | DY | TQVTVSS | |
| | TASG | | VIS | | YYCAV | | | |
| 5vaq_B | QVQLVESGGG | RTFSPYV | GGWFRQAP | WSGGT | KLYADSVKGRFTISRDNA | RRINEVLTTAPDY | DFWGQGT | Lama |
| | LVQAGGSLRLS | | GKEREFVA | | KNTVYLQMNTLKREDTAV | | QVTVSS | |
| | CAASQ | | AIS | | YYCAA | | | |
| 5vl2_H | QVQLQQSGGG | RTHTPYA | MGWFRQAP | GVAAT | TTYADSVRGRFTISRDDA | RASMAVSTSPRV | PIWGQGT | Lama |
| | LVQAGGSLRLS | | GKEREFVG | | KATVYLQMNSLKPEDTAV | Y | QVTVSS | |
| | CAASG | | GIG | | YYCAT | | | |
| 5vm0_B | EVQLVESGGGL | RTYTPYA | MAWFRQAP | GIDGT | AAYADSVRGRATISRDSA | RASMQVLTSPRV | PIWGRGT | Lama |
| | VQTGDSLRLSC | | GKEREFVA | | KKTVYLQMNSLKPEDTAV | Y | QVTVSS | |
| | AASG | | GIG | | YSCAT | | | |
| 5vm6_A | QVKLQQSGGG | RALSSTI | VGWFRQIP | WSSSD | TWYADSVKGRFTISKDDA | ALRRPGSDASDY | PYWGQGT | Lama |
| | MVQTGDSLRLS | | GKEREFVG | | ANGVHLQMSSLKPEDTA | TRIPDY | QVTVSS | |
| | CVGSR | | GIA | | VYYCAS | | | |
| 6b20_F | QVQLVESGGG | SIFSINA | MGWYRQA | RGGR | TNYADSVKGRFTLSRDN | GRSR | GYWGQG | Lama |
| | LVQAGGSLRLS | | PGKQRELV | | AKNTVYLQMNSLKPEDTA | | TQVTVSS | |
| | CAASG | | AAIT | | VYYCNV | | | |
| 5c1m_B | QVQLVESGGG | RTSYP | MGWFRRAP | WSGID | PTYADSVADRFTTSRDVA | RAPVGQSSSPYD | DYWGQG | Lama |
| | LVRPGGSLRLS | | GKEREFVA | | NNTLYLQMNSLKHEDTAV | Y | TQVTVSS | |
| | CVDSE | | SIT | | YYCAA | | | |
| 6c9w_B | VQLVESGGGLV | GTFSTFN | MGWFRQDL | WTGGR | AYYGDSVKGRFTISRDNA | QGTNGGGYSEAT | NYWGQG | Lama |
| | QAGDSLRLSCA | | GKEREFVA | | KNTVYLQMNSLKPEDTAV | SY | TQVTVSS | |
| | ASG | | AIR | | YYCAR | | | |
| 6fyt_I | EVQLVESGGGL | SIFDIYA | MDWYRQAP | RDGS | TNYADSVKGRFTISRDNA | SLYRDPLGVAGG | VYWGKGA | Lama |
| | VQPGGSLRLSC | | GKQRDLVA | | KNTLYLQMNSLKPEDTAV | MG | LVTVSS | |
| | AVSI | | TSF | | YLCHV | | | |
| 6ehg_C | QVQLVETGGG | SIFSLNA | MGWFRQAP | RSGGR | TYYADSVKGRFTISRDNG | GTGWSPQTDNEY | NYWGQG | Lama |
| | LVQAGGSLRLS | | GKEREFVA | | KNMVYLQMHSLKPEDTAI | | TQVTVSS | |
| | CAASG | | TIN | | YYCAA | | | |
| 6eqi_B | QVQLVESGGG | RPFSTFD | LAWFRQAP | RGGS | TFYADSVSGRFTISGGST | SITGYGLVDSASH | TIWGQGT | Lama |
| | LVQAGGSLKLS | | GKEREFVS | | KNTLYLQMNSLKPEDTAI | Y | QVTVSS | |
| | CTTSG | | GLR | | YYCAR | | | |
| 5lz0_B | DVQLVESGGG | RTFSSYS | MGWFRQAP | RSDNS | TYYADSVKGRFTISRDSA | TPYGSRYYLRELR | DYWGQG | Lama |
| | LVQAGGSLRVS | | GKEREFVA | | KNTVYLQMNSLKPEDTAV | EY | TQVTVSS | |
| | CAASG | | AIS | | YYCAA | | | |
| 6f0d_B | QVQLVQSGGG | RTFSMYT | MGWFRQAP | GRGLS | PDIADSVNGRFTISRDNA | DLQYGSSWPQRS | DYWGQG | Lama |
| | LVQAGGSLRLS | | GKEREFVA | | KNTLYLQMDSLKPEDTAV | SAEY | TTVTVSS | |
| | CAFSG | | ANR | | YYCAA | | | |
| 6f2w_B | QVQLVESGGG | RTFSSRA | MGWFRQAP | WSGSY | TEYADSVKGRVTISRDNA | KNGGAASNYPND | VYWGQGT | Lama |
| | VVQAGGSLRLS | | GEGREFVA | | KNTVYLQMNSLKPGDTA | Y | QVTVSS | |
| | CAASG | | TIS | | VYHCAA | | | |
| 6f5g_B | QVKLEESGGGL | RTFSAYA | MGWFRQVP | DSDAS | IYYTDSVKGRFTISRDNAK | RQYYSGRVYSTF | DYWGQG | Lama |
| | VQAGGSLRLSC | | GREREFVA | | NTVYLQMNSLIPDDTAVY | REEY | TQVTVSS | |
| | SPSD | | TIR | | YCAA | | | |
| 6fpv_B | QVQLVESGGG | SFFSIND | MGWYRQA | SGGS | TNYADSVEGRSTISSDNA | NVRLREYRTTSY | HYWGQG | Lama |
| | LVQAGGSLRLS | | PGKQRELV | | KNTVYLQLSSLKPEDTAV | | TQVTVSS | |
| | CAASG | | AVIS | | YYCNA | | | |
| 6fyu_I | EVQLVESGGGL | RTYA | MGWFRQAP | ALGTR | TYYSDSVKGRFTISRDNA | QGQWRAAPVAVA | EFWGQGT | Lama |
| | VQAGGSLKLSC | | GKEREFVA | | KNTEYLEMNNLKPEDTAV | AEY | QVTVS | |
| | AASG | | HIN | | YYCTA | | | |
| 6gci_B | QVQLVESGGG | ITFSSYT | MGWFRQAP | GSGSN | TYYADSVKGRYTISRDNA | RDDGRMYQGFYD | EYWGQGT | Lama |
| | LVQAGDSLRLA | | GKEREYIAR | | KNTAYLQMNSLKPEDTA | F | QVTVSS | |
| | CAASG | | IT | | NYYCAA | | | |
| 6gs7_H | QVQLQESGGG | RTFSSYN | MGWFRQAP | WTGRS | ADYPDSVKGRFTISRDNA | KQYGSRADYPWD | DYWGQG | Lama |
| | LVQAGGSLRLS | | GKEREFVG | | KNAVYLQMNSLKPEDTA | DY | TQVTVSS | |
| | CAGSG | | GIS | | VYYCAA | | | |
| 5lmw_A | QVQLVESGGG | LTFNRYN | MGWFRQAP | WSGDR | TYGTDSVKGRFAISRDNA | DRFLTRSVKY | DYWGQG | Lama |
| | LVQAGDSLRLS | | GREREFVA | | KNTMYLQMNSLKPEDTA | | TQVTVSS | |
| | CAASG | | SIS | | VYYCAA | | | |
| 6h15_D | VQLQESGGCL | STFSTYT | IGWFRQAP | WDGG | TYYADSVKGRFTISRDNA | RGRRYFDFTYSD | DYWGQG | Lama |
| | VQAGGSLRLSC | | GKEREFVA | Q | KNTVYLQMNSLKPEDTAV | VY | TQVTVS | |
| | AASG | | AIH | | YYCAA | | | |
| 6h16_B | EVQLQESGGG | RTFSIYT | IGWFRQAP | WSGGS | TYYADSVKGRFTISRDNA | ITYTRGIY | KYWGQGT | Lama |
| | LVQAGGSLRLS | | GKEREFVA | | KNTVYLQMNSLKPEDTAV | | QVTVSS | |
| | CAASG | | EIT | | YYCAA | | | |
| 4s11_A | QVQLQESGGG | RTFSSFV | MGWFRQAP | RSGSV | TRYADSAKGRFTISKDNA | DLHRPYGPGSQR | DTWGQGT | Lama |
| | LVQAGGSLRLS | | GKEREFVA | | KNTVSLQMDNLNPDDTA | TDDY | QVTVSS | |
| | CAASG | | SIS | | VYYCAA | | | |
| 3p0g_B | QVQLQESGGG | SIFSINT | MGWYRQA | SGGS | TNYANSVKGRFTISRDNA | KDYGAVLYEY | DYWGQG | Lama |
| | LVQAGGSLRLS | | PGKQRELV | | ANTVYLQMNSLKPEDTAV | | TQVTVSS | |
| | CAASG | | AAIH | | YYCNV | | | |
| 4qkx_B | QVQLQESGGG | SIFALNI | MGWYRQA | SGGT | TNYANSVKGRFTISRDNA | KDFGAIIYDY | DYWGQG | Lama |
| | LVQAGGSLRLS | | PGKQRELV | | ANTVYLQMNSLKPEDTAV | | TQVTVSS | |
| | CAASG | | AAIH | | YYCNV | | | |
| 6n51_D | QVQLVESGGG | RTFTSYA | MGWFRQAP | SSGGS | THYADSVKGRFTISRDNS | AMYGSRWPDWE | DYWGQG | Lama |
| | LVQAGGSLRLS | | GKERESVA | | KNTVYLQMNSLKPEDTAV | Y | TQVTVSS | |
| | CAASG | | AIS | | YYCAA | | | |
| 6nfj_E | QVQLVESGGG | RAIRSYF | MAWFRQAP | YIFN | TYYADSVKGRFTISRDNA | GVGASVSVSESW | NYWGQG | Lama |
| | LVQAGGSLRLS | | GKEREFVA | | KNTVFLQMNSLKPEDTAV | Y | TQVTVSS | |
| | CAASG | | AVE | | YYCAA | | | |
| 6r7t_A | QVQLQESGGG | FTFSTYA | MSWFRQAP | SSGGG | QSYADSVKGRFTISRDNA | AAWRVGTY | DYRGQGT | Lama |
| | LVQPGGSLRLS | | GKGLEWVA | - | KNTLYLQMNSLEPEDTAV | | QVTVSS | |
| | CAASG | | SIN | | YYCAA | | | |
| AAL31962.1 | QVQLQESGGG | APFREST | MAWYRQTP | SGGS | KTYGVSVQGRFTISRDSD | ALS | NTWGQGI | Lama |
| | LVQPGGSLRLS | | GKERETVA | | RRTVLLQMNNLQPEDTA | | QVTVSS | |
| | CAVSG | | FIT | | VYYCHR | | | |
| AAL31963.1 | QVQLQESGGG | EGFSNYP | MGWYRQA | EGGDR | TNYADAVKGRFTISRDNA | ARWDLGPAPF | GSWGQG | Lama |
| | LVQPGGSLRLS | | PGKQRELV | | KKTVYLQMSSLKPEDTAV | | TQVTVSS | |
| | CVVSG | | AAMS | | YYCNA | | | |
| AAL31964.1 | QVQLQESGGG | RTISTYS | MGWFRQAP | RTGSN | TLYADSVKGRFIISRDNAK | GLATWLATQTDN | DYWGQG | Lama |
| | TVQAGDSLRLS | | GKEREFVA | | NTMYLQMNSLKPADAAV | Y | TQVTVSS | |
| | CAASA | | HIS | | YYCAA | | | |
| 2wzp_L | QVQLQESGGG | RTGSNWC | MGWFRQLA | FDYDM | TYYADSVKGRFTVSRDS | RSGGFSSNRELY | DGWGQG | Lama |
| | LVQAGGSLRLS | | GKEPELVVA | | GKNTVYLQMNSLKPEDT | | TQVTVSS | |
| | CTASR | | LN | | AIYYCAA | | | |
| AAL31966.1 | QVQLQESGGG | RTGSNWS | MGWFRQLA | LDYDI | PYYADSVKGRFTVSTDS | RSGGFSSNRTYY | DYWGQG | Lama |
| | LVQAGGSLRLS | | GKEREFVV | | GKNTVYLQMNSLKPEDT | | TQVTVSS | |
| | CTASR | | ALN | | AIYFCAA | | | |
| AAL35838.1 | DVQLQASGGG | RTFSNYH | MGWFRQAP | WSGGN | TYYADSVKGRFTISRDNA | GSKYGGSWSRS | NYWGQG | Lama |
| | LVQAGGSLRLS | | GTEREFVS | | KNAVYLQMNSLKPEDTA | QDAY | TQVTVSS | |
| | CTASG | | SIK | | VYYCAT | | | |
| AAL35839.1 | EVQLQASGGG | RIFSNAA | MGWFRQAP | WSDGN | TYYADSVKGRFATSRDN | GIGTFGSSWTRA | RYWGQG | Lama |
| | LVQAGGSLRVS | | GKEREFVA | | AKNTVYLQMNSLKPEDTA | DRY | TQVTVSS | |
| | CAASG | | AIR | | VYYCAA | | | |
| AAL35840.1 | EVQLQASGGG | SIFSINT | LGWYRQAP | SGGA | TYYADSMKGRFTISRDNA | RVPL | DYWGQG | Lama |
| | LVQPGGSLRLS | | GKQRELVA | | KNTVYLQMNSLKPEDTAV | | TQVTVSS | |
| | CVASR | | WIT | | YYCNK | | | |
| AAL35841.1 | DVQLQASGGG | RSFSTYR | VGWFRQTP | WNGVK | TRYSDSMNDRFTVSRDN | DQRFDGDDWSPS | TRWGRGT | Lama |
| | LVQAEDSLRLS | | GKEREFVA | | TKNTVFLDLKSLKDEDTA | AF | QVTVSS | |
| | CALSG | | GIN | | VYYCAT | | | |
| AAL35842.1 | EVQLQASGGG | NTISGYA | TGWFRQAP | WSGYS | VYYAKSPKGRFTVSRDN | AVFVRTAGVPTLP | DYWGQG | Lama |
| | LVQAGGSLRLS | | GKEREFVA | | AKKNTVYLQMNSLKHED | GEY | TQVTVSS | |
| | CAASG | | AVT | | TAVYYCA | | | |
| AAL35843.1 | DVQLQASGGG | GSFSNYN | MGWFRQAP | WSGGR | IIVADSVKGRFTIFRDNAK | TKQFFPLSNESV | DYWGRGT | Lama |
| | LVQAGGSLRVS | | GKGREFVV | | STVYLQMNSLTPEDTAIY | WY | QVTVSS | |
| | CAASG | | GIG | | YCAA | | | |
| AAL35844.1 | DVQLQASGGG | RIPRNYP | IGWWRQTP | WTSGT | TYFADSVKGRFAISRDNA | SERDFYTRNYYFT | DYWGQG | Lama |
| | LAQAGRSLTLS | | GKKREFVA | | KKTATLQMNNLQLEDTAV | ESLY | TQVTVSS | |
| | CDVSG | | GIS | | YYCAT | | | |
| AAL35845.1 | DVQLQASGGG | ESIASFN | LGWFRRAP | RTGET | TDYADAVKGRFTISRDNI | DYNLGTFVTRKD | DFWGQGT | Lama |
| | LVQSGGSLRLI | | GKAREFVG | | KNMGYLQMDNLKPGDTA | SMY | QVTVSS | |
| | CEASG | | AVS | | TYYCAA | | | |
| AAL35846.1 | DVQLQASGGG | RTFSSVS | MGWFRQAP | WRGVS | TYYADSVKGRFTISRDNA | RRNFFGNNSAGQ | AYWGQG | Lama |
| | LVQAGGSLRLS | | GKEREFVA | | KNTGYLQMNSLKPEDTA | Y | AQVTVSS | |
| | CAASG | | AIN | | VYYCAA | | | |
| AAL35848.1 | DVQLQASGGG | RTFSSVT | MGWFRQAP | RNSGS | TYYADSVKGRFTIPRDNA | KASMYGSTLYPP | NYWGQG | Lama |
| | LVQAGGSLRLS | | GKEREFIAA | | KNTGYLQMNSLKPEDTA | TGY | TQVTVSS | |
| | CAASG | | MT | | VYYCAA | | | |
| AAL35857.1 | EVQLQASGGG | RTFSRFA | MGWFRRAP | WSGGT | AYGADSAKGRFTISREYA | GRAVSDY | DYWGQG | Lama |
| | LVQAGGSLRLS | | GKEREFVA | | KNIMYLQMNSLKPEDTAV | | TQVTVSS | |
| | CAASG | | AIS | | YYCAA | | | |
| AAL35850.1 | EVQLQASGGG | SIFSESA | MGWYRQA | LDGR | TNYAYYAEGRFTISRDNA | LRSRAVMDTIP | NYWGPGT | Lama |
| | LVQPGGSLRLS | | PGNERELV | | KNTVYLQMNNLEPGDTA | | QVTVSS | |
| | CATSG | | AAIT | | VYYCNA | | | |
| AAL35851.1 | DVQLQASGGG | RTFSSDA | MGWFRQAP | WSGGS | TYYADSVKGRFTISRDNA | DRRRYYSGSYPP | DYWGQG | Lama |
| | LVQAGGSLRLS | | GKEREFVA | | KNTVYLQMNSLKPEDTAV | SEY | TQVTVSS | |
| | CAASG | | AIS | | YYCAH | | | |
| AAL35853.1 | EVQLQASGGG | LPFSTYS | MGWYRQA | GGGN | TYHADSLKDRFTISRDND | DRDFTIVAGFIRS | EYWGEGT | Lama |
| | SVQTGASLRIS | | PGKEREFV | | KNTVYLQMNSLKPEDTAV | QYSPRAV | QVTVSS | |
| | CLASG | | AVIG | | YYCAA | | | |
| AAL35854.1 | EVQLQASGGG | RTFSTYT | MGWFRQAP | RNSVG | TYYRDSVKGRFTISRDNA | DPMYGRSVMSTR | NYWGQG | Lama |
| | LVQAGGSLRLS | | GKEREFVA | | KNTVYLQMNSLEPEDTAV | Y | TQVTVSS | |
| | CVASG | | AIS | | YYCAA | | | |
| AAL35855.1 | EVQLQASGGG | YTFSSHA | MGWFRQTP | ASGGN | QYYKYFAKGRFTISRDNA | ATKQFSNAYSDY | DYWGQG | Lama |
| | LVQAGGSLRLS | | GKDREFVS | | KNTVDLQMNSLRPEDAA | VHDY | TQVTVSS | |
| | CAVSG | | AIS | | VYYCAR | | | |
| AAL35859.1 | EVQLQASGGG | GTFTDYA | MGWFRQAP | WGGYS | TYYSDAVKGRFTISRDND | DPQLITTPEY | NYWGQG | Lama |
| | LAQAGGSLRLS | | GKEREFVA | | KNMSYLQMNNLKPEDTA | | TQVTVSS | |
| | CAASG | | AIN | | VYFCAA | | | |
| AAL35860.1 | DVQLQASGGG | NTISDYA | TGWFRQAP | RRT | GWQVYSDSVKNRFTVSR | SQDSGFDTPVTE | GYWGRG | Lama |
| | LVQAGGSLRLS | | GKEREFVG | | DSAKMYLQMNSLSPDDT | SHLY | TQVTVSS | |
| | CAASG | | SIG | | AVYYCAA | | | |
| AAL35872.1 | DVQLQASGGG | FTFDEHA | IGWFRQAP | TGGS | TWYAASVKGRFTVSRDD | LSQGAM | DYWGKGT | Lama |
| | SVQAGGSLRLS | | GKGLEYVS | | AKNTLYLQMNSLKPEDTG | | QVTVSS | |
| | CAASG | | HID | | LYYCAR | | | |
| AAL35873.1 | DVQLQASGGG | FTLDEHA | IGWFRQAP | IGGGR | TYYADSVKGRFTISGDNA | AHGGYGAF | GSWGQG | Lama |
| | SVQDGGSLRLS | | GKGFESVS | | KNTLYLQMNSLKPEDTAF | | TQVTVSS | |
| | CAASG | | TID | | YYPAR | | | |
| AAL40814.1 | EVQLQASGGG | RTFSSYG | MGWFRQAP | ESGAD | THYADFVRGRFTISGDNA | LDITTAA | SYWGQGT | Lama |
| | LVQTGGSLRLS | | GKEREFVA | | KNTVYLQMNRLTPEDTAV | | QVTVSS | |
| | CAVSG | | AMR | | YYCKA | | | |
| AAL40817.1 | EVQLQASGGG | RTFSSYS | MAWFRQAP | WRSSV | TAYADSVKGRFTISRDNA | EALPGTYGL | DYWGKGT | Lama |
| | LVQPGGSLRLS | | GKEREFVA | | KNTVYLQMNGLKPEDTA | | QVTVSS | |
| | CEASG | | AIN | | VYYCAR | | | |
| AAL40818.1 | DVQLQASGGG | STFSIGA | IGWYRQAP | GGGS | TYYTDSVKGRFTISRDNA | ILAGGLL | AFWGQGT | Lama |
| | LVQAGGSLRLS | | RKQRELVA | | RNTVYLQMNNLKPEDTA | | QVTVSS | |
| | CAASV | | GIS | | VYYCNA | | | |
| AAL40819.1 | EVQLQASGGG | STFSGND | IGWYRQAP | DGGY | TSYATSVKGRFTISRDNR | GGSSG | TFWGQGT | Lama |
| | LVQAGGSLKLS | | GKQRELVA | | KNTAYLQMNSLKPEDTAV | | QVTVSS | |
| | CTASG | | VIS | | YYCFA | | | |
| AAL40823.1 | EVQLQASGGG | PTSITYG | MAWFRQAP | PSGGA | AAYADSVKGRFTISRGVG | GTNWPPK | RYWGLGT | Lama |
| | LVQVGDSLKLS | | GKEREFVS | | KNTVYLQMDSLKVEDTAV | | QVTVSS | |
| | CAASG | | AVT | | YYCAA | | | |
| AAL40825.1 | EVQLQASGGG | RTFGSYT | MGWFRQAP | SAGR | TMYADSVKGRFTISRDNA | GTVLSVATGPY | GYWGQG | Lama |
| | LVQAGGSLRLS | | GKQRELIAR | | KSTVYLQMNSLKPEDTAV | | TQVTVSS | |
| | CVASG | | IN | | YYCAA | | | |
| AAL40826.1 | DVQLQASGGG | RTFSSYG | MGWFRQAP | WRGSS | TYYADSVKGRFTISRDNT | WGAGEDE | DYWGQG | Lama |
| | LVQAGGSLRLS | | GKEREFVA | | VNTVSLQMNNLKPADTG | | TQVTVSS | |
| | CVASG | | SIN | | VYYCAA | | | |
| AAL40830.1 | EVQLQASGGG | ITFSEKH | MAWFRQAP | RGGT | TNYGDSVKGRFTISRQKL | DFYGLGF | DYWGQG | Lama |
| | LVQAGGSLRLS | | GKQRELVA | | NNTIILQMNNLKPEDTAVY | | TQVTVSS | |
| | CVASG | | VIT | | YCAA | | | |
| AAL40831.1 | EVQLQASGGG | RTFSSYH | MGWFRQAP | WSGDT | TYYEASVKGRFTISRDNA | QTRPRPYGTSRA | GYWGQG | Lama |
| | LVQAGDSLRLS | | GKEREFVA | | KNTMYLQMNSLKPEDTA | EGDY | TQVTVSS | |
| | CAASG | | AIN | | VYRCAA | | | |
| AAL58846.1 | EVQLQASGGG | FKITHYT | MGWFRQAP | WGGD | TFYSNSVKGRFTISRDNA | GSTSTATPLRV | DYWGKGT | Lama |
| | LVQAGGSLRLS | | GKEREFVS | N | KNTVYLQMNSLKPEDTA | | QVTVSS | |
| | CAASG | | RIT | | DYYCAA | | | |
| AAL58847.1 | EVQLQASGGG | RTFSIYA | MGWFRQAP | RSGDV | TKYADFVKGRFSISRDNA | TWAYDTVGALTS | NFWGQGT | Lama |
| | LVQAGGSLRLS | | GKEREFVA | | KNMVYLQMNSLKPEDTA | GY | QVTVSS | |
| | CSASV | | GIN | | LYYCAA | | | |
| CAA10533.1 | LQASGGGLVQ | GLIFSSYA | MGWFRQAP | RGGKI | RHYADSVKGRFTISRDDA | DDIGGGWMYERS | NYWGQG | Lama |
| | AGGSLRLSCAE | | GKEREFVA | | KNTLYLQMNSLQPEDTAV | WAQSRRNY | TQVT | |
| | AS | | AIN | | YFCAA | | | |
| CAA15407.1 | QVQLQESGGG | PMSSSAV | MSWFRQAP | WSGGT | SYYANSVEGRFTISRDNA | TQSGSFYQV | DYWGQG | Lama |
| | LVQAGGSLTLS | | GKEQEFVA | | KNTMYLQMNKLKPEDTA | | TQVTVSS | |
| | CAASG | | RIR | | VYTCAL | | | |
| CAA15408.1 | QVQLQESGGR | IDVNRNA | MGWFRQAP | WSDAY | TDYADSVKGRFTISRDNN | GLLDVQYVRQAA | SYWGQGT | Lama |
| | SVQSGGSLRLS | | GTEREFVA | | KNTVYLQMGSLEAGDTA | GY | QVTVSS | |
| | CAASG | | GVR | | LYYCAA | | | |
| CAC07784.1 | QVQLQESGGG | RTSHGYG | MGWFRQIP | WSGRN | TYYADSVKGRFTISRDNV | RTVRVVDISSPVG | AYWGQGT | Lama |
| | LVQAGDSLRLS | GYG | GKERELVA | | KDMLYLQMNSLKPEDTA | F | QVTVSS | |
| | CAASG | | AIR | | VYTCAV | | | |
| CAA15412.1 | QVQLQESGGG | RATSGHG | MGWFRQVP | WSGKE | TWYKDSVKGRFTISRDNA | RPVRVDDISLPVG | DYWGQG | Lama |
| | LVQAGGSLRLS | HYG | GKEREFVA | | KTTVYLQMNSLKPEDTAV | F | TQVTVSS | |
| | CAASG | | AIR | | YYCAA | | | |
| CAA15414.1 | QVQLQESGGG | NIDRLYA | MAWYRQAA | LSGL | LTYADSVKGRFTVSRDNA | AYGNP | TYWGKGT | Lama |
| | LVQPGGSLRLS | | GKQRELVAI | | KNTVYLQMHSLKPEDTAV | | LVTVSS | |
| | CAASG | | AH | | YYCNR | | | |
| CAA15418.1 | QVQLQQSGGG | RTFSGHG | MGWFRQVP | WSGVT | TYYVDSVKGRFTISRDNA | RPVRVDDISTPDG | VYWGQGT | Lama |
| | LVQAGGSLRLS | GYG | GKEREFVA | | KSTVYLQMNSLKPEDTG | F | QVTVSS | |
| | CVASG | | AIR | | VYYCAV | | | |
| 1sjv_A | QVQLQESGGG | NTFSGGF | MGWYRQA | SRGI | TNYADFVKGRFTISRDNA | HYFR | SYWGQGT | Lama |
| | LVQAGESLKLS | | PGKQRELV | | KKTVYLEMNSLEPEDTAV | | QVTVSS | |
| | CAASG | | ATIN | | YYCYT | | | |
| CAA15420.1 | QVQLQESGGG | RASSGHG | MGWFRQVP | WSGKE | TWYVDSVKGRFTISRDNA | RPVRVDDISSPVG | DYWGQG | Lama |
| | LVQAGGSLRLS | GYG | GKEREFVA | | KSTVYLQMNSLKPEDTAV | F | TQVTVSS | |
| | CAASG | | AIR | | YYCAV | | | |
| CAB40421.1 | LQESGGGLVQ | SIFSIDV | MGWYRQA | RGGS | TNYAAFVKGRFTISRDNS | EGIPETLG | SRWGQG | Lama |
| | AGGSLRLSCAA | | PGKQRELV | | KKTLYLQMNSLKPEDTAV | | TQVT | |
| | SA | | AQIT | | YYCRA | | | |
| CAB40422.1 | LQESGGGLVQ | SIVRGNT | MAWYRQAP | SGGS | IDYSDSVKGRFTISRDSLK | DVWYGSTWR | NYWGQG | Lama |
| | PGGSLKLSCAV | | GKERELVA | | NTVCLQMNSLKPEDTAV | | TQVT | |
| | FG | | HYT | | YYCNA | | | |
| CAB40423.1 | LQESGGGLVQ | SFSNMNV | MGWYRQA | SNGY | INYGDSVEGRFTISGSVA | KWIGIVQR | DYWGQG | Lama |
| | PGGSLRLSCAA | | PGKQRELV | | ENTVYLQMNSLRPEDTA | | TQVT | |
| | SG | | AGVN | | VYYCNA | | | |
| CAB40424.1 | LQESGGGLVQ | SIGSINA | MGWYRQA | PGGS | TEYADSVKGRFAISRDNA | INWKS | DYWGQG | Lama |
| | PGGSLRLSCAA | | PGKQRELV | | KTTVYLQMNSLKPEDTAV | | TQVT | |
| | SG | | AQFT | | YYCYC | | | |
| CAB40425.1 | LQESGGGWVQ | MIFDFND | MGWYRQA | RFGR | TNYIDSVKGRFSISNDPA | DPPL | FAWGQGT | Lama |
| | PGGSLRLSCAA | | PGKERELV | | KWTVYLQMNSLKPEDTA | | QVT | |
| | SE | | ASIS | | VYSCNT | | | |
| CAB40426.1 | LQESGGGLVQ | SIYSLDA | MGWYRQA | SRGI | TTYADSVKGRFTISRDNA | VVYYGDWEGSEP | DYWGQG | Lama |
| | PGGSLRLSCAA | | PGEQRELV | | KNTVTLQMNILKPEDTAV | VQHEY | TQVT | |
| | TG | | ATWT | | YYCHA | | | |
| CAB40427.1 | LQESGGGSVQ | TIHSIVD | MAWYRQFP | SGGN | TNYVDSVKGRFTISRDDA | RIRRHESGYAY | DSWGQG | Lama |
| | AGGSLRLSCVA | | GKQRELVA | | KNTIYLQMNSLKPEDTAV | | TQVT | |
| | SG | | ARN | | YYCNA | | | |
| CAB40428.1 | LQESGGGLVQ | SIFSVNA | MGWYRAAP | SGGS | TNYADSVKGRFTISRDNA | CRVGNWRLE | GSWGQG | Lama |
| | AGGSLRLSCAA | | GRQRELVA | | KNTMYLQMNDLKPEDTA | | TQVT | |
| | SG | | SIT | | VYYCTN | | | |
| CAB40429.1 | LQESGGGLVQ | NVFMIKD | IGWYRQAP | DGGT | TNYADSVKGRFTISRDNA | DSWRIGAK | DYWGQG | Lama |
| | PGGSLRLSCAA | | GKQRELIAA | | KNTVFLQLNSLKPEDTAV | | TQVT | |
| | SG | | IT | | YYCHA | | | |
| CAB40430.1 | LQESGGGLVQ | GIFSIND | MVWYRQAP | RIFS | EIYADSVKGRFTISRDNA | PTG | NYWGQG | Lama |
| | TGGSLTLSCTA | | GKQREWVA | | KNIMYLQMNSLRPEDTAV | | TQVT | |
| | SG | | TIT | | YYCSA | | | |
| CAB40431.1 | LQESGGGLVQ | GTNT | MGWFRQAP | WAGDI | KSYGDSVKGRFTISRDNA | SPRLRVEIKAGGY | DFWGQGT | Lama |
| | PGGSLRLSCAA | | GKGREFVA | | KNTVYLQMNSLIPEDTAV | | QVT | |
| | SE | | ALS | | YYCAA | | | |
| CAB40432.1 | LQESGGGLVQ | ITFSNDA | SGWSRQAP | SGGT | TVIADSVKGRFTISRDDAK | DSNGR | TYWGQGT | Lama |
| | AGGSLRLSCAA | | GKQLDFIAR | | NTVYLHMNSLKPEDTAVY | | QVT | |
| | SG | | IR | | FCNA | | | |
| CAB40433.1 | LQESGGGLVQ | STFSIST | MGWHRQA | SLGT | TDYADSVKGRFTISRDNA | DGLYGFTGK | NYWGQG | Lama |
| | AGGSLRLSCGA | | PGKEREYV | | KNTVYLQMNSLKPEDTAV | | TQVT | |
| | SG | | ANIG | | YYCNQ | | | |
| CAB40434.1 | LQESGGGLVQ | RTWNDLD | MGWFRQAP | S | GGTPHYADSRFTLSRDH | GAYSTRPEAY | RYWGQG | Lama |
| | AGGSLRLSCVA | | GNQREFLA | | AKNLVYLQMNSLKPEDTA | | TQVT | |
| | QG | | AIT | | RYYCAA | | | |
| CAB40435.1 | LQQSGGGFVQ | RTSTVNG | MGWYRQA | PRGT | TQYHDNVKGRFTISRDNT | DVGPT | VKVGQGT | Lama |
| | PGGSLRLSCTA | | PGKLRERV | | RTTAYLQMNDLQPDDTA | | QVT | |
| | SG | | AVVM | | NYYCFA | | | |
| CAB40437.1 | LQESGGGLVR | SDINFNV | MGWYRQA | SGGS | TDYADSVKGRFTISRHNA | DIFFV | NYWGKGT | Lama |
| | PGESLRLSCVV | | PGQQRELV | | NNMVYLQMNSLKPEDTA | | LVT | |
| | SG | | ATIT | | VYYCNA | | | |
| CAB40438.1 | LQESGGGLVQ | RTLENYR | VAWFRQFP | WSGDR | RYYTEAVQGRFNISRDNA | AEMYGSLARRDY | RNWGQG | Lama |
| | AGGSLRLSCVA | | GKERELIAV | | ENTVYLLMNSLKPEDTAV | | TQVT | |
| | SG | | IN | | YYCAA | | | |
| CAB40440.1 | LQESGGGLVQ | LAFENYF | VSWFRQPP | YSSSS | TNYADSVKGRFTISRDNA | CSDYYCSGVGA | VYWGQGT | Lama |
| | AGGSLRLSCVA | | GDEREFVA | | VNTAYLQMDNLAPGDTA | | QVT | |
| | SG | | AIT | | VYFCAA | | | |
| CAB40441.1 | LQESGGGLVQ | FTLDLYT | IGWFRQAP | SSDGS | TYYADSVKGRFTISRDNA | DSNYCSGYGPS | DYWGQG | Lama |
| | PGGSLRLSCAA | | GKEREVVS | | KNTVYLQMNSLKPEDTAV | | TQVT | |
| | SG | | CIS | | YYCAT | | | |
| CAB40442.1 | LQESGGGSVQ | FILDYYA | IIWFRQAPG | SSDGT | TYYADSVKGRFTLSRDNA | PEGYYCPTRPLG | EYRGKGT | Lama |
| | PGGSLRLSCST | | KEREAVSCI | | KNTVFLQMDSLKQEDTAL | L | LVT | |
| | SG | | S | | YWCAR | | | |
| CAB40443.1 | LQQSGGRSVQ | RALNTLH | MGWFREAP | RSGET | TWYADFVEGRFTVFRDN | SMSLRPLDPASY | DYWGQG | Lama |
| | AGGSLRLACTA | | GKGREFVG | | AKNAVYLEMTSLKPEDTA | SPDIQPY | TVVT | |
| | SG | | SIS | | SYYCAA | | | |
| CAB40446.1 | LQESGGGLVQ | PTLGSYV | MGWFRQAP | WRGG | TYYAQFAKGRFAISRVTG | KASPAVVTTKQY | DYWGQG | Lama |
| | AGGSLRLSCAA | | GKEREYVG | N | EKMVYLQMNDLNPEDTA | | TQVT | |
| | SG | | SIT | | VYYCAA | | | |
| CAB40448.1 | LQESGGGLVQ | GTFSEHY | MAWFRQAP | WSRGS | TFYADSAKGRFTISRDKG | GSNAGLLTYSDY | EFWGQGT | Lama |
| | PGGSLRLSCAA | | GNQRVFVA | | EKTMYLEMNALKPDDTA | DYLY | QVT | |
| | TG | | VIN | | VYYCAA | | | |
| CAB40449.1 | LQESGGGLVQ | RTSDIYG | MEWHRQVP | WSDGA | TNYADSVKGRFTVSRDN | QPFGASSY | RYWGVGT | Lama |
| | AGNSLRLSCAA | | GKEREFVVI | | AKNTMYLQMNSLKPEDT | | QVT | |
| | SG | | LS | | AVYYCAL | | | |
| CAB40450.1 | LQESGGGLVQ | RIGSISG | MSWYRQVP | EGGA | RNYADFVEGRFTISKDNA | RRRFGGQ | ELWGQGT | Lama |
| | AGGSLKLSCAA | | GAQREFVA | | KSTLYLQMNNLKSDDTG | | QVT | |
| | PE | | TIT | | VYYCKL | | | |
| CAB40451.1 | LQESGGGLVQ | FTFDDYA | ICWFRQAP | KEYAK | TYYTDAVEGRFTISSDDA | KRGWYFPLDLSE | DLWGQGT | Lama |
| | TGGSLRLSCTA | | GKGREGVS | | KNTVYLQMNNLIPEDTAF | Y | PVT | |
| | SG | | CIS | | YYCAR | | | |
| CAB40452.1 | LQQSGGGLVQ | SITSIRS | MGWYRQA | TGGA | TNYADSVKDRFTISRDNA | LLYYSDYENE | NYWGRGT | Lama |
| | PGGSLRLSCAA | | PGKQREFV | | EDTVYLQMNSLKPEDTAI | | QVT | |
| | SG | | AHIS | | YYCNA | | | |
| CAB40454.1 | LQESGGGLVQ | NMFSINA | MGWYRQA | YLGR | TNYTDSVKGRFTISRENA | EATRGWGELRGR | DYWGQG | Lama |
| | PGGSLRLSCAA | | PGKQRELV | | KNTVYLQMSSLKPEDTAI | RH | TQVT | |
| | SG | | ASIT | | YYCNA | | | |
| CAB40455.1 | LQESGGGLVQ | RTFSNYA | MGWFRQAP | RSGTM | TYYADFVKGRFSISRENV | DSTKGWDLRDH | DFWGRGT | Lama |
| | AGGSLRLSCAA | | GKEREFVA | | KNTVYLQMNSLKPEDTAV | | QVT | |
| | SG | | GIS | | YFCNA | | | |
| CAB40456.1 | LQQSGGGLVQ | IIFSVRA | MGWYRQA | RGGS | TNYADSVKGRFTISRDRA | NVLTRALVSG | DYWGQG | Lama |
| | AGGSLRLSCAA | | PGKQRELV | | KNTAYVQMNSLKPDDTA | | TQVT | |
| | SG | | AVIL | | VYYCNA | | | |
| CAB40457.1 | LQESGGGLVQ | SIFSINT | MRWYRQAP | SGGS | TNYADSVKGRFTISRDNA | DGIHYYSDYDAPP | DYWGQG | Lama |
| | AGGSLRLSCAA | | GKHRELVA | | KNTVYLQMNSLKPEDTAV | IREY | TQVT | |
| | SG | | TIT | | YYCNA | | | |
| CAB40458.1 | LQESGGGLVQ | SIFSRNA | MAWYRQAP | VGGG | TTYSGSVKGRFTISRDNA | DAPAGYYPK | AYWGQGT | Lama |
| | PGGSLRLSCAA | | GKQRELVA | | KNTVYLQMNSLKPEDTAV | | QVT | |
| | SG | | AIA | | YYCNA | | | |
| CAB40459.1 | LQESGGGLVQ | RTLSRYT | MAWIRQAP | WTDGS | TYYEDTMKGRVAISRDNV | GSNIGGSRWRY | DYWGQG | Lama |
| | TGASLRLSCVA | | GKGREFIGR | | KNTIYLQMDNLKPEDTAV | | TQVT | |
| | SG | | IT | | YYCAA | | | |
| CAB40461.1 | LQESGGGLVPT | NIFSLNT | MRWYVQTP | SRKI | PKYADSVEGRFTISRDNA | DVHDGMQLR | NYWGQG | Lama |
| | GGSLTLSCEVS | | GNEREMVA | | LNTIDLQMNSLKPEDTGV | | TQVT | |
| | G | | SIT | | YYCNG | | | |
| CAB40462.1 | LQESGGGVVQ | TFQRINH | MAWYRQIP | NDGR | LNYAASVKGRFTISRDSA | DLDVGFITE | NYWGPGT | Lama |
| | PGESLTLSCVA | | GKEREQVAI | | ENTAHLQMKSLRPEDTA | | QVT | |
| | SG | | IH | | VYYCNV | | | |
| CAB40463.1 | LQESGGNFMQ | RAFDAYH | MGWFRQTP | RSGTS | TYYADSVKGRFTISRDNA | ELHNSDPFNPSE | DYWGQG | Lama |
| | AGGSVRLSCAA | | EKQREFVA | | KDTVYLQMNNLKPEDTA | Y | TQVT | |
| | SG | | FIH | | MYYCAA | | | |
| CAB40464.1 | LQESGGGLVQ | FTLDNYA | IGWFRQAP | TDVDS | KYYASALKGRFTISSDSA | SSRHYGANCLY | AFWGHGT | Lama |
| | AGGSLKLSCET | | GKDREEVA | | KNTVYLQMNSLKPEDTAV | | QVT | |
| | SG | | CIS | | YYCGA | | | |
| CAB40466.1 | LQESGGGLVQ | IIFSLNH | MGWYRQA | TGGG | TYYADSVKGRFSISRDNA | RAVDELLT | MNWGQG | Lama |
| | AGGSLRLSCAA | | PGKQRELV | | KNTVYLQMNSLKPEDTAV | | TQVT | |
| | SG | | ALIH | | YYCNS | | | |
| CAB40467.1 | LQESGGGLVQ | SSLSNYT | MGWFRHFP | WSGGR | THYTESVKGRFTTGRDTA | ASRWSWNPTSDD | IYWGQGA | Lama |
| | AGGSLRLSCAA | | GKDREFVA | | KNTVYLQMNRLKPEDTAI | Y | QVT | |
| | SG | | VVK | | YYCAA | | | |
| CAB40469.1 | LQESGGGLVQ | STFTNYA | MGWYREAP | KVGD | TDYAGSVKGRFTISRDKS | FPAIVGPF | TSWGQGT | Lama |
| | PGGSLRLSCAA | | GKQRELVA | | GNTVFLQMNSLKPEDTA | | QVT | |
| | SG | | RIS | | VYYCNT | | | |
| CAB40471.1 | LQESGGGLVQ | RTFSSFV | MGWFRQAA | ERGSL | IHYADFVKGRFTISRDNA | VIGGRWPPSEY | AYWGQGT | Lama |
| | TGGSLRLSCAT | | GTEREFVS | | ENTVSLQMNSLKPEDTAV | | QVT | |
| | SG | | AIS | | YYCAA | | | |
| CAB40472.1 | LQESGGGTVE | NSFNNYV | LAWYRQAP | NNGG | TDYADSVKGRFAISRDNA | RRWIPPGP | INWGQGT | Lama |
| | AGGSLRLSCAA | | GKPRELVA | | ATTLYLQMDHLTPEDTAV | | QVT | |
| | SV | | GYT | | YYCTA | | | |
| CAB40474.1 | LQQSGGGLVQ | VGFSVTN | LGWFRQAP | WSGG | SDYVDSVKGRFTISRDNA | QAAGLSRDAHEY | KYWGQGT | Lama |
| | AGDSLRLSCTY | | GKEREFVA | | KNTATLQMNSLKPEDTAV | | QVT | |
| | SG | | SMM | | YFCAA | | | |
| CAB40480.1 | LQQSGGGLVQ | IIASDSA | MAWYRQAP | AGGL | SNYEDFVNGRFTISRDNA | GQSYIRSYYNPG | DYWGQG | Lama |
| | AGGSLRLSCVA | | GKGREYVA | | RNTMYLQMNSLKPEDTA | | TQVT | |
| | SG | | HIT | | VYYCNV | | | |
| CAB40481.1 | LQESGGGLVQ | SIFSMNT | VSWYRQAP | GDGR | TSYEDFVKGRFTISRDIAK | WISADASMMTT | NYWGQG | Lama |
| | PGGSLRLSCAA | | GNQRELVA | | NTVYLQMNNLKPEDTAV | | TQVT | |
| | SG | | SIR | | YYCNA | | | |
| CAB40482.1 | LQESGGGLVQ | SGISFNA | MGWYRQA | RTGS | TNYADSVKGRFTISRDNA | GLEGLGYRLH | DYWGQG | Lama |
| | PGGSLRLSCTE | | PGKRRELV | | KNTVYLQMNSLKPEDTAV | | TQVT | |
| | SG | | AAIT | | YYCNL | | | |
| CAB40483.1 | LQESGGGLVQ | STFSIDA | MGWYRQA | NDGS | TNYADSVKGRFTVSRDY | EWAAMK | DYWGQG | Lama |
| | AGGSLRLSCAA | | PGKQRELV | | GKNTVYLQMNSLKPEDT | | TQVT | |
| | SG | | ALMG | | AVYYCYA | | | |
| CAB40485.1 | LQESGGGLVQL | SIFSINR | VAWFRQAP | YSGS | TSYVDSVKGRFTISGDNA | ELPRD | VYWGQGT | Lama |
| | GGSLRLSCAAS | | GKQREFVA | | WNPVYLQMNSLKPEDTA | | RVT | |
| | G | | HIT | | VYYCYA | | | |
| CAB40487.1 | LQESGGGLVQ | NIFRINA | MGWYRQA | RGSS | TNYADSVKGRFTISRDNA | QGRYYGGTYDPT | DYWGQG | Lama |
| | AGGSLNLSCTA | | PGKQRELV | | KDTVTLQMNSLKPEDTAV | Y | TQVT | |
| | VG | | AQIS | | YYCNA | | | |
| CAB40488.1 | LQQSGGGLVQ | NASGNAFR | LGWYRQAP | SNGN | THYVDSVKGRFTISKDNA | DNNPIVYRPN | DYWGQG | Lama |
| | PGGSLRLSCAT | INA | GKQRELVA | | KNTVYLQMSSLKPEDTAV | | TQVT | |
| | SG | | LIA | | YTCAV | | | |
| CAB40489.1 | LQESGGGLVQ | SISTIYV | MGWYRQA | NGIY | TNYADSVKGRFTISRDDA | AIYTPGRGEF | DYWGQG | Lama |
| | AGGSLRLACAA | | PGKQRELV | | KNTLYLQMSSLKPEDTAV | | TQVT | |
| | SV | | VSVQ | | YYCNA | | | |
| CAB40491.1 | LQESGGGLVQ | STGSIVT | MGWWRQA | NRGT | TDYGDSLKGRFTISRDNA | HGIFGSSWTT | DYWGQG | Lama |
| | AGGSLTLSCEI | | VGKQREFV | | KNTLYLQMNSLQAGDTA | | TLVT | |
| | SG | | AWIN | | VYYCNA | | | |
| CAB40492.1 | LQESGGGWVQ | SGFRGNV | MAWYRQTP | SDDR | TNYADSVRGRFTISRDNA | DTGGPYGSRN | PYWGRGT | Lama |
| | PGGSLTLSCDA | | GKRRELVA | | KNMMHLQMNSLKPEDTA | | QVT | |
| | SG | | SIT | | VYYCHV | | | |
| CAB40493.1 | LQESGGGLVQ | STFSINP | MGWYRQA | TSTTTN | TNYGDSVKGRFTISRDNA | NARRLYSGSYL | DHWGQG | Lama |
| | AGGSLRLSCAA | | PGKQREFV | Y | RNTVYLHLQMNSLKPEDT | | TQVT | |
| | SG | | ADIY | | AVYYC | | | |
| CAB40494.1 | LQESGGGLVQ | RTFSLYT | MGWYRQA | SQ | GRTNYADSVKGRFTMSR | KLFVGA | DSWGKGT | Lama |
| | AGGSLRLSCVA | | PGKQRELV | | VKNILYLQMDSLKPEDAA | | LVT | |
| | SG | | ASIS | | VYYCHA | | | |
| CAB40495.1 | LQESGGGLVQ | FSLDDYD | IGWFRQAP | FLGHT | TNYADSVKGRFTISRDIAK | RREAPPY | AYWGQGT | Lama |
| | AGGSLRLSCAA | | GKQRELVA | | NSVYLQMNSLKPEDTAV | | QVT | |
| | SG | | SIS | | YYCNA | | | |
| CAB40496.1 | LQQSGGGLVQ | STFSINA | MGWYRQA | SSSS | TNYGDSVKGRFTISRDNA | RRPSAWGTD | NYWGQG | Lama |
| | AGGSLRLSCAA | | PGKQREFV | | KNTVYLQMNSLKPEDTAV | | TQVT | |
| | SG | | AVIS | | YYCNT | | | |
| CAB40497.1 | LQESGGDLVQ | SIDTINT | MAWYRQIP | NKGS | SNYADSVKGRFTISRDNA | EGIMMHNFNWYP | QSWGQG | Lama |
| | PGGSLRLSCVA | | GNQREFLA | | KNTVYLQMNSLKPEDTAV | | TQVT | |
| | PG | | AET | | YYCNA | | | |
| CAB40502.1 | LQESGGGLVQ | RSISDYT | MAWFRQVP | WNGN | LYYTESVKGRFTSSRDNV | RFRLNGYTPSYK | RYWGQG | Lama |
| | AGDSLKLSCVA | | GKEREFVA | | KNTVYLQMNSLKPEDTAV | EDDY | TQVT | |
| | SG | | VVT | | YYCAA | | | |
| CAB40503.1 | LQESGGGLVQ | PISGINR | MNWYRQAP | NDRR | INYAYSVRGRFTISRDNA | LISSVSRNGPFY | DYWGQG | Lama |
| | AGESLRLSCAA | | GKERELVA | | KNAVYLQMNSLKSEDTA | | TQVT | |
| | SG | | SIT | | RYYCYA | | | |
| CAB40504.1 | LQESGGGLVQ | RTISSYF | MAWFRQAP | RSGRG | TDYADSVKGRFTISRDNA | GDYFRSAAQFY | NYWGQG | Lama |
| | AGDSLRLACAA | | GKEREFVAL | | KNTVYLQMNSLKAEDTAV | | TQVT | |
| | SG | | IN | | YYCAA | | | |
| CAB40505.1 | LQESGGGLVQ | TTLDYYA | IGWYRQAP | SSGGA | TYYVDFVKGRFTISRDNA | LRDSYCGATLNY | DYWGKGT | Lama |
| | AGGSLRISCAA | | GKGREGVS | | KNTVYLQMNSLKPEDTAV | YYGI | RVT | |
| | SG | | CIS | | YYCVA | | | |
| CAB40508.1 | LQESGGGLVQ | STIENYA | MAWYRRVP | SGGS | TGYEASVEGRFTISRDNA | YPPL | IAGGQGT | Lama |
| | AGGSLRLSCVA | | GKDREMVA | | KQSVYLQMDSLKPEDTA | | QVT | |
| | SG | | RIT | | VYSCNT | | | |
| CAB40509.1 | LQESGGGLVQ | KFFEYYY | MDWFRQAP | SAGI | IDYADSVKGRFTISRDNA | DAPVDDGGSSR | DYWGQG | Lama |
| | AGGSLKLSCTA | | GKERERVA | | KNTVYLQMTDLKLEDTAV | | TQVT | |
| | SG | | AIS | | YYCHA | | | |
| CAB40510.1 | LQESGGGLAQ | VTLDLYA | IGWFRQAP | SSDGT | PYYADSVKGRFTISRDNA | STLRDYSDNYYFP | DYWGQG | Lama |
| | PGGSLRLSCVA | | GKKREWVS | | KDTVYLQMNSLKPEDTAV | HDYEY | TQVT | |
| | SG | | CIS | | YYCAA | | | |
| CAB40511.1 | LQESGGGLVQ | DTYKIYV | AGWVRQAP | WSGGF | GSYAGSVKGRFTISRNNA | HRARVTLTS | DYWGQG | Lama |
| | AGGSLTLSCAV | | GKERELVG | | KTMLYLQMSSLKPEDTAV | | TQVT | |
| | SG | | DIN | | YYCVA | | | |
| CAB40512.1 | LQESGGGLVQ | FTLENNM | IAWFRQAP | VDGG | IYYTESVKGRFTMSKDNA | YVGREFCSRSSV | DTWGQGT | Lama |
| | TGGSLRLSCAA | | GKGREWVS | | KNAVYLQMNSVNTEDTA | DF | QVT | |
| | PG | | CAA | | DYYCAA | | | |
| CAB40513.1 | LQESGGDLVQ | SFFKINA | MRWYRQAP | SGGA | TDYADSVRDRFTISMDNA | TTTRSYDDTYRNS | NYWGQG | Lama |
| | AGGSLRLSCAA | | GKQRELVA | | KNTVYLQMNSLKPEDTAA | WVY | TQVT | |
| | SG | | RIT | | YYCAA | | | |
| CAB40515.1 | LQQSGGGSVQ | FSFGDYA | VGWFRQAP | DNGGI | TSYVGSAKGRFTISRDNA | SDYRLGCDYVSD | GSWGQG | Lama |
| | PGGSLRLSCAA | | GKEREQVS | | KKMVYLQMNSLKTEDTA | | TQVT | |
| | SG | | CIN | | VYYCVA | | | |
| CAB40516.1 | LQESGGGSVQ | RTDRSNA | MGWFRQAP | WSGGT | TSYVDSVKGRFIISRDNV | ARTVDPLFRESEY | DYWGQG | Lama |
| | AGGSLRLSCTA | | GKEREFVA | | KKTLYLQMNSLKPEDTAV | | TQVT | |
| | SG | | TIS | | YYCAA | | | |
| CAB40517.1 | LQESGGGLVQ | SISSINV | MGWYRQA | HSGGH | TDYAESVKGRFTISGDAA | VSQWR | AYWGQGT | Lama |
| | AGGSLRLSCAA | | PGKQREWV | SGG | KNTVYLQMNSLKPEDTAV | | QVT | |
| | SE | | ATIV | | YYCNQ | | | |
| CAB40518.1 | LQESGGGSVQ | GAFSGLV | MGWFRQVP | RHGDT | PSYADAVKGRFSISRDNA | RRAFRLSSDY | EYWGQGT | Lama |
| | AGGSLRLSCAA | | GKEREFVA | | KNTVYLQMNSLKPDDTA | | QVT | |
| | SG | | QIN | | VYFCAS | | | |
| CAB40519.1 | LQESGGGLVQ | TIFAVHT | MGFYRQSP | TYRAN | TDYGEPVRGRFTLAKDN | ENYRRWPSTTPE | SYWGQGT | Lama |
| | PGGSLRLSCVA | | GKQRELVAI | | ARNTVTLQMDSLKPEDTA | | QVT | |
| | SG | | HN | | VYYCAL | | | |
| CAB40520.1 | LQESGGGLVQ | LTFGTHV | VGWFRQAP | YNVGS | LLYADSVSGRFTISRDNT | ERAERVADANFV | EYWGQGT | Lama |
| | AGGSLRLSCTA | | GNEREFVA | | KNTVYLQMVSLRPEDTAV | | QVT | |
| | SG | | AIS | | YYCGA | | | |
| CAB40521.1 | LQASGGGSVQ | STLSRYS | MGWFRQG | WSGGR | TLYGDAVKGRFTVSTENA | VRLGDSTVD | EYWGQGT | Lama |
| | AGGSLRLSCSV | | PGKEREFV | | KKMVYLEMTNLTPEDTAV | | QVT | |
| | SG | | AALL | | YYCNA | | | |
| CAB40522.1 | LQASGGGLVQ | FSFDDDYV | IGWFRQAP | WHDSH | INTEDSVKGRFTISGDNA | GSSGLKGPY | DYWGQG | Lama |
| | AGGSLRLSCAA | | GKGREGIA | | KNAVYLQMNSLNPEDTA | | TQVT | |
| | SG | | CIR | | VYFCAA | | | |
| CAB40524.1 | LQASGGGSVQ | SIFMINA | MGWYRQA | SGGI | TDYADSVKGRFTITRDNA | IQLTEWGLAVPEY | DYWGQG | Lama |
| | AGGSLTLSCAA | | PGKEREAL | | KNMVFLQMNSLKPEDTA | | TQVT | |
| | SE | | ASIT | | VYYCNA | | | |
| CAB40525.1 | LQASGGGLVQ | RTLDRYG | IGWLRQAP | ATAGR | TYYADFVKGRFTISRDKV | REFESCSEYAGG | DYWGQG | Lama |
| | PGGSLRLSCAA | | GKDREWVA | | KNTVDLQMNRMTPGDTA | Y | TQVT | |
| | SR | | CIT | | VYFCAS | | | |
| CAB40526.1 | LQASGGGLVQ | TLDTYA | IGWFRQAP | GEDDT | TYYVDSLKDRFTISRDNA | SRGNFGSGWYC | DYWGKGT | Lama |
| | PGGSLRLSCTS | | GKGREAVS | | KNTVSLQMNSLEPDDTA | GNDPQYYYGM | QVT | |
| | GV | | CIS | | VYFCAA | | | |
| CAB40527.1 | LQASGGGLVQ | PAFSAYA | MAWFRQAP | RDSRF | TTYLDSVRDRFAISRDNV | DFHTRGTLSRDE | TYWGQGT | Lama |
| | AGGSLRLSCAY | | GEEREFVA | | KNTVYLQMNSLKPDDTA | ADY | QVT | |
| | SG | | AIN | | VYSCAR | | | |
| CAB40528.1 | LQASGGGLVQ | FTLDNYA | IGWFRQAP | TSDGY | TLYSDSAKGRFTISYDND | EGAIHYCSGDFN | GLRGQGT | Lama |
| | AGGSLRLSCAA | | GKEREGVS | | KNTVYLQMNNLKPEDTA | | QVT | |
| | SG | | CIK | | VYYCAT | | | |
| CAB40529.1 | LQASGGGLVQ | RTFSSYA | IGWFRQDP | GTTRS | TVYGDSVKGRFTISRDNA | TAGSYLAPNSF | GYWGQG | Lama |
| | AGGSLTLSCAA | | GKEREFVA | | ENTVYLQMNSLKPEDTAV | | TQVT | |
| | ST | | AVS | | YYCAA | | | |
| CAB40530.1 | LQASGGGLVQ | GLTFSTYA | MGWFRQAP | RGGKI | SHYADSVKGRFTISRDDA | DDIGGGWLYERS | NYWGQG | Lama |
| | AGDSLRLSCTE | | GKEREFVA | | KNTLYLQMNSLQPEDTAV | WALSRRSY | TQVT | |
| | AS | | AIN | | YFCAA | | | |
| CAB40532.1 | LQASGGGLVQ | RTFSSYA | MGWFRQAP | WSGDS | THYADSVKGRFAISRDNA | DRDTGIGAY | DYWGQG | Lama |
| | AGGSLRLSCVA | | GKEREFVA | | KNTLYLQINSLKSEDTAVY | | TQVT | |
| | SG | | AIH | | YCAK | | | |
| CAB40533.1 | LQASGGGLVQ | RAFESYA | VGWFRQAS | WSGGS | TEYADSAKGRFTISRDNA | TARPFLGVPRITR | EYWGQGT | Lama |
| | AGGSLRLSCAA | | GKEREFVA | | KNTEYLQMNSLKPEDTAL | PNEY | QVT | |
| | SG | | AIN | | YYCAA | | | |
| CAB40535.1 | LQASGGGLVQI | RSVTSINL | ISWYRQAP | RSGL | ITFADSVKGRFSISRDSDK | EGTWYSGPRG | GYWGQG | Lama |
| | GGSLRLSCAAS | | GKQRELVA | | NTVYLQMNNMQPEDTAV | | TQVT | |
| | G | | KVP | | YYCNA | | | |
| CAB40536.1 | LQASGGGLVQ | FTFDDTG | IGWFRQAP | SRDGS | THYAHSVKGRFTITSDNA | EDHKSAASVCNS | DHWGQG | Lama |
| | AGGSLRLSCAA | | GKKREGVA | | KNTVYLQMNSLKPEDTAV | WLN | TQVT | |
| | SG | | CIS | | YICAA | | | |
| CAB40537.1 | LQASGGGLVQ | GTSNSYR | MGWFRQAP | RSGGS | TLYADAAKGRFTISRDNA | DLTDIWEGIREYD | AYWGQGT | Lama |
| | AGGSVRLTCAA | | GKEREFVA | | KNTAFLQMTSLKPEDTAV | EY | RVT | |
| | SG | | SIS | | YYCAA | | | |
| CAB40538.1 | LQASGGGLVQ | PTFSIYA | MGWFRQAP | WSGSS | TRYADSLKGRFTISRDNA | SDGALVVRSDMY | DYWGQG | Lama |
| | AGGSLRLSCAA | | GKEREFVA | | KNTVYLQMNSLKPEDTAV | | TQVT | |
| | ST | | AIH | | YYCAA | | | |
| CAB40716.1 | LQESGGGLVQ | RTFSRYN | MGWFRQAP | WNDG | GADYADSVKGRFTISRDA | DDIFATPGKY | DYWGQG | Lama |
| | AGGSLKLSCTA | | GKEREFVA | | DGTLYLQMNSLKPEDTAV | | TQVTVST | |
| | SR | | AIR | | YYCAL | | | |
| CAB40718.1 | LQESGGGLVQ | RTSNIYA | MGWFRQAP | VDGTS | TYYASSVRGRFTISRDDA | RADAEGWW | DYWGQG | Lama |
| | AGGSLRLSCAA | | GQEREAVA | | KNTLYLIMNSLKPEDTGL | | TQVTVSS | |
| | SG | | AIN | | YYCAT | | | |
| CAB40719.1 | LQESGGGVVLA | FTFEDYA | IGWFRQAP | GSDGR | TRYGKAVQGRVSVSKDN | SPWGGEVYGTPP | IYWGKGT | Lama |
| | GGSLRLSCTVS | | GKERERVG | | AKSTIYLQMNNLDDNDTA | CLHQGM | QVTVSA | |
| | G | | CIS | | VYYCAA | | | |
| CAB40722.1 | LQESGGGSVQ | FKLGYYA | IGWFRQAP | NDGS | TYYADSMKGRFTISRNNA | SEFGTAQPLGIRE | DYWGRGT | Lama |
| | PGGSLRLSCAA | | GKEREGVS | | KNMVYLEMNSLKPEDTA | Y | QVTVSS | |
| | AG | | CIT | | VYYCAM | | | |
| CAB40724.1 | LQESGGGLVQ | LRFSDYV | MGWFRQAP | WDGG | TNYADSVKGRFTMSKDN | TRGRSTRLVLPSL | ESWGQGT | Lama |
| | AGGSLRLSCAA | | GKEREFVA | M | AKNTVYLQMNSLRPEDT | V | QVTVSS | |
| | SG | | VIT | | AVYYCAA | | | |
| CAB40725.1 | LQESGGGLVQ | LLFSSYD | MGWFRQFP | ASGRR | TDYVDSVKGRFTVSRDV | GKSAYRGGAHYT | DYWGQG | Lama |
| | AGGSLALSCAA | | GKEREFVA | | AKNTVFLQMNDLKPEDTA | TGAY | TQVTVSS | |
| | SG | | AIS | | VYYCAG | | | |
| CAB40726.1 | LQESGGGLVQ | IAFQGYA | IGWFRQAP | NGEGN | KYYEDSVKGRFTISRDNT | ALSEVWRGSENL | DYWGQG | Lama |
| | PGGSLRLSCEA | | GKERECVS | | KKTVYLEMNSLKPEDTAV | REGY | TEVTVSS | |
| | SG | | YIE | | YYCAA | | | |
| CAB40727.1 | LQESGGGLVQ | LSFSNYA | MGWFRQG | RSGGG | IYYADSVLGRSTISRDNAK | GNIYPSSNYDLNN | GYWGQG | Lama |
| | PGGSLTLSCSA | | PGKEREFV | | HTVYLQMNSLKPDDTAV | SRMY | TQVTVSS | |
| | SG | | AAIS | | YYCAG | | | |
| CAB40728.1 | LQESGGGLVQ | LPVDYYA | IGWFRQAP | NNDGR | TDYADSVKGRFTISRDNA | GRVPHTMMVLTT | DYWGQG | Lama |
| | PGGSLKLSCAA | | GKEREWVS | | KNTVYLQLNSLKPEDTAV | TAYY | TQVTVSS | |
| | TG | | FIS | | YYCAL | | | |
| CAB40729.1 | LQESGGGLVQ | LIIKDTT | AGWFRQAP | WSNEN | TAYADSVKGRFTISRDNA | RPERTYVITPFSD | SYWGQGT | Lama |
| | AGDSLRLSCAA | | GKNREFVA | | KNTVALQMNGLKPEDTA | DY | QVTVSS | |
| | SG | | GIN | | VYYCTA | | | |
| CAB40730.1 | LQESGGGLVQ | RTFS | MGWFRQAP | WSDSS | TYYTDSVRGRFTISRDNA | QGSLYDDYDGLPI | DYWGQG | Lama |
| | AGGSLRLSCAA | | GKEREFVA | | KNTVYLQMDSLKPVDTAI | KY | TQVTVSS | |
| | SG | | AIN | | YYCAA | | | |
| CAB40731.1 | LQESGGGLVQ | SISSIDY | MMWYRQA | SDGS | TNYADSVKGRFTISRDGA | NVASGLKIL | QYWGQG | Lama |
| | AGGSLTLSCAS | | PGKERDMV | | RDTLYLQMNNLSPEDTAV | | TQVTVSS | |
| | SR | | ARID | | YSCVA | | | |
| CAC07788.1 | QVQLQESGGG | FAFNLYW | MYWFRQAP | PGNGIT | TFYADSVKGRFAISRDNA | DPSYQLADFLTSL | DYSGQGT | Lama |
| | LVQPGGSLRLS | | GKGLEWVS | FN | KNTLYLEMNSLQPEDTAV | PN | QVTVSS | |
| | CAASG | | SAS | | YYCAA | | | |
| CAC07789.1 | QVQLQESGGG | LSFSEFV | MTWFRQAP | WMDD | TYYGSSVKGRFFISKDNA | SRDYYGHNANQY | RYWGQG | Lama |
| | LVQAGESLRLS | | GKEREFVA | R | KNTVYLQMNGLKPEDTA | | TQVTVSS | |
| | CVASG | | AIN | | VYYCAA | | | |
| CAD13187.1 | QVQLVESGGG | YAYSSNC | MGWFRQAP | SGGGS | TYYADSVKGRFTISQDNA | HWKAYYNCGMWI | NNWGQG | Lama |
| | SVQAGGSLRLS | | GKEREGVA | | KNTVYLQMNSLKPEDTA | AY | TQVTVSS | |
| | CAASG | | GIY | | MYYCAV | | | |
| CAD22457.1 | LQESGGGLVQ | RTFSSYA | MGWFRQAP | WSGTI | TSYADSVKGRFTISRDNA | ALGYGSRHLDAY | AYWGLGT | Lama |
| | AGGSLRLSCAA | | GKEREFVA | | KNMVYLQMNSLKPEDTA | | QVT | |
| | SG | | AIS | | VYYCAA | | | |
| CAD22458.1 | LQESGGGLVQ | SYFSINR | MGWYRQA | SGGS | TNYADSVKGRFTISRDNA | NAYHSGNLY | TYWGQGT | Lama |
| | AGGSLRLSCAA | | PGNQRELV | | KNTVYLQMNSLKPEDTAV | | QVT | |
| | SE | | ASIS | | YLCNV | | | |
| CAD22459.1 | LQESGGGLVQ | STSSRINA | MGWYRQA | DGGS | TTYADSVKGRFTISRDNA | RVRFFTTYV | NNWGQG | Lama |
| | AGGSLTLSCAA | | PGKQRELV | | KNTMSLLMNSLQPEDTA | | TQVT | |
| | SG | | ASIN | | VYYCNA | | | |
| CAD22461.1 | LQESGGGLVQ | STFSINA | MGWYRQA | SGGG | TNYADSVKGRFTISRDNA | VQQSWTRGGLRS | DYWGQG | Lama |
| | AGGSLRLSCAA | | PGKQRELV | | KNTLYLQMNSLKPEDTAV | Y | TQVT | |
| | SV | | ADIS | | YYCNA | | | |
| CAD22462.1 | LQESGGGLVQ | STFSINA | MGWYRQA | YGGS | TKYADSVKGRFTISRDNA | EGSSWKKF | DYWGQG | Lama |
| | AGGSLRLSCAA | | PGKQRELV | | KNTVYLQMNSLKPEDTAV | | TQVT | |
| | SG | | ALIS | | YYCNA | | | |
| CAD22464.1 | LQESGGGLVQ | SIVSFNA | MAWYRQAP | NVG | TNYAGSVKGRFTISRDTA | DS | IGWGQGT | Lama |
| | PGGSLRLSCQA | | GKQRELVA | | KNTVYLQMNSLKPEDTAV | | QVT | |
| | ST | | LIT | | YYCNA | | | |
| CAD22465.1 | LQQSGGGLVQ | SISRNG | MDWYRQVP | SRGN | TNYADSVKGRFTISRDLA | R | GYWGQG | Lama |
| | PGGSLKLSCAA | | GKEREWVA | | KNMVDLQMNSLKPEDTA | | TQVT | |
| | SG | | TIT | | VYYCRW | | | |
| CAD22466.1 | LQQSGGGLVQ | STAKINA | MGWYRQA | SGGF | TTFASSVKGRFTISRDNA | LAPS | SYWGQGT | Lama |
| | AGGSLRLSCVA | | PGKSREFV | | KNTMYLQMNDLKLDDTG | | QVT | |
| | SG | | AGIT | | VYSCNA | | | |
| CAD22468.1 | LQESGGGLVQ | RTFGIYQ | TAWFRQVP | GYGTS | TYYADSVKGRFTISRDNA | DQTSLQLTKVSAY | RYWGQG | Lama |
| | AGGSLRLSCAP | | GKEREFVA | | KNTVYLQMNSLKPEDTAV | | TQVT | |
| | ST | | TIS | | YYCAA | | | |
| CAD22469.1 | LQESGGGLVQ | STSTVNG | MGWYRQTP | TGGT | TTYADSVKGRFTISRDNA | KNTIPYK | EFWGAGV | Lama |
| | AGGSLRLSCVV | | GNQRELVA | | KNTVYLQMDSLKPEDTAV | | QVT | |
| | SG | | LQS | | YYCNY | | | |
| CAD22470.1 | LQQSGGGLVQ | GTFTMYA | IDWLRQAP | AGGGS | TFYAESVKGRFTISRDNS | RRGIATMAPTSY | ATWGQGT | Lama |
| | AGGSLRLSCAA | | GKEREFVG | | KNTVSLQMNNLKPEDTA | | QVT | |
| | SG | | SIS | | VYYCAA | | | |
| CAD22477.1 | LQESGGGLVQ | FAFSINA | MDWYRQVP | SGGS | TNYADAVKGRFTISRDNA | AYKHNR | DSWGQG | Lama |
| | TGGSLRLSCAA | | GKEREVVA | | KQLVFLQMNNLKPEDTAV | | TQVT | |
| | SG | | RIS | | YYCNS | | | |
| CAD22472.1 | LQESGGGLVQ | STFSINA | ARWYRQAP | IGGT | TNYADSVKGRFTISRDNA | PGPYSDYETMAY | DYWGQG | Lama |
| | AGGSLRLSCAA | | GKQRELVA | | KNTVYLQMNSLKPEDTAV | EY | TQVT | |
| | SG | | AIS | | YYCNA | | | |
| CAD22473.1 | LQESGGGLVQ | RTFSNYH | MGWFRQAA | GTGSI | THYADSVKGRFTISGDSA | TVLARRPAPEAY | DYWGQG | Lama |
| | TGGSLRLSCAA | | GKEREFVA | | KNTVYLQMNNLKPEDTA | | TQVT | |
| | SG | | HMT | | VYYCAA | | | |
| CAD22479.1 | LQQSGGGLVQ | RTFSDYI | MGWFRQAP | WTGAI | TYVVDAVKGRFSISRDNA | GRSGVTVRNS | ESWGQGT | Lama |
| | AGGSLRLSCTA | | GKERERVA | | KNTVYLQMNGVKPEDTA | | QVT | |
| | SG | | TIN | | VYYCAA | | | |
| CAD22476.1 | LQESGGGLVQ | STFSINA | IRWYRQAP | IGGT | TNYADSVKGRFTISRDNA | PGPYSDYETMGY | DYWGQG | Lama |
| | AGGSLRLSCAA | | GKQRELVA | | KNTVYLQMNSLKPEDTAV | EY | TQVT | |
| | SG | | AIS | | YYCNA | | | |
| CAD22482.1 | LQESGGGLVQ | RTFSNYT | MGWFRQAP | GSGKL | AYVADSVKGRFIISRDNA | TILARRPSPGAY | DYWGQG | Lama |
| | AGDSLRLSCVA | | GKEREFVA | | KNTVYLQMNNLKPEDTAL | | AQVT | |
| | SG | | HIT | | YYCAA | | | |
| CAD22480.1 | LQQSGGGLVQ | RAFSSYH | MGWFRQAA | GTGGS | THYADSVKGRFTISRDNA | TILAQRPTPGAY | EYWGPGT | Lama |
| | AGGSLRLSCAA | | GKEREFVA | | KNTVYLQMNNLKPEDTA | | QVT | |
| | SG | | HMT | | VYYCAA | | | |
| CAE84869.1 | DVQLQASGGG | PIFDKNL | MGWGRQA | GSGG | TNYASSVEGRFTISRDNA | AF | AIWGQGT | Lama |
| | VVQPGGSLRLS | | PGKQREYV | | KKTVYLQMNDLKPEDTAV | | QVTVSS | |
| | CAAHD | | ATIS | | YYCNS | | | |
| CAF32436.1 | LQESGGGLVQ | RSDSTDT | MTWFRQAP | WIAN | TYYADSVKGRFTASRDYT | ADHGSRWWRQV | DYWGQG | Lama |
| | AGGSLRLSCAA | | GKEREFVA | | KNTVYLQMNNLTPEDTAV | ADITTY | TQVT | |
| | SG | | SVS | | YYCAA | | | |
| CAF32424.1 | LQESGGGSVQ | RTASNWA | THWFRQAP | SSGGY | TYYADSVKGRFTISRDNT | DSVNRAIMLGTSL | DYWGQG | Lama |
| | AGGSLRLSCAA | | GKEREFVA | | KSTVYLQMNSLKPEDTAV | | TQVT | |
| | SG | | AIS | | YYCAA | | | |
| CAF32421.1 | LQQSGGGLVQ | RTASSWA | IHWFRQAP | SSGEY | TYYADSVKGRFTISRDNT | DSSYRAIMLGRSL | DYWGQG | Lama |
| | TGGSLRLSCAA | | GKEREFVA | | KTTVYLQMDSLKPEDTAV | | TQVT | |
| | SG | | AIS | | YYCAA | | | |
| CAF32422.1 | LQQSGGGSVQ | RTASSWA | IHWFRQAP | SSGDY | TYYADSVKGRFTISRDNT | DSNYRAILLGTSL | NYWGQG | Lama |
| | AGGSLRLSCAA | | GKEREFVA | | KVTVYLQMNSLKPEDTAV | | TQVT | |
| | SG | | AIS | | YYCAA | | | |
| CAF32423.1 | LQQSGGGLVQ | RSFRTYA | MGWFRQAP | WSDSG | TYYADSVKGRFTISRDNA | DPSYARIVGSGRY | EYWGQGT | Lama |
| | NGDSLRLSCAA | | GKEREIVGA | | KNTLYLQMDSLKPEDTAV | II | QVT | |
| | SG | | LS | | YYCAA | | | |
| CAF32427.1 | LQESGGGLVQ | SIFSINA | AGWYRQAP | STGS | TNYADSVKGRFTISRDNA | DGIAVLAGRTDQY | DFWGQGT | Lama |
| | PGGSLRLSCAA | | GKQRELVA | | KNTVYLQMNSLKPEDTAV | | QVT | |
| | SG | | YMS | | YYCNA | | | |
| CAF32439.1 | LQESGGGLVQ | NISSVSF | MAWYRQTP | SGGY | PVYTDSVKGRFTISRDNA | AARTWFYNY | NYWGQG | Lama |
| | PGGSLRLSCAA | | GTQRELVA | | KNTLYLQMNGLKPEDTAV | | TQVT | |
| | SG | | QIP | | YYCYA | | | |
| CAF32430.1 | LQESGGGLVQ | SVASINV | MGWFRQVP | WSSGN | TYYHHFVEGRFTVSRDR | DTGLQYFSYAYS | VYWGQGT | Lama |
| | AGGSLRLSCAA | | GREREFVG | | AKNTVYLQMNSLKSEDTA | RRPSDY | QVT | |
| | SG | | AIG | | IYYCAA | | | |
| CAF32431.1 | LQESGGGLVQ | SVASINV | MGWFRQVP | LSGGN | TYYHHSVKGRFTVSRDR | DTGLAYFSYEYSR | GYWGQG | Lama |
| | AGGSLRLSCAA | | GREREFVG | | AKNTVYLQMDSLKSEDTA | RPSDY | TQVT | |
| | SR | | AIG | | IYYCAA | | | |
| CAF32432.1 | LQESGGGLVQ | RTDT | MTWFRQAP | WIDN | TNYADSVKGRFTVSRDY | ADHGSRWWRQM | DYWGQG | Lama |
| | AGGSLRLSCAA | | GKEREFVA | | TKNTMYLQMNNLAPEDT | ADATTY | TQVT | |
| | SG | | SIS | | AVYYCAA | | | |
| CAF32437.1 | LQQSGGGSVQ | RTASNWP | IHWFRQAP | WSGGY | TYYADSVKGRFTISRDNT | DSVNRAILLGTSL | DYWGQG | Lama |
| | AGGSLRLSCAA | | GKEREFVA | | KSTVYLQMNSLKPEDTAV | | TQVT | |
| | SG | | AIS | | YYCAA | | | |
| CAF32438.1 | LQQSGGGLVQ | SIFSINS | MGWYRQA | SGGR | INYADSVKGRFTISRDNA | DIIATLVGRKDSY | DFWGQGT | Lama |
| | PGGSLRLSCAA | | PGKQRELV | | KNTVYLQMNSLKPEDTAV | | QVT | |
| | SG | | AYIT | | YYCNA | | | |
| CAF32447.1 | LQESGGGLVQ | PIFSPNT | MAWFRQAP | YGGG | TTYVDSVKGRFTISRDNT | WSQWQSE | TYWGQGT | Lama |
| | PGGSLRLSCTA | | GKQRELVA | | KKMMSLQMNSLKPEDTA | | QVT | |
| | SG | | TIT | | VYYCAL | | | |
| CAF32443.1 | LQQSGGGSVQ | PIISPNT | MGWFRQAP | YNGG | TTYADSVKGRFTISRDNT | WSQWESE | TYWGQGT | Lama |
| | PGGSLRLSCAA | | GKQRELVA | | KKMMSLQMNSLNPDDTA | | QVT | |
| | SG | | TIT | | VYYCTL | | | |
| CAF32445.1 | LQESGGGLVQ | PITSPNT | MGWFRQAP | YGGG | TTYADSVKGRFTISRDNA | WNQWESE | SYWGQGT | Lama |
| | PGGSLRLSCVA | | GKQRELVA | | KKTMSLQMNSLKPEDTA | | QVT | |
| | SG | | TIT | | VYYCNL | | | |
| CAH18009.1 | LQESGGGLVQ | RTFSSYH | MGWFRQAA | SDYN | TYYADSVKGRFTISRDNA | RTVFSGPQYYTR | GYWGQG | Lama |
| | AGGSLRLSCEA | | GKEREFVA | | KNTVYLQTNSLKPEDTAV | AHEY | TQVT | |
| | SG | | TIS | | YYCAS | | | |
| CAH18015.1 | LQESGGRLVEA | GTFSWYA | MGWFRQAP | RGGGS | TYYADSVKGRFTISRDNA | GRGSPSDTGRPD | DYWGQG | Lama |
| | GGSLRLSCAVS | | GKEREFVA | | KNTVYLQMNSLKPEDTAV | EY | TQVT | |
| | G | | TVS | | YYCAA | | | |
| CAH18018.1 | LQESGGRLVEA | GTFSWYA | MGWFRQAP | RGGGS | IYYADSVKGRFTISRDNA | GRGAPSDTGRAD | DFWGQGT | Lama |
| | GGSLRLSCAAS | | GKEREFVA | | KNTVYLQMNSLKPEDTAV | EY | QVT | |
| | G | | TVS | | YYCAA | | | |
| 1hcv_A | DVQLQESGGG | RTGSTYD | MGWFRQAP | WDSAR | TYYASSVRGRFTISRDNA | GEGGTW | DSWGQG | Lama |
| | LVQAGGSLRLS | | GKERESVA | | KKTVYLQMNSLKPEDTAV | | TQVTVSS | |
| | CAASG | | AIN | | YTCGA | | | |
| 1qd0_A | QVQLQESGGG | RAASGHG | MGWFRQVP | WSGKE | TWYKDSVKGRFTISRDNA | RPVRVADISLPVG | DYWGQG | Lama |
| | LVQAGGSLRLS | HYG | GKEREFVA | | KTTVYLQMNSLKGEDTAV | F | TQVTVSS | |
| | CAASG | | AIR | | YYCAA | | | |
| 1shm_E | DVQLQESGGG | ATGSTYD | MGWFRQAP | WGSAG | TYYASSVRGRFTISRDNA | GRIGRSVFNLRRE | TWWGQG | Lama |
| | LVQAGGSLRLS | | GKERESVA | | KKTVYLQMNSLKPEDTAV | SWV | TQVTVSS | |
| | CAASG | | AIN | | YTCGA | | | |
| 1sjx_A | QVQLQESGGG | NIFRIND | MGWYRQA | SGGS | TKYADSVKGRFTISKDNA | EDRHRIGTV | GYWGQG | Lama |
| | LVQAGGSLRLS | | PGTQRELV | | KNTVYLQMNSLKPEDTAV | | TQVTVSS | |
| | CQASG | | AAIT | | YYCAA | | | |
| 1u0q_B | EVQLQESGGG | RTFSTYA | VGWFRQAP | TRGGR | TYYADSVKGRFTIAIDNAK | RMPYSGDYRSSG | DYWGQG | Lama |
| | LVQAGGSLRLS | | GKEREFVG | | NTVYLQMNSLKLDDTAVY | TY | TQVTVSS | |
| | CAASG | | YFG | | YCAV | | | |
| 2x1o_B | QVQLQESGGG | RNLRMYR | MGWFRQAP | WSSDT | IYYADSVKGRFIISRDNAK | GAGWAGTMTDY | NYWGQG | Lama |
| | LVQAGGSLRLS | | GKEREFVG | | NTVYLQMNSLKPEDTAVY | | TQVTVSS | |
| | CAAAG | | TMV | | YCAA | | | |
| 2x1p_D | QVQLQESGGG | RTFTSFA | MGWFRQAP | RSGTL | TRYADSAKGRFTISVDNA | DLHRPYGPGTQR | DSWGQG | Lama |
| | LVQAGGSLRLS | | GKEREFVA | | KNTVSLQMDNLNPDDTA | SDEY | TQVTVSS | |
| | CAASG | | SIS | | VYYCAA | | | |
| 2x1q_B | QVQLQESGGG | RTFSNYR | MGWFRQAP | QSGAA | TAYADSVKGRFTFSRDN | SSRVFYTEVLQTT | DYWGQG | Lama |
| | LVQPGGSLRLS | | GKEREFVA | | AKNLLYLEMLSLEPEDTA | TGY | TQVTVSS | |
| | CAASG | | TIS | | VYYCAA | | | |
| 2xa3_A | AVQLQESGGG | RTSSSHD | MGWFRQAP | WSGGT | TNYVDSVKGRFDISKDNA | KWRPLRYSDNPS | NYWGQG | Lama |
| | LVQAGGSLRLS | | GKEREFVA | | KNAVYLQMNSLKPEDTA | NSDY | TQVTVSS | |
| | CTVSA | | AIS | | VYYCAA | | | |
| 3ezj_H | QVQLQESGGG | SIFSINS | MDWDRQA | SGGS | TNYADSVKGRFTISRDNA | NVKTWAGMTR | DYWGQG | Lama |
| | LVQAGGSLRLS | | PGKQRELV | | KNTVYLQMNSLKPEDTAV | | TQVTVSS | |
| | CAASG | | ATIT | | YYCNA | | | |
| 3k7u_A | QVQLQESGGG | RTFSNNA | MGWFRQAP | WTGGL | LFYADSVNGRFTISRDNA | RPQGDYVTAHY | DYWGQG | Lama |
| | LVQAGGSLTLS | | GKEREFVA | | KRTVTLQMNSLKPEDTAV | | TQVTVSS | |
| | CAASG | | AIS | | YYCAA | | | |
| 3k80_B | QVQLQESGGG | RAFSSYG | MGWFRQAP | RSGGL | TQYAESLKGRFAISRDNA | DLYGLGSHMENE | DSWGQG | Lama |
| | LVQAGDSLRLS | | GKERAFVA | | KNTVYLQMGSLKPEDTA | Y | TQVTVSS | |
| | CVASG | | AIS | | VYYCAG | | | |
| 3k81_B | EVQPQESGGG | ITFASEA | WGWYRRA | NEGR | TNYVDSVKGRFTVSRDN | NLQTGTLSGAR | LYWGQGT | Lama |
| | LAQAGGSLRLS | | PGKQRELIA | | AKNVMYLQMNSLKPEDT | | QVTVSS | |
| | CVVSG | | AIN | | AVYYCNA | | | |
| 3rjq_B | AVQLQESGGG | RISSSYD | MGWFRQAP | WSGGT | TDYADSVKGRFAISKDNA | KWRPLRYSDYPS | DYYDWG | Lama |
| | LVQAGGSLRLS | | GKEREFVA | | KNAVYLQMNSLKPEDTA | NS | QGTQVTV | |
| | CTASG | | AIS | | VYYCAA | | | |
| 3stb_B | QVQLQESGGG | RTLSSYA | MGWFRQAP | RSGS | TFYADAVKGRFTISRDNA | DRFSPVVPGPIPV | DSWGQG | Lama |
| | LVQAGGSLRLS | | GKEREFVA | | KNTVYLQMNSLKPEDTAA | NTV | TQVTVSS | |
| | CAASG | | AIN | | YYCAA | | | |
| 4aq1_D | QVQLQESGGG | RTSSAYA | MGWFRQAP | SKGGS | TYYGASMKGRFTISRDNA | SDKYNFDTSHAG | GYWGQG | Lama |
| | LVQAGGSLRLS | | GKEREFVA | | KNTVYLQMNGLAPEDTA | Y | TQVTVSS | |
| | CAASG | | GIS | | VYYCAA | | | |
| 4y8d_D | QVQLQESGGG | YTSR | MGWFRQAP | RQSNL | SYYSDSVRGRFTISQDNA | TTDCAAFVERATA | ITAGQGT | Lama |
| | SVQAGGSLRLS | | GAEREGVA | | KTTAFLLMSSLKPEDTAIY | | QVTVSS | |
| | CGASE | | CIH | | YCAT | | | |
| 4cdg_D | QVQLQESGGG | IWFSINN | MAWYRQTP | SAGT | TNYVDSVKGRFTISRDDA | VADYDMGFQ | SFWGRGT | Lama |
| | LVQAGGSLRLS | | GKQRERIAI | | KNTMYLQMNSLIPEDTAV | | QVTVSS | |
| | CAASG | | IT | | YYCNL | | | |
| 4dka_B | QVQLQESGGG | RTSSLYS | MGWFRQAP | RNGAN | TYYTDSVKGRFTISRDNA | DRFPTMEVVTIMT | DYWGQG | Lama |
| | LVQAGGSLRLS | | GKEREFVA | | KNTVELQMNSLKPEDTAV | NEY | TQVTVSS | |
| | CAASG | | AIS | | YYCAA | | | |
| 4eig_B | QVQLQESGGG | IIFSVYK | MTWYRQAP | TNNN | TMTVDSVKGRFTISRDNV | NRGLAGP | AYWGQGT | Lama |
| | LVQAGGSLRLS | | GKERELVAL | | QNTVYLEMNNLKPEDTA | | QVTVSS | |
| | CKASG | | IT | | VYYCNA | | | |
| 4ej1_D | QVQLQESGGG | RTFSSYA | MGWFRQTP | WGGST | TLYADSVKGRFTMSRDN | DGSQYRSTYSFR | GSWGQG | Lama |
| | LVQAGGSLRLS | | GKEREFVA | | AKNTVYLQMNSLKPEDTA | DKPDY | TQVTVSS | |
| | CTASG | | AIT | | VYYCAA | | | |
| 4fhb_D | QVQLQESGGG | RTFSSYA | MGWFRQAP | WSGSN | TYYADSAKGRFTISRDNA | PGRPHGSSWSLN | DYWGQG | Lama |
| | LVQAGGSLRLS | | GKERDFVA | | KNTVYLQMNSLKPEDTAI | KKGQGY | TQVTVSS | |
| | CEASG | | VIS | | YYCAA | | | |
| 4gft_B | EVQLQESGGG | ERAFSNYA | MGWFRQAP | GSGRS | QYYADSVKGRFTISRDNA | RVVPVFSDSTKG | VYWGQGT | Lama |
| | TVQPGGSLKLS | | GQEREFVA | | MNAVYLQMNSVKAEDTA | Y | QVTVSS | |
| | CSAAP | | GIT | | VYYCAA | | | |
| 4grw_J | EVQLVESGGGL | FTLDYLA | IGWFRQAP | SSGQY | TYYADSVKGRFTISRDNA | DPECYRVRGYYN | DYWGQG | Lama |
| | VQPGGSLRLSC | | GKEREGVS | | ESTVYLQMNSLKPEDTAV | GEY | TQVTVSS | |
| | AASG | | CVS | | YYCAT | | | |
| 5mzv_D | EVQLVESGGGL | RTFSWSA | VGWFRQAP | WSGGS | PYYADSVKDRFTISRDNA | TSLFPTSRGSHY | DTWGQGT | Lama |
| | VQAGGSLRLSC | | GKEREFVA | | KNTVYLQMNSLRPEDTA | | QVTVSS | |
| | AASG | | AIR | | VYLCGE | | | |
| 4hem_G | QVQLVESGGG | STFSNYA | MGWFRQAP | QTGSH | TYYRNSVKGRFTISRDNA | GDNYYYTRTYEY | DYWGQG | Lama |
| | LVQAGGSLRLS | | GPEREFVA | | KNTVYLQMNNMKPEDTA | | TQVTVSS | |
| | CAASE | | TIS | | VYYCAA | | | |
| 4i13_B | QVQLQESGGG | RLTVDYA | IGWFRQAP | WGGGL | TVYGESVEGRFTISRDIAK | SRISYRVWNTIPY | TLWGRGT | Lama |
| | LVQAGASLRLS | | GKEREFVA | | NTMNLQMNVLRPEDTAN | NKL | QVTVSS | |
| | CAASE | | AIS | | YYCAA | | | |
| 4i1n_B | QVQLQESGGG | RLTVDYA | IGWFRQAP | WGGGL | TVYGESVEGRFTISRDIAK | SRISYAVWNTIPY | TLWGRGT | Lama |
| | LVQAGASLRLS | | GKEREFVA | | NTMNLQMNVLRPEDTAN | NKL | QVTVSS | |
| | CAASE | | AIS | | YYCAA | | | |
| 4idl_A | KVQLQQSGGG | NTASIRA | MGWYRRAP | TTGT | ADYGDFVKGRFTISRDNA | DGRRFDGARWR | ESWGQGT | Lama |
| | AVQTGGSLKLT | | GKQREWVA | | NNAATLQMDSLKPEDTA | EY | QVTISS | |
| | CLASG | | SLT | | VYYCNA | | | |
| 4n9o_B | AAQLQESGGG | RTFSSYN | MGWFRQAP | SSGDK | SDYTDSVKGRFTISRDNA | GLGIYIIRARGGY | DHWGQG | Lama |
| | LVQPGGSLRLS | | GKGREFVA | | KNTMYLQMNNLKPEDTA | | TQVTVSS | |
| | CAASG | | SIT | | TYYCAR | | | |
| 4krm_L | QVKLEESGGG | RTSRSYG | MGWFRQAP | WRGDS | TGYADSVKGRFTISRDNA | AAGSAWYGTLYE | DYWGQG | Lama |
| | SVQTGGSLRLT | | GKEREFVS | | KNTVDLQMNSLKPEDTAI | Y | TQVTVSS | |
| | CAASG | | GIS | | YYCAA | | | |
| 4kro_B | QVQLQESGGG | RTFSSYA | MGWFRQAP | WSGGY | TYYTDSVKGRFTISRDNA | TYLSSDYSRYALP | DYWGQG | Lama |
| | LVQPGGSLRLS | | GKQREFVA | | KTTVYLQMNSLKPEDTAV | QRPLDY | TQVTVSS | |
| | CAASG | | AIR | | YYCAA | | | |
| 4krp_B | EVQLVESGGGL | RTFSSYA | MGWFRQAP | WSSGS | TYYADSVKGRFTISRDNA | GYQINSGNYNFK | DYWGQG | Lama |
| | VQAGGSLRLSC | | GKEREFVV | | KNTMYLQMNSLKPEDTA | DYEY | TQVTVSS | |
| | AASG | | AIN | | VYYCAA | | | |
| 4laj_M | EVQLVESGGGL | FTLDYYS | IGWFRQAP | DSDGR | TYYADSVKGRFTISRDNA | DCTVDPSLLYVM | DYYGKGT | Lama |
| | VQPGGSLRLSC | | GKEREGVS | | KNTVYLQMNSLKPEDTAV | | QVTVSS | |
| | AASG | | CIS | | YYCAT | | | |
| 4m3k_B | QVQLQESGGG | SISSITT | MGWYRQD | SVGD | TTYAGSVKGRFTISRDNA | FMSTNSGRTG | SFWGQGT | Lama |
| | LVQPGGSLRLS | | PGKGRELV | | KNTVYLEMSSLKPEDTAV | | QVTVSS | |
| | CAASG | | ALIN | | YYCNA | | | |
| 4n1h_D | QVQLQESGGG | RTFSSYA | MGWFRQAP | RSGGD | TKYADSVKGRFAISRDND | TTYASLSDTYIGE | DDWGQG | Lama |
| | LVQAGASLKLS | | GKEREFVA | | KNTVWLRMNSLKPEDTA | HIY | TQVTVSS | |
| | CAASG | | AIS | | VYYCAA | | | |
| 4nc1_D | QVQLVESGGG | RTFSMDP | MAWFRQPP | STGRT | TYYADSVKGRFTISRDNA | APYGANWYRDEY | AYWGQGT | Lama |
| | LAQAGGSLRLS | | GKEREFVA | | KNTVYLQMNSLKPEDTAV | | QVTVSS | |
| | CAASG | | AGS | | YYCAA | | | |
| 4nc1_F | QVKLEESGGGL | RTFSRYP | VAWFRQAP | STGTS | TYYADSVKGRFTISRDNA | NSQRTRLQDPNE | DYWGQG | Lama |
| | VQAGGSLRLSC | | GAEREFVA | | KVTVYLQMNNLKREDTA | Y | TQVTVSS | |
| | AASE | | VIS | | VYFCAV | | | |
| 4nc2_B | QVQLVESGGG | LTFSRYV | MGWFRQAP | WGGT | PNYADSVKGRFTISRDNS | GLGWDSRYSQSY | NYWGQG | Lama |
| | LVQAGGSLRLS | | GKEREFVA | | KNTQYLQMNSLKPEDTA | | TQVTVSS | |
| | CAASG | | AIT | | VYYCAA | | | |
| 4ocn_F | QVQLQESGGG | RTFSSTV | MAWFRQAP | WSGGN | TYYADSVKGRFTISRDNA | GTYYGTLSYKY | DFWGRGT | Lama |
| | LVPAGGSLRLS | | GKEREFVA | | RNTVYLQMNSLKPEDTA | | QVTVSS | |
| | CVDSG | | TIR | | VYYCAG | | | |
| 4orz_C | EVQLVESGGGL | FTFGTSN | MAWLRQAP | ISGY | TDYADSVKDRFTISRDNA | RVGSEY | DLWGQGT | Lama |
| | VQAGGSLRLFC | | GKRREWVA | | KNTVSLQMNSLKPEDTAI | | QVTVSS | |
| | AASG | | LIT | | YFCAR | | | |
| 4p2c_K | QVQLQESGGG | SIFRLST | MGWYRQA | SYGD | TNYRDSVKGRFTISRDNA | NIEAGTYYGPGR | DYWGQG | Lama |
| | LVQAGGSLRLS | | PGKQREFV | | KNTVYLQMNSLKPEDTAV | | TQVTVSS | |
| | CAVSG | | ASIT | | YYCNA | | | |
| 4pir_J | DVQLVESGGG | SLFSILR | MDWYRQAP | RDAAG | TNYADSVKGRFTISRDSA | DARTITGRA | DYWGQG | Lama |
| | LVQPGGSLRLS | | GKERELVA | YADS | KNTVYLQMNSLKPEDTAV | | TQVTVSS | |
| | CAYSG | | GIT | | YYCNA | | | |
| 4poy_A | QVQLVESGGG | YPHPYLH | MGWFRQAP | SGGGG | TLYADSVKGRFTISRDKG | GGYQLRDRTY | GHWGQG | Lama |
| | LVQAGGSLRLS | | GKEREGVA | | KNTVYLQMDSLKPEDTAT | | TQVTVSS | |
| | CAASG | | AMD | | YYCAA | | | |
| 4qlr_B | DVQLVESGGG | RTFSDYA | LGWFRQAP | WSGGS | TYYADSVQGRFTISRDND | DKYYTGPGGESV | DYWGRGT | Lama |
| | LVHPGGSLRLS | | GKDREFVA | | KNSVYLQMNSLKPEDTA | Y | QVTVSS | |
| | CAASG | | AIS | | VYYCAA | | | |
| 4qo1_A | QVQLQESGGG | RTFSTYA | MGWFRQAP | WSGTT | TYYAESVKDRTTISRDNA | HPQRGWGSTLG | TYWGQGT | Lama |
| | LVQAGGSLRLS | | GREREFLA | | KNTVYLEMNNLNADDTGI | W | QVTVSS | |
| | CAASE | | QIN | | YFCAA | | | |
| 4w81_A | EVQLVESGGGL | RTFSRAV | MGWFRQAP | AAPGT | AFYADSVRGRFSISADSA | DLKMQVAAYMNQ | DYWGQG | Lama |
| | VQAGDSLRLSA | | GKEREFVA | AYY | KNTVYLQMNSLKPEDTAV | RSV | TQVTVSS | |
| | TASG | | AIS | | YYVAA | | | |
| 4w6w_B | QVQLQESGGG | YTSGRDS | MGWFRQAP | TSGI | VNYADSVKGRFTISQDSA | GPFVYGRGCLGQ | SYWGQGT | Lama |
| | SVQAGGSLRLS | | GKEREGVA | | KKTLYLEMNSLKPEDTAL | AFY | QVTVSS | |
| | CAASG | | CID | | YSCAT | | | |
| 4w6y_B | QVQLQESGGG | YTYSSNC | MAWFRQVP | TRGGI | TYYADSVKGRFTISRDNA | VREATYSDNRCS | DYWGQG | Lama |
| | SVQAGGSLRLS | | GKEREGVA | | KNTVSLQMNSLKPEDTAT | VRSYTY | TQVTVSS | |
| | CAASG | | SIN | | YYCAA | | | |
| 5m95_D | QVQLQESGGG | SIFSIDT | ANWYRQPP | RDGN | ANYADSVKGRFTISRDRA | AIRTTVRTSAQ | EYWGQGT | Lama |
| | LVQAGGSLRLS | | GMQRELVA | | RNTVYLQMNSLKPEDTG | | QVTVSS | |
| | CAASR | | TIT | | VYYCNA | | | |
| 5o04_D | QVQLQESGGG | SIFSIYA | MGWYRQA | SGGG | TNYADSVKGRFTISGDNA | EDYSAYAPPS | GSRGRGT | Vicugna |
| | LVQPGGSLRLS | | PGKQRELV | | KNTVYLQMNSLKPEDTAV | | QVTVSS | |
| | CAASG | | ASIS | | YYCKR | | | |
| 4zg1_F | QVQLQESGGG | STFGIRT | MGWYRQA | SGGS | TDYADSVKGRFTISRDNA | RVGITML | AHWGQG | Lama |
| | LVQAGGSLRLS | | PGKQRDLV | | KNTVYLQMDSLKPEDTAI | | TQVTVSS | |
| | CAASG | | AIIS | | YYCNA | | | |
| 5bop_C | QVQLQESGGG | GTFSTYG | MGWFRQAP | WTGAN | TYYADSVRGRFTISRDNA | RRWLGGSYFDPG | DFWGQGT | Lama |
| | LVQAGGSLRLS | | GKEREFVA | | KNTVYLEMNSLKPEDTAV | NY | QVTVSS | |
| | CAASG | | ASS | | YYCAA | | | |
| 5da4_C | QVQLQESGGG | RTFSSDV | MGWFRQAP | RSGGK | SYNADSVKGRFTISRDNA | GDTAITSWYGY | DYWGQG | Lama |
| | LVQAGGSLRLS | | GKEREFVA | | KNTVSLQMNSLKPEDTAV | | TQVTVSS | |
| | CAASG | | AVT | | YYCAA | | | |
| 5dfz_E | QVQLQESGGG | PFSPNS | MGWYRQA | IDGR | TNYQDSVKGRFTISRDYV | ETRGF | MHWGQG | Lama |
| | LVQPGGSLRLS | | PGKQRELV | | KNTAYLQMNNLKPDDTA | | TQVTVSS | |
| | CAPSG | | AVMT | | VYICNA | | | |
| 5f1k_D | DVQLQESGGG | RTFRNYP | MAWFRQAP | WVGAS | TLYADFAKGRFTISRDNA | GRGIVAGRIPAEY | ADWGQG | Lama |
| | LVQAGGSLRLS | | GKEREFVA | | KNTVYLQMNSLKPEDTAV | | TQVTVSS | |
| | CTGSG | | GIT | | YSCAA | | | |
| 5f1o_B | DVQLQESGGG | SREDNYA | MGWFRQAP | WSSGT | TRYLDTVKGRFTISRDNA | RYQPRYYDSGDM | DNWGQG | Lama |
| | LVQAGHSLRLS | | GKEREFVA | | KSTVYLQMNSLKPEDTAV | DGYEY | TQVTVSS | |
| | CVGSG | | AIS | | YYCAA | | | |
| 5f7n_D | QVQLQESGGG | SIFSGNV | MGWYRQA | PQGV | PNYADSVKGRFTISRDNA | LPNY | RSWGQG | Vicugna |
| | LVQPGGSLRLS | | PGKLREWV | | KNMLYLQMSSLKPEDTAL | | TQVTVSS | |
| | CAASG | | AAIT | | YYCNR | | | |
| 5f7l_D | QVQLQESGGG | SIYSLIA | MGWYRQA | SGST | TYYADSVKGRFTISRDNA | YSDRLTDCSNCE | DYWGQG | Lama |
| | LVQPGGSLRLS | | PGKEHELV | | KNTLYLQMNSLKPEDTA | A | TQVTVSH | |
| | CAASG | | ATIS | | MYYCAA | | | |
| 5g5x_B | QVQLQESGGG | SGFNNNA | MGWYRQA | SFGS | TNYADSVKGRFTISRDNA | GWGATPR | SYWGQGT | Lama |
| | LVQPGGSLRLS | | PGKQRELV | | KNTVYLQMNSLKPEDTAV | | QVTVSS | |
| | CAASG | | AAIT | | YYCTA | | | |
| 5hm1_C | DVQLQESGGG | NIVSIDA | AGWFRQAP | TGGA | TNYADSVKGRFTISRDNA | PMIYYGGRYS | DYWGQG | Lama |
| | LVQPGGSLRLS | | GKQREPVA | | KNTVYLQMNSLKPEDTAV | | TQVTVS | |
| | CAASG | | TIL | | YYCYA | | | |
| 5ip4_B | QVQLQESGGG | NIIGGNH | WAWYRQA | RYN | ANYADSVKGRFTISRDNA | EN | YYWGQGT | Lama |
| | LVQAGGSLRLS | | PGQQRDLV | | KNAAYLQMNSLKPEDTAI | | QVTVSS | |
| | CTASV | | ASLS | | YFCAL | | | |
| 5ja8_H | QVQLQESGGG | FTLDYYA | GWFRQAP | SSGGT | TNYADSVKGRFTVSRDN | DFACPLIREY | DYWGQG | Lama |
| | LVQPGGSLRLS | | GKEREGVS | | AKNTVYLQMNSLKPEDTA | | TQVTVSS | |
| | CAASG | | CIS | | VYYCVA | | | |
| 5ja9_B | QVQLQESGGG | FTFSNYA | MRWYRQAP | SVGGS | TNYADSVKGRFTISRDNG | RLSLIS | DSWGQG | Lama |
| | LVQPGGSLRLS | | GEEREFVA | | KNTLYLQMNSLKPEDTAV | | TQVTVSS | |
| | CAASG | | FIS | | YFCVA | | | |
| 5jqh_D | QVQLQESGGG | SIFSLND | MGWYRQA | SGGS | TKYADSVKGRFTISRDNA | KVAGTFSIY | DYWGQG | Lama |
| | LVQAGGSLRLS | | PGKLRELVA | | KNTVYLQMNSLKAEDTAV | | TQVTVSS | |
| | CAASG | | AIT | | YYCNA | | | |
| 5lwf_D | QVQLQESGGG | RTFSNDH | MGWFRKAP | PGTEK | TYYADSVKGRFAFSRDN | TPYYRGSYYAAS | TYWGQGT | Lama |
| | LVQAGGSLRLS | | GKEREFVA | | AKNTVYLQMNSLKPEDTA | TY | QVTVSS | |
| | CAASG | | AIT | | VYYCVA | | | |
| 5m2i_L | VQLVESGGGLV | RSLSNYY | MGWFRQAP | WRGYN | IYYKDSVKGRFTISRDDA | SILPLSDDPGWN | TYWGQGT | Lama |
| | QAGGSLSLSCS | | GKERELLG | | KNTIYLQMNRLKPEDTAV | | QVTVS | |
| | ASG | | NIS | | YYCAA | | | |
| 5m2m_N | QVQLQESGGG | RTFSDHSG | IGWFRQAP | WSSGN | TYYADSVKGRFAISRDIAK | RDGIPTSRSVESY | NYWGQG | Lama |
| | LVQPGGSLRLS | YTYT | GKEREFVA | | NTVDLTMNNLEPEDTAVY | | TQVTVSS | |
| | CAASG | | RIY | | YCAA | | | |
| 5m30_F | QVQLVESGGG | SISGIVV | MAWYRQAP | SGGT | TNYADSVKGRFTISKDNA | FFRRDYVGY | DYWGQG | Vicugna |
| | LVQAGGTLKLS | | GKQRELVA | | ENTLYLRMNSLKPEDTAV | | TQVTVSS | |
| | CAASG | | SIT | | YYCKA | | | |
| 5mp2_D | QVQLVESGGG | NTDSSYY | MGWFRQG | IRAGI | PYYTDSVKGRFTISQDNA | SVRTTIQPFKGNY | NYWGRGT | Lama |
| | SVQAGGSLRLS | | PGKEREGV | | KNTIYLQMNSLKPEDTAM | Y | QVTVSS | |
| | CAASG | | ASIY | | YFCAG | | | |
| 5mwn_N | QVQLVESGGG | IMLGYFT | MAWYRQAP | SGGS | ANYADAVKGRFTISRDNA | RIWRGTVYD | NISGPGT | Lama |
| | LVQPGGSLRLS | | GKQRELVA | | RSTVYLQMNSLKPEDTAV | | QVTVSS | |
| | CAASG | | TEI | | YYCDA | | | |
| 5o03_D | QVQLQESGGG | FTLGYYP | IGWFRQAP | GSGGS | ANYAASVKGRFTISRDNA | DLSSLTTVQAMC | DYWGLGT | Lama |
| | LVQPGGSLRLS | | GKGLEGVS | | KNTVYLQMNSLKPEDTAI | VIPRPGFSAKAY | QVTVSS | |
| | CAASG | | CIS | | YYCAA | | | |
| 5o2u_D | DVQLQESGGG | SISRFNA | MGWWRQA | KGFD | PVLADSVKGRFTISIDSAE | ALDT | AYWGQGT | Lama |
| | LVQAGGSLRLS | | PGKEREFV | | NTLALQMNRLKPEDTAVY | | QVTVSS | |
| | CAASG | | ARIV | | YCFA | | | |
| 5ojm_O | QVQLQESGGG | HTFNYPI | MGWFRQAP | WSGGS | TSYADSVKDRFTISRDNA | KGRYSGGLYYPT | DYWGQG | Lama |
| | LVQAGGSLRLS | | GKEREFVG | | KNTVYLEMNNLKPEDTAV | NY | TQVTVSS | |
| | CAASG | | AIS | | YYCAA | | | |
| 5ocl_G | QVQLQESGGG | RTWSIYG | MGWFRQAP | WRGG | THYADFVKGRFTISRDNV | NPNPSGSSVYRR | DYWGQG | Lama |
| | LVQAGDSLRLS | | GKEREFVA | N | KNTVYLQMNSLKPEDTAV | N | TQVTVSS | |
| | CAASG | | GIT | | YYCAA | | | |
| 2xxm_B | QVQLVESGGG | SFFMSNV | MAWYRQAP | GGDMS | TVYDDSVKGRFTITRDDD | SG | SSWGQGT | Vicugna |
| | LVQAGGSLRLS | | GKARELIAA | | KNILYLQMNDLKPEDTAM | | QVTVSS | |
| | CAASG | | IR | | YYCKA | | | |
| AHA34195.1 | QVQLVETGGG | GTLEHYA | IGWFRQAP | GEYGS | TVYVDSVKGRFTASRDN | GCYSWR | GPWGQG | Vicugna |
| | LVQPGGSLTLS | | GKEHEWLV | | AKNTVYLQLNSLKPDDTG | | TQVTVSS | |
| | CAGSG | | CNR | | IYYCVS | | | |
| ATL24999.1 | QVQLVESGGG | SIASIYR | TCWYRQGT | SGGN | TYYADSVKGRFTISRDNA | DEAGIGGEN | DYWGQG | Vicugna |
| | LVQPGGSLRLH | | GKQRELVA | | KNTIDLQMNSLKPKDTAV | | TQVTVSS | |
| | CAASG | | AIT | | YYCNA | | | |
| AHA34189.1 | QVQLVESGGG | GDFSRNA | MAWFRQAP | WTGSG | TYYLDSVKGRFTISRDNA | STVFAEITGLAGY | DYWGQG | Vicugna |
| | LVQAGGSLSLS | | GKEREFVA | | KNALYLQMNNLKPEDTAV | QSGSY | TQVTVSS | |
| | CAASG | | SIN | | YYCAR | | | |
| AHA34197.1 | QVQLVESGGG | SIVNFET | MGWYRQA | NEGS | SNYADSVKGRFTISGDNA | TFGSRWPYAHS | DHWGQG | Vicugna |
| | LVQAGGSLRLS | | PGKERELV | | KNTVSLQMNSLKPEDTAV | | TQVTVSS | |
| | CAASG | | ATIT | | YYCSA | | | |
| 4lhq_D | VQLVETGGGTV | GSFSRNA | MGWFRQAP | WSASS | TYYRDSVKGRFTVSRDN | SSVYAEMPYADS | NYWGQG | Vicugna |
| | QTGGSLRLSCS | | GKEREFVA | | AKNTVYLHLNSLKLEDTA | VKATSY | TQVTVSS | |
| | ASG | | AIN | | AYYCAG | | | |
| 4tvs_b | QVQLVESGGG | RTLSSYA | VGWFRQAP | RSGGS | THYADSVKGRFTISRDNA | TFTPDGSWYYTR | DYWGQG | Vicugna |
| | LVQAGGSLRLS | | GLEREFVAT | | KNTVYLQMNSLKPEDTAV | GSSY | TQVTVSS | |
| | CAASG | | IS | | YYCAA | | | |
| 4x7f_D | DVQLVESGGG | SILSFNH | MAWYRQG | REGS | TDYADSVKGRFTISRDNA | GIS | NPWGQG | Vicugna |
| | LVQPGGSLRLS | | PGEQRELV | | KNMVYLLMSNLRPEDTA | | TQVTVSS | |
| | CAASE | | AVIT | | VYYCNR | | | |
| 4xt1_C | QVQLVESGGG | SIFTIYA | MGWYRQA | FGGD | TNYADSVKGRFTISRDNA | EETIVEEA | DYWGQG | Vicugna |
| | LVRPGGSLRLS | | PGKQRELV | | KNAVYLQMNSLKPEDTA | | TQVTVSS | |
| | CAASG | | ARIT | | VYYCNA | | | |
| AHA34193.1 | QVQLVESGGG | RTFSRSS | MGWFRQAP | WADGT | TLYGDSVKGRFTVSRDN | NKFVRGLVAVRAI | DYWGQG | Vicugna |
| | LVQAGGSLRLS | | GKEREFVA | | VKNMVYLQMNNLKPEDT | DY | TQVTVSS | |
| | CAASG | | SIV | | ALYYCAD | | | |
| ATL24956.1 | QVQLAETGGG | TTFSKNA | MAWFRQAP | WNAVS | TNYADSVKGRFTVSRDN | SSIYSDISGAATV | NYWGQG | Vicugna |
| | LVQAGGSLRLS | | GKEREFVA | | AKNTVYLQMNSLKPEDTA | WATSY | TQVTVSS | |
| | CAASG | | GIN | | VYYCAG | | | |
| 5gxb_B | QVQLVESGGR | RTFTTYL | MGWFRQAP | WSGGS | TYYADSVKGRFTISRDNA | AARPSYSGDYGY | DYWGQG | Vicugna |
| | LVQAGDSLRLS | | GKEREFVA | | KNTVYLQMNSLKLEDTAV | TEALRY | TQVTVSS | |
| | CAASG | | AIR | | YYCAA | | | |
| 5hvh_C | QVQLQESGGG | SIFSPNA | MGWYRQA | NVG | STYADSVKGRFTVSRDN | WGQDGWLGQY | DYWGQG | Vicugna |
| | LVQAGGSLRLS | | PGKERELV | | AKNTVYLQMNSLKPEDTA | | TQVTVSS | |
| | CAASG | | AART | | VYYCNA | | | |
| 5hvh_B | QVQLQESGGG | SIFSGNA | MGWYRQA | SGGS | TDYADSVKGRFTISRDNA | DPRPWGYDVTDY | DYWGQG | Vicugna |
| | LVQPGGSLRLS | | PGKQRELV | | KNTVYLQMNSLKPEDTAV | | TQVTVSS | |
| | CAASG | | AAIT | | YYCHV | | | |
| 5j1t_C | QVQLVETGGG | NIFSFNV | MGWYRQA | SGDT | TTYADSVQGRFTISRDNA | RRNPINGPYYTT | AYWGQGT | Vicugna |
| | LVQAGGSLRLS | | PGKQRELV | | KNAVYLQMNSLTPEDTAV | | QVTVSS | |
| | CAASG | | AAIT | | YFCNA | | | |
| ATL24970.1 | QVQLVESGGG | FSGFTLDY | IGWFRQAP | SSSDG | TSYSDSVKGRFTISRDNA | RLGGWASFSPQE | DYWGQG | Vicugna |
| | LVQPGGSLRLS | YA | GKEREGLS | F | KNTVYLQMNSLKPEDTAV | Y | TQVTVSS | |
| | CVASE | | SIS | | YYCAA | | | |
| ATL24992.1 | QVQLAETGGG | FRLQYYT | AGWFRQAP | AGGGV | TYYTGSVQGRFTISRDNA | DLEYSQIMPSCR | GVRGQGT | Vicugna |
| | LVEPGGSLRLS | | GKEREWVA | | KRTVYLQMDSLKPEDTAV | GSY | QVTVSS | |
| | CAAPE | | CIS | | YSCAA | | | |
| 5lhr_B | QVQLQESGGG | RTFSSYV | MGWFRQAP | WSGGS | TNYADSVKGRFTISRDNA | DLASSRDVSS | WYWGQG | Vicugna |
| | LVQAGGSLRLS | | GKEREFVA | | KNTVYLQMNSLKPEDTAV | | TQVTVSS | |
| | CAASG | | AIS | | YYCAA | | | |
| 5nbm_F | QVQLVESGGG | RTFTNYG | MGWFRQAP | RFGFP | LYYSDSVKGRFTISRDNA | RNPRATAEDVSA | DYWGQG | Vicugna |
| | SVQAGDSLRLS | | GKEREFVA | | KTTVYLQMHNLKPEDTAI | Y | TQVTVSS | |
| | CTASG | | AIG | | YFCAA | | | |
| 5o02_C | QVQLQESGGG | FTFSSYA | MRWYRQAP | SAGGS | THYADSVKERFTISRDNA | RRDYGDSWFTAG | GYWGQG | Vicugna |
| | LVQPGGSLRLF | | GKERELVA | | KNTMYLQMNSLKPEDTA | G | TQVTVSS | |
| | CAASG | | AIT | | VYYCNA | | | |
| 5o04_F | QVQLQESGGG | IIFFMYD | VGWYRQAP | SDVS | TKYADSVKGRFTISRDNA | RRASA | DYWGQG | Vicugna |
| | LVQPGGSLRLS | | EKQRELVA | | KRTVYLQMNDLKPEDAA | | TQVTVSS | |
| | CTAPR | | QIN | | VYYCNV | | | |
| 5o05_D | QVQLQESGGG | SVSRTYV | MGWYRQTP | SVGS | TNYADSLKGRFTISRENA | IRYSPIHAPL | DYWGQG | Vicugna |
| | LVQPGGSLRLS | | GNQRELVA | | ENTVYLQMNSLKPEDTAI | | TQVTVSS | |
| | CAASG | | TIT | | YYCKY | | | |
| 5o0w_H | QVQLQESGGG | TALTYYA | IGWFRQAP | RINSGS | TDYADSVKGRFTISRDDA | DTTDRYDSANGR | DYWGQG | Vicugna |
| | LVQPGGSLRLS | | GKEREGVS | GAR | KNTVTLQMNSLEPEDTAR | YYCTISSDTY | TQVTVSS | |
| | CAASE | | CIS | | YYCAL | | | |
| 5ocl_H | QGQLVESGGG | IIFRELG | IDWYRQAP | SAGM | TNYADSVKGRFTISRDNA | LPRFS | HLWGQGT | Vicugna |
| | LVQAGGSLRLS | | GKQRELVA | | KNTVYLQMNSLKPEDTAV | | RVTVSS | |
| | CAASG | | SIA | | YYCHT | | | |
| 5omm_C | QVQLQESLVGL | NINSMHV | VGWYRQAP | DDGS | TDYVDSVKGRFTISRDIAE | TIVVFTTPM | HYWGKGT | Vicugna |
| | VQSGGSLRLSC | | GNQRELVA | | NTVYLQMNSLNPEDTAV | | QVTVSS | |
| | AASR | | SIT | | YYCKG | | | |
| 5omn_C | QVQLQESGGG | TIFSRNI | MGWYRQA | SDRS | TWYAESVEGRFTISRDNV | RTL | GSWGQG | Vicugna |
| | LVQPGGSLRLS | | PGKERELV | | KNTLYLQMNSLKPEDTA | | TQVTVSS | |
| | CAASG | | ASIY | | MYYCRD | | | |
| 5td8_E | QVQLVESGGG | RTGSRHA | VAWFRQAP | AVGLV | RNYADSVLGRFSISRDFA | RYYSGTYSSTYD | DYWGQG | Vicugna |
| | LVHPGGSLRLS | | GKERDFVA | | KNEVYLQMNSLEPEDTA | RDDY | TQVTVSS | |
| | CAASG | | SIN | | VYYCAA | | | |
| ANJ89050.1 | QLQLVESGGGL | RTSTSYA | QGWFRQPP | THDGN | THYTDSVKGRFTISRDNA | SLGYSGAYASGY | DYWGQG | Vicugna |
| | VQAGGSLRLTC | | GKEREFVA | | ENTLYLQMNSLKTEDTAV | | TQVTVSS | |
| | ALSE | | SLR | | YYCAA | | | |
| ANJ89062.1 | QLQLVESGGGL | RPFRNYR | LGWFRQAP | WGGVI | TNYADSVKGRFTISRDDA | FDSTGSPIVRDNY | EYWGQGT | Vicugna |
| | VQAGGSLTLSC | | GKEREFVA | | KNTVYLQMNSLKPEETAV | | QVTVSS | |
| | VASG | | AIN | | YYCAA | | | |
| 5vxj_J | QVQLAETGGG | FTFSRAV | MNWYRQAP | DAGGN | GSIADPVKGRFTISRDNA | GIFDGNYR | TYWGQGT | Vicugna |
| | LAQPGGSLRLS | | GKERELVA | | KNTVHLQMNSLKPEDTA | | QVTVSS | |
| | CAASG | | RIY | | MYVCNA | | | |
| 5vxl_B | QVQLAESGGG | GVFIIYN | MGWYRQA | SYSGSI | TNYADSVKGRFTISRDNV | NLRTN | NYWGQG | Vicugna |
| | LVQPGGSLRLS | | PGKQRELV | | EKRVYLEMNNLKPEDTAV | | TQVTVSS | |
| | CSASG | | ASID | | YYCNA | | | |
| 6cwk_A | QVQLAESGGG | RDFSMYM | LAWFRQAP | CSGGG | TYYADSMQGRFTISRDNA | STTYCSATTYSSD | DFWGQGT | Vicugna |
| | LVQAGGSLKLS | | GKEREFVA | GG | KKTVALQMNSLKPEDTAV | RLY | QVTVSS | |
| | CAASG | | AIM | | YYCAA | | | |
| 6h6y_H | QVQLQESGGG | RTFSNYY | SGWFRQAP | WSDST | TNYADSVKGRFTISRDTA | RRLATY | DYWGQG | Vicugna |
| | LVQAGGSLRLS | | GKEREFLAS | | KNTVYLQMNSLKLEDTAV | | TQVTVSS | |
| | CAVSG | | IR | | YHCAA | | | |
| 6h70_D | QVQLQESGGG | RTIDVSV | MAWFRQAP | WSGMT | TYSADSVKDRFTISRDKT | RSRFIVGVPQARD | DYWGQG | Vicugna |
| | LVMTGGSLRLS | | GKEREFVS | | KNTVYLQMNSLKPEDTAV | LY | TQVTVSS | |
| | CAVSG | | GMR | | YYCAA | | | |
| 6h72_D | QVQLQESGGG | RMFSINS | MGWYRQA | EAGT | TTYADSVRGRFTIARDNA | YIQLDSTIWFR | AYWGQGT | Vicugna |
| | LVQAGGSLRLS | | PGKERELV | | KNTVYLQMNSLNPEDTA | | QVTVSS | |
| | CAASG | | ATIS | | VYYCNA | | | |
| 6iyn_A | QLQLVESGGGL | RTFSSYA | MGWFRQAP | WSGRR | TYYADSVKGRFTISRDNA | GKWDGSYYGAP | DYWGQG | Vicugna |
| | VQAGGSLRLSC | | GKEREFVA | | KNTVYLQMNSLKPEDTAV | | TQVTVSS | |
| | AASG | | VVN | | YNCAA | | | |
| ABO38189.1 | QLQLVESGGGL | VTLEEVS | VAWFRQAP | SNGNG | TTYARSVKGRFTISRDSA | VEPNCSSGRKAF | GSWGQG | Vicugna |
| | VQPGGSLQLA | | GKEREGVS | GS | KNAVYLQMNSLKSEDTA | | TQVTVSS | |
| | CEASG | | CIN | | VYYCSV | | | |
| ABO38191.1 | EVQLVESGGG | SLASMNS | MGWYRQS | RSNY | TIYSTSVKDRFILSRDHDK | EGRGWG | PVLGQGT | Vicugna |
| | SVQAGGYLRLS | | PEKEREFVA | | NILSLQMNGLKPEDTAMY | | QVTVSS | |
| | CAVSG | | SIN | | YCAA | | | |
| ABO38192.1 | EVRLEESGGGL | TIFSYNA | MGWYRQP | AQG | TIEYAEAVKGRATISRDNA | WDRSDYRGHGH | DFLGQGT | Vicugna |
| | VQAGGSLRLVC | | PGKERELV | | KKLSLQLNNLKDEDTAMY | | QVTVSS | |
| | VAYG | | AGIT | | YCAA | | | |
| ABO38195.1 | QEQFVETGGG | GAVYHRS | LGWYRQAP | SGGG | TGYADFVKGRFTLSRPFG | WPMKA | STWGQGT | Vicugna |
| | LVQPGGSLTLS | G | GKERAWVG | | NNTVFLQMNNLEPEDTA | | QVTVSS | |
| | CSVYG | | RIF | | VYYCNT | | | |
| ABO38196.1 | QEQLVESGGG | FTIENYH | VRYYRQAP | VGNAW | TSYADSVKGRFTISRDSD | RVFSA | PCAGQGT | Vicugna |
| | LVQPGGSLRLS | | GKECELVA | | NKTVYLQMKSLQPEDTA | | QVTVSS | |
| | CAASG | | GIA | | VYHCNV | | | |
| ABO38199.1 | QVQLVESGGG | SNLRLYG | MGWFRQAP | WIGGA | AYYSTSVKGRFTLTRDYD | STTPPIFTF | NSYGPGT | Vicugna |
| | FVQAGGSLNLS | | GSERELVA | | QKTTLLQMNKLSPEDTAV | | QVTVSS | |
| | CTASG | | QIS | | YFCAA | | | |
| ABO38202.1 | QLHFVESGGG | FTLNYYS | IAWFRRAP | GGGV | TVYAESVKGRFTISRDSA | DEEAVCSVATLKR | DWWGQGI | Vicugna |
| | SVQPGGSLRLT | | GKEREGVS | | KNTMYLEMNSLEPEDTA | RAKY | QVTVSS | |
| | CAAST | | CMS | | EYYCAA | | | |
| ABO38206.1 | QVRPVESGGG | VNLNNFA | IGWFRQAP | NRGT | PYYADFLEGRFTISRDNA | DLGAGGCVLSPA | EVMGPGT | Vicugna |
| | SVQPGEALRLS | | GKEREGVS | | KNTVYLQMNDLKPEDTG | GTLSIARFL | LVNVSS | |
| | CTQPK | | CIG | | VYSCAA | | | |
| ABO38209.1 | QLQFVESGGD | LNFDVLA | MGWFRQAP | NRGGH | TEYVDSVKGRFTISRDNA | PTALRWQCNPAY | GSWGQG | Vicugna |
| | SVQPGGSLRLS | | GKEREAVS | | KNTVYLQMDNLQVEDTA | F | TEVSVSS | |
| | CVASG | | CIS | | VYYCAA | | | |
| ABO38213.1 | QVKLVESGGG | FVLEIFV | IGWFRQVP | IRDGS | AYYEDSVKGRFTVSRDN | ESFWVGPVQAMC | HIWGQGT | Vicugna |
| | FVDAGGSLTLS | | GKEREGISC | | AENTVYLQMNNLKPEDT | NNP | QVTVSA | |
| | CASSG | | IS | | GVYTCAA | | | |
| ABO38215.1 | QPQVAESGGG | TTSSLDYIP | VAWFRQVP | GVPHG | IFYSTPVKGRFTSSRDDA | ANKGFCTLDAND | KYWGQGT | Vicugna |
| | LVQPGGSLTLS | | GKEREGISC | EDH | KNTVYLHMNRLTPGDTA | Y | QVTVSS | |
| | CVVTG | | IG | | VYYCSP | | | |
| ABO38221.1 | QLHVVESGGG | FTLDSHH | IGWFRQAP | TTGDF | PHYADSVKGRFTISRDNA | DSGSRSSWSLCP | DYWGQG | Vicugna |
| | LVQPGGSLRLS | | GKERELVS | | KNTVYLQMNSLKPEDTAV | RGSVGY | TQVTVSS | |
| | CAASG | | CTG | | YYCAA | | | |
| ABO38222.1 | QLHVVESGGG | LDLDYLT | LGWFRQAP | HSGDL | EVYGDSVRGRFAISRDNA | DPARFTTCSPDE | DYWGQG | Vicugna |
| | LVQPGGSLRLS | | GKEREWVS | | KNTVYLQMNRLEPKDQA | Y | TQVTVSS | |
| | CKVSG | | CVD | | VYYCAA | | | |
| ABO38223.1 | QLQLVESGGGL | SSLDSYA | IGWFRQAP | SSGGT | TNYADSVKGRFTISRDNA | APGLTTFQTLCLM | DYWGQG | Vicugna |
| | VQPGGSLRLSC | | GKEREGVS | | KNTVYLQMNSLKPEDTAV | IGG | TQVTVSS | |
| | AASG | | CIN | | YYCAA | | | |
| ABO38224.1 | QLQLVESGGGL | SSLDSYA | IGWFRQAP | SSGGT | TNYADSVKGRFTISRDNA | GSGSTYYDCSGY | DKWDQGT | Vicugna |
| | VQPGGSLRLSC | | GKEREGVS | | KNTVYLQMDSLKLEDTGI | ETGWRI | QVTVSS | |
| | AASG | | CIN | | YVCAA | | | |
| ABO38226.1 | RLHLVESGGGS | EPLENNA | VGWFRQSP | TLGSR | DDYAGSVKGRFTVSRND | VYTGAGQLLPSLC | DYWGQG | Vicugna |
| | VQPGGSLRLSC | | GNSREGISC | GIT | AKNTVYLQMNNLKPEDT | LDENGY | TQVTVSS | |
| | VASG | | IS | | AVYFCAA | | | |
| ABO38227.1 | QVEPVESGGG | EALYHYA | VGWFRQVP | SSGEN | VDYHESVKGRFTISKDST | ASDLWYSGLYCG | DYWGQG | Vicugna |
| | LVQPGGSLRLS | | GRKREWVA | | RNTAYLDIMNIEPEDTATY | PDY | TRVAVSS | |
| | CTSHI | | CIS | | YCGA | | | |
| ABO38228.1 | QLQPARAGGN | RTLNGYD | IGWFRQAY | RSGN | TVYADSVKGRFTVARDN | LGGDVCVRFGRP | DYWDQGT | Vicugna |
| | LVQPGGSLRLF | | GTEREGISC | | AKTATFLEMSDLKPEDTG | GAYYCIANRCYD | QVTVSS | |
| | CGVSE | | TS | | TYFCAA | | | |
| ABO38229.1 | QLQLVESGGGL | SSLSYYH | IGWFRQAP | DSGGS | ITYADSVKGRFTISRDDAE | VTPGYYGGSYSCI | GVWGQG | Vicugna |
| | VQPGGSLRLSC | | GKGREAVA | | NTVHLQMTSLKAEDTAIY | PD | TQVTVSV | |
| | VASG | | CIS | | YCAP | | | |
| ACS73863.1 | HVQLQQSGGG | SIFSIYA | MGWYRQA | SYGS | TNYADSVKGRFTISRDNA | DIATMTAVGGF | DYWGQG | Vicugna |
| | LVQPGGSLRLS | | PGKQRELV | | KNTVYLQMNSLKPEDTAV | | TQVTVSS | |
| | CAASG | | AAIS | | YYCNA | | | |
| ACS73868.1 | QVQLVESGGG | SVFTMYT | TAWYRQTP | DEHR | TNYAASAEGRFTISRDNA | EHDLGYY | DYWGQG | Vicugna |
| | SVQPGGSLRLS | | GNLRELVAS | | KHTVDLQMTNLKPEDTAV | | TQVTVSS | |
| | CAAIG | | IT | | YYCKL | | | |
| ACZ53930.1 | QVQLVESGGG | FTLEYYA | IGWFRQAP | SSGGG | TNYADSVKGRFTISRDNA | DDFRCGSRWAAY | SSWGQGT | Vicugna |
| | LVQPGGSLRLS | | GKGREGVA | | KKMVYLQMNSLKSEDTA | LR | QVTVSS | |
| | CATSG | | CMN | | VYYCVV | | | |
| ACZ80603.1 | DVQLVESGGG | IIFSINA | MGWYRQA | SNGN | TLYADSVKGRFTISRDNA | PDDEY | DYWGQG | Vicugna |
| | LVQAGGSLRLS | | PGKERELV | | KNTLYLQMNSLKPEDTA | | TQVTVSS | |
| | CAASG | | AAIS | | MYYCTA | | | |
| AEJ91544.1 | QLQLVESGGGL | GNLDYYA | IGWFRQAP | SSDGS | TVYTDSVKGRFTISRDNT | VVNYYCTAGGSIH | EIWGQGT | Vicugna |
| | VQPGGSLRLSC | | GKEREGVS | | KNTVDLQMDNLKPEDTA | ASPY | QVTVSS | |
| | AASA | | CIS | | VYYCAT | | | |
| AEJ91545.1 | QVQLVESGGG | SLPSTPFN | VGWYRQAP | LR | INYADSVKGRFTISRDNA | EYT | HYWGKGT | Vicugna |
| | LVHPGGSLRLS | PFNNM | GKQREMVA | | KNTVDLQMDSLRPEDSA | | LVTVSS | |
| | CAPSA | | SIG | | TYYCHI | | | |
| AEJ91548.1 | QVQLVESGGG | FTFGDWV | MSWFRQAP | ATSSL | KYYADSVKGRFTISRDNV | P | NYWGQG | Vicugna |
| | LVQPGGSLRLS | | GKEREFVA | | NNTLFLQMDRLKSEDTAV | | TQVTVSA | |
| | CQVSG | | SIT | | YYCRS | | | |
| AEJ91549.1 | QVQLVESGGG | SDISGIA | MGWYRQA | SGGS | TDYAGSVKGRFTISRDNA | YGSG | DYWGQG | Vicugna |
| | LVQVGGSLRLS | | PGKRREMV | | KKTSYLQMNNVKPEDTG | | TQVTVSS | |
| | CVVSG | | ADIF | | VYYCRL | | | |
| AEJ91550.1 | QVQLVETGGG | FGMDYYY | IGWVRQAP | NIGR | THYADSVKGRFTISRDNA | APLVGNYCPASY | ESWGQGT | Vicugna |
| | LVQPGGALRLS | | GKEREGVS | | KNTVYLQMNSLKPEDTAV | EY | QVTVSS | |
| | CAASV | | CIS | | YYCAA | | | |
| AEJ91551.1 | QVQLVETGGG | RTSSFYA | LAWFRQGP | WIDGS | TRYTDSAKGRFTISRDAA | RTQYGGSSADPK | GYWGQG | Vicugna |
| | LVQAGGSLRLS | | GKEREFVA | | KNTMYLQMNSLKPEDTA | NY | TQVTVSA | |
| | CTASG | | AIG | | VYSCTA | | | |
| AEJ91553.1 | QVQLVETGGG | RSFSAAV | MGWFRQAP | QIIGS | THYADSVKGRFTISRDNA | GPPTMLDVSTDR | DTWGQGT | Vicugna |
| | LVQAGGSLRLS | | GKEREFVA | | KNMLYLDMNSLKPTDTAA | EY | QVTVSS | |
| | CAGSG | | ALR | | YYCTA | | | |
| AER93245.1 | QVQLQESGGG | LIFRFSA | MSWYRQG | SNGGT | TNYADFAKGRFTISRDNA | GLRMDS | RDWGQG | Vicugna |
| | LVQPGGSLRLS | | PGKERELV | | KNTVDLQMNSLKPEDTA | | TQVTVSS | |
| | CAASG | | AGIT | | VYYCHA | | | |
| AER93247.1 | QVQLQDSGGG | LSFRSYG | MGWFRQAP | WIGGF | THYTDSVKGRFTISRDNA | PGAPYSDRGRNA | GYWGQG | Vicugna |
| | LVQAGGSLRLS | | GKEREFVA | | KNTLYLQMNSLKPEDTAV | SEY | TQVTVSS | |
| | CAVSG | | RIS | | YYCAA | | | |
| AER93255.1 | QVQLQDSGGG | IILRFTS | MAWYRQAP | SSGK | TNYADSVQGRFTISRDNV | Q | DLWGQGT | Vicugna |
| | LVQPGGSLRLS | | GKQRELVA | | NKAVYLQMNSLDPEDTA | | QVTVSS | |
| | CATSG | | RIT | | VYYCNT | | | |
| AER93251.1 | QVQLQDSGGG | RTFRLYN | MGYFRQAP | WLGGR | AYYADSVKGRFTISRDGA | KNRGSDSDVVRG | DYWGQG | Vicugna |
| | LVQAGGSLRLS | | GKEREFVA | | KNTLSLQMSSLKPEDTAV | Y | TQVTVSS | |
| | CTASG | | AIT | | YYCAA | | | |
| AER93256.1 | QVQLQESGGG | FTFSRYT | MSWYRQAP | KSGTA | INYADSVKGRFTISRDNA | GGFTIAPLD | SYWGQGT | Vicugna |
| | LVQPGGSLRLS | | GKERELVA | | KNTLYLQMNSLKPEDTAV | | QVTVSS | |
| | CAASG | | AIT | | YYCAR | | | |
| AGY32871.1 | QVQLVETGGG | RTLDMYA | MGWIRQAP | GVGGS | PRYADSVKGRFTISKDNT | GGDIYYGGSP | QWRGQG | Vicugna |
| | LAQAGDSLRLS | | GEEREFVA | | KSTIWLQMNSLKPEDTAV | | TRVTVSS | |
| | CVEPG | | SIS | | YYCAA | | | |
| AGY32872.1 | QVQLVESGGG | RINGDYA | MGWFRQAP | WIGGS | TYYTDSVKGRFTLSRDNA | GHYTDFPTYFKEY | DYWGQG | Vicugna |
| | LVQAGGSLRLS | | GEEREFVA | | KNTLSLQMNSLKPEDTAV | | TQVTVSS | |
| | CAASG | | VNS | | YYCAA | | | |
| AGY32875.1 | QVQLVESGGG | FTLADYV | TVWFRQAP | SSRGT | PNYADSVKGRATVSRNN | IRPARLRAYRECL | DYWGQG | Vicugna |
| | LVQPGGSLKLS | | GKSREGVS | | ANNTVYLQMNGLKPDDT | SSQAEY | TQVTVSS | |
| | CAASG | | CIS | | AIYYCAA | | | |
| AGY32877.1 | QVQLVETGGLV | VPFSDYT | MAWFRQAP | WRGG | PYYGNSGNGRFAISRDIA | SRLRPALASMAS | DYWGQG | Vicugna |
| | QAGGSLRLSCA | | GKEREVVA | G | KSMVYLHMDSLKPEDTA | DY | TQVSVSS | |
| | ASG | | RIT | | VYYCAA | | | |
| AHA34187.1 | QVQLVESGGG | FTLDDYA | IGWFRQVP | D | GSTYYADSVKGRFTISRD | RPCFLGVPLIDF | GSWGQG | Vicugna |
| | LVQPGGSLRLS | | GKEREGVA | | NGAVYLQMNSLKPEDTA | | TQVTVSS | |
| | CAASG | | CVK | | VYYCAS | | | |
| ATL25006.1 | QVQLVESGGG | GTFSDYG | MGWFRQAP | WNGN | IEYADSVKGRFTISRDNA | SISGYAYNTIERY | NYWGQG | Vicugna |
| | LVQAGGSLRLS | | GKEREFVA | GGNG | KNTVHLQMNSLTPEDTAV | | TQVTVSS | |
| | CAASG | | AIR | | YYCAA | | | |
| AHA34194.1 | QVQLVESGGLV | RADIIYA | MGWFRQAP | WSGGS | TYYADSVKGRFTISRDNA | RRSWYRDALSPS | DYWGQG | Vicugna |
| | QAGGSLRLSCA | | GKEREFVA | | KNSVYLQMNSLKPEDTA | RVYEY | TQVTVSS | |
| | ASG | | AVD | | VYYCAA | | | |
| AHA34196.1 | QVQLVESGGG | SIVSIYA | VGWYRQAP | TDGS | TKYSDSVKGRFTISRDNA | DAAGWGDQ | YYWGQGT | Vicugna |
| | LVQPGGSLKLS | | GKQRELLA | | KNTVYLQMNNLKPEDTAI | | QVTVSS | |
| | CRASG | | AIT | | YSCIG | | | |
| AHA34198.1 | QVQLVETGGAL | STFSSYG | MAWYRQAP | PDGT | PSYVNSVKGRFTISRDNA | WPRTMPD | ANWGRGT | Vicugna |
| | VHTGGSLRLSC | | GEQRKWVA | | KNSVYLHMNNLRPEDTA | | QVTVSS | |
| | EVSG | | GIM | | VYYCNQ | | | |
| AHA34199.1 | QVQLVETGGSL | STFNNPA | ITWYRQPP | SGDG | PVYRESVKGRFTIFRDNA | ASPASW | LDWGQGT | Vicugna |
| | RLTCVTSG | | GKQREWVA | | TDALYLRMNSLKPEDTAV | | QVTVSS | |
| | | | SLR | | YHCNT | | | |
| AHA34201.1 | QVQLVESGGG | SAVSDSFS | ISWHRQAP | NRGA | TSYRDSVKGRFTISRDNA | WPREG | LGGGQGT | Vicugna |
| | LVQAGGSLRLS | TYA | GKQREWIA | | KNTVYLQMNNLKPEDTG | | QVTVSS | |
| | CAASG | | GIS | | VYYCEP | | | |
| AHA34205.1 | QVQLVETGGG | PLFNLYD | MAWYRQAP | TDGR | ATYSDSVKGRFTISRNNL | KNSIYW | DSWGQG | Vicugna |
| | LVQAGGSLRLS | | GNQRELVA | | TNTVFLQMSSLKPEDTAV | | TQVTVSS | |
| | CVVSS | | GIL | | YYCNR | | | |
| AIO05488.1 | QLQLVESGGGL | RTFSRYA | MGWFRQAP | RSGVN | TRYEDSVKGRSTISRDNA | RRGPGTSVLSDD | DYWGQG | Vicugna |
| | VQAGGSLRLSC | | GKEREFVA | | KRSVFLQMDSLKRDDTA | Y | TQVTVSS | |
| | AASG | | AIS | | VYYCAA | | | |
| AIO05489.1 | QVQLVESGGG | RTFSRYT | MGWFRQAP | ARGT | IYYADSVKGRFTISRDNA | TRTPRVRLPTESR | TYWGQGT | Vicugna |
| | LVQAGGSLRLS | | GKEREFVA | | KNTVYLQMNSVEPEDTA | EY | QVTVSS | |
| | CAASG | | TIG | | AYYCAT | | | |
| ALD14642.1 | QVQLVESGGG | SSFSRYA | MRWYRQAP | SRGT | SNYADSVKGRFTISRDNA | EWLGRSE | PSWGQGT | Vicugna |
| | LVQPGGSLRLS | | GKQRELVA | | KNTVYLQMNSLKPEDTAV | | QVTVSS | |
| | CAASG | | NIN | | YYCNA | | | |
| ALD14643.1 | QVQLVESGGG | FIFSLYT | MRWHRQA | SATGI | TNYADSVKGRFIISRDDA | VRTTVSR | DYWGQG | Vicugna |
| | LVQPGGSLRLS | | PGKERELV | | KKTGYLQMNSLKPEDTA | | TQVTVSS | |
| | CAASG | | ATIT | | VYYCNA | | | |
| ALD14644.1 | QVQLVESGGG | IIFSIYT | MGWYRQA | SGPS | ANATDSVGGRFTITRDNA | RRGPGIK | NYWGQG | Vicugna |
| | LVQPGGSLRLS | | PGKQRELV | | ENTVYLQMNDLKPEDTA | | TQVTVSS | |
| | CAASG | | AAIP | | VYYCNA | | | |
| ALD14645.1 | QVQLVESGGG | SIARPGA | MAWYRQAP | PGGL | TNYADSVTGRFTISRDNA | RIIPLGLGSEYR | DHWGQG | Vicugna |
| | LVQPGGSLSVS | | GKERELVA | | KRTVYLQMNSLQPEDTA | | TQVTVSS | |
| | CAASG | | SIT | | VYYCHA | | | |
| ALD14646.1 | QVQLVETGGLV | LTFSSTA | MAWFRQAP | GAGIT | IYYSDSVKDRFTISRNNVE | RRNTYTSDYNIPA | PYWGQGT | Vicugna |
| | QPGGSLRLSCA | | GKEREFVA | | NTVYLQMNSLKTEDTAVY | RY | QVTVSS | |
| | ASG | | RIS | | YCAA | | | |
| ALD14647.1 | QVQLVETGGLV | STTATIYS | MNWYRQAP | SDGQ | TNYATSVKGRFTISRDNA | KPWRLQGW | DYWGQG | Vicugna |
| | QPGGSLRLSCA | | GKQRELVA | | KNTVYLLMNSLKLEDTAV | | TQVTVSS | |
| | ASR | | GMT | | YYCYV | | | |
| ALD14648.1 | QVQLVESGGG | SIVNSRT | MAWYRQAP | TAGS | PNYADSVKGRFAISRDNA | LLST | LPYGQGT | Vicugna |
| | LVQPGGSLRLS | | GKQRERVA | | KNTVYLQMNSLKPEDTAV | | QVTVSS | |
| | CAAPE | | TIT | | YYCNT | | | |
| ALD14649.1 | QVQLVESGGG | ERSINNYG | MGWYRQA | SGGT | TNYADSVEGRFTISRDNV | LLRT | FSWGQGT | Vicugna |
| | LVQPGGSLGLS | | PGKQRELV | | KKMVHLQVNSLKPEDTA | | QVTVSS | |
| | CVVAS | | AQIS | | VYYCNS | | | |
| ALD14650.1 | QVQLVETGGG | FTFSSYR | MSWYRQAA | ANGVP | TGYADSVMGRFTISRDNA | PRLHTSV | GYWGQG | Vicugna |
| | LVQPGGSLRLS | | GKERDVVA | | KNTVYLEMNSLNPEDTAV | | TQVTVSS | |
| | CAASG | | | | YYCNA | | | |
| ALD14651.1 | QVQLVESGGG | VIFSIYT | MGWFRQAP | VADGT | ALVADSVTGRFTISRDNA | YLSPRVQSPYITD | QLWGQGT | Vicugna |
| | LVQAGNSLRLS | | GKEREFVA | | KNTVYLHMNSLKPEDTAV | SRY | QVTVSS | |
| | CTASG | | AIG | | YSCAA | | | |
| ALD14652.1 | QVQLVETGGG | RYA | MGWFRQAP | RSGAI | REYADSVKGRFTISRDGA | GRGATFNPEY | AYWGQGT | Vicugna |
| | LVQAGGSLRLS | | GKEREFVA | | ENTVYLEMNSLKPDDTAI | | QVTVSS | |
| | CAASG | | TIS | | YVCAE | | | |
| ALD14653.1 | QVQLAETGGG | LTFGNYA | MGWFRQAP | RSGSN | TWYAEPLKGRFAISRDND | GSYNSDWWNY | MYWGQG | Vicugna |
| | LVQAGGSLRLS | | GKEREFVA | | KNALYLQMNSLKPEDTAV | | TQVTVSS | |
| | CSASG | | SIS | | YYCAG | | | |
| ALD14654.1 | QVQLVESGGG | GRTFSGYA | MGWFRQAP | WSGHN | TYYGDSVKGRFTISRDTA | EGARTHLSDSYY | GYWGQG | Vicugna |
| | GLVQAGGSLRL | | GKEREFVA | | KNTVYLQMNSLKPEDTAV | FPGLWAEPPV | TQVTVSS | |
| | SCAAS | | DIS | | YYCAA | | | |
| ALD14655.1 | QVQLVETGGG | RTFTSYY | IGWFRQEP | WTDDN | TYYADSVKGRFTISRDNA | DYGSGIRAWYNW | IYWGQGT | Vicugna |
| | LVQAGGTLRLS | | GKEREFVA | | ETTAYLQMSGLKPEDTAV | | QVTVSS | |
| | CAASG | | SIG | | YYCAA | | | |
| ALD14658.1 | QLQLAESGGGL | IIFDYYS | VDWYRQAP | GDGS | PNYADSVKGRFTISRDNA | KRTIGTKS | EYWGQGT | Vicugna |
| | VQPGGSLRLSC | | GKERELVAT | | KKTVYLQMNGLKPEETAV | | QVTVSS | |
| | TASG | | IT | | YYCHA | | | |
| ALD14659.1 | QVQLAETGGG | MSFSRRP | MAWYRQAP | SFGDT | TNYTDSVEGRFTISRDNA | LLAT | YAWGQGT | Vicugna |
| | LVQAGGSLRLS | | GKQRERVA | | KNTMYLQMNSLKPDDTA | | QVTVSS | |
| | CLASR | | TIS | | VYYCNT | | | |
| ALD14660.1 | QVQLAESGGG | RTFSSYV | MGWFRQAP | RNGGK | TYYADSVKGRFTISRDGT | AVAASAEFVTARS | EYWGQGT | Vicugna |
| | LVQAGGSLRLS | | GKEREFVA | | ENTVYLQMNSLKPEDTAV | NFY | QVTVSS | |
| | CAASG | | AIS | | YYCAA | | | |
| ANJ89048.1 | QLQLVESGGGL | LSLSDYA | MGWFRQAP | WNGLR | IAYADFVKGRFTISRDNAK | ARSEWGSRAVY | DYWGQG | Vicugna |
| | VQAGGSLRLSC | | GKEREFVS | | NTAYLQMNSLKPEDSAV | | TQVTVSS | |
| | AASG | | GIG | | YYCAA | | | |
| ANJ89051.1 | QVQLVETGGG | GTLRNYD | MAWFRQAP | RNGHI | ISYSDSARGRFTISKDSAK | GSGVGYAFQPTR | QDWGQG | Vicugna |
| | LVQPGGSLRLS | | GKEREFVA | | NALYLQMNDLKPEDTAVY | | TQVTVSS | |
| | CAASG | | SIG | | YCAA | | | |
| ANJ89052.1 | QLQLVESGGGL | GTVSTID | MGWFRQVP | SSGHV | TSTGDSVKGRFTISKDNA | GNWNSRAREY | DSWGQG | Vicugna |
| | VQRGGSLRLS | | GKEREFVA | | KNTVYLQMNDLKPEDTA | | TQVTVSS | |
| | CAASG | | GMS | | VYYCAS | | | |
| ANJ89059.1 | QVQLVESGGG | RTLSTKT | MGWFRQTP | WIGD | TYYANSVKGRFTISRDIAK | ADPVRRPYYYEN | NYWGQG | Vicugna |
| | LVQAGGSLRLS | | GKERDFVA | | NTVYLQMHSLTPEDTAVY | NNNY | TQVTVSS | |
| | CATAG | | AIT | | YCAA | | | |
| ANJ89060.1 | QLQLVESGGDL | GTLSSYA | MGWFRQAP | WSGKR | IAYADFVKGRFTISRDNAK | ARSEWGSRAEY | DYWGQG | Vicugna |
| | VQAGGSLRLSC | | GKEREFVA | | NTVYLQMNSLKPEDSAV | | TQVTVSS | |
| | AASG | | GIG | | YSCAA | | | |
| ANJ89061.1 | QVQLVETGGG | IIFRPNY | MGWYRQA | SGGT | THIADSVKGRFTISRDND | RRSMASNPY | DYWGQG | Vicugna |
| | LVQAGGSLRLS | | PGKQREPV | | KNTVDLQMNSLKPEDTA | | TQVTVSS | |
| | CAASG | | ATLT | | VYYCNY | | | |
| ANJ89063.1 | QVQLVETGGG | SIASLNG | MGWYRQG | NIGE | TYYADSVKGRFTISRDNA | PLRTM | EYWGKGT | Vicugna |
| | LVQAGGSLRLS | | PGKQRELV | | NKTVSLQMNSLKPEDTAV | | LVTVSS | |
| | CVGSG | | ARFT | | YYCNY | | | |
| ATL25005.1 | QVQLAESGGG | RTFNKNA | MAWFRQTP | WTGNS | PYYADSVKGRFAISRDDA | SIYFASATGDQSR | DYWGQG | Vicugna |
| | LVQAGGSLRLS | | GKEREFVA | | KDALYLQMNSLKPEDTAV | VY | TQVTVSS | |
| | CAASG | | SID | | YYCAV | | | |
| ATL24953.1 | QVQLAETGGG | SIFSIWA | MGWYRQG | TDGGR | TNTADSLKGRFTISRDNA | GHRSTWAGYPAA | DYWGQG | Vicugna |
| | LVQPGGSLRLS | | PGTLRELVA | | KNTVYLQMNNLKPEDTA | D | TQVTVSS | |
| | CAASG | | SIT | | VYYCFA | | | |
| ATL24954.1 | QVQLAETGGG | TTFNMYA | MGWYRQA | NTGI | INYADSVKGRFTVSRDNG | RAPTGEGGW | TLMGQGT | Vicugna |
| | LVQAGGSLRLS | | QGNQRELV | | KNTVSLQMNSLKPEDTAV | | QVTVSS | |
| | CGASG | | AIAS | | YFCYA | | | |
| ATL24957.1 | QVQLVETGGG | GTFSSNA | MGWFRQTP | WSASS | TYYRDSVKGRFTVSRDN | SSVYAEMPYAAS | DFWGQGT | Vicugna |
| | TVQIGGSLRLL | | GKEREFVA | | AKNTVYLQMNSLKLEDTA | VKTTSY | QVTVSS | |
| | CSGHG | | GIN | | IYYCAG | | | |
| ATL24958.1 | QVQLAESGGS | STFDDYA | VGWYRQVP | NTGS | PAFADSVKGRFTISRDNA | WPFTKL | PSWGPGT | Vicugna |
| | VQAGGSLRLSC | | GGHRAWVA | | KKTVYLTMNSLKPEDTAI | | QVTVYS | |
| | VVSG | | GIS | | YYCNL | | | |
| ATL24961.1 | QVQLVESGGG | FPFSSYV | MSWYRQAP | SFGTN | TMYANSAKGRFTISRSDG | RNELRD | IYWGQGT | Vicugna |
| | LVQPGGSLRLS | | GKEREWVA | | HNTLYLQMNSLKPEDSAV | | QVTVSA | |
| | CAASG | | TSF | | YFCHA | | | |
| ATL24962.1 | QVQLAESGGG | VTVRDVP | MGWYRQA | NGGLR | TDYTDSVKGRFTISRDDA | LIQWR | DYWGQG | Vicugna |
| | LVQAGGSLRLS | | PGTQREWV | DY | KNTWYLQMNSLKPEDTA | | TQVTVSS | |
| | CAASG | | ARIS | | VYFCKT | | | |
| ATL24964.1 | QLQLVETGGDL | TTLFIAA | MGWYSQAP | SGGR | TNYRDSVKGRFTVSRDL | ERLGK | EYWGQGT | Vicugna |
| | VQAGGSLRLSC | | GKQRELVA | | ANNTVHLEMTSLKPEDTA | | QVTVSS | |
| | AAPR | | TLT | | VYYCYA | | | |
| ATL24965.1 | QVQLAQTGGG | ITDSNYA | ITWYRQPP | RDG | AVYRNSVQGRFTISGHSA | PSPASW | LPWGQGT | Vicugna |
| | LVQTGESLKLS | | GKQREWVA | | ENAVYLQMDSLKPEDTA | | QVTVSS | |
| | CTTSG | | SIT | | VYYCNT | | | |
| ATL24967.1 | QLQLVETGGGL | SFFSMHD | VGWYRQAL | NDGL | TTYADSVKGRFTISRDNT | RFGNDTNR | NYWGQG | Vicugna |
| | VQTGGSLRLSC | | GKQRELVA | | KKTGWLEMNMVKPEDAA | | TQVTVSS | |
| | AASG | | LLN | | VYYCNA | | | |
| ATL24969.1 | QLQLVETGGGL | FTLGHYA | TGWYRQAP | SSGGS | TYYADSVKGRFAISRDNA | EAYGSGCPRVR | DYWGQG | Vicugna |
| | VQPGGSMRLS | | EKEREWVS | | KNTVYLQMNSLKPEDTAV | | TQVTVSS | |
| | CAASG | | CIS | | YVCEV | | | |
| ATL24972.1 | QVQLVESGGG | RTFSTPGR | LGWFRQAP | WGVDD | ADYAASVKGRFTISGVNA | GLRGGTYARIQY | DYWGQG | Vicugna |
| | LVQAGGSLRLS | TFSDYG | GKEREFVA | AYY | KNTVYLQMNSLKPEDTAV | DY | TQVTVSL | |
| | CEASG | | SIS | | YYCAA | | | |
| ATL24973.1 | QVQLAETGGG | SISSFYF | MGWYRQA | NYGR | TDYGDSLKGRFTISRDNA | RKWERSVLE | DYWGQG | Vicugna |
| | LVQPGGARTLS | | PGKPRELV | | ANTVNLQMNNLAPEDTAL | | TQVTVSS | |
| | CAASE | | AEIS | | YYCNA | | | |
| ATL24976.1 | QVQLVESGGG | FTFSSTP | MNWFRQAP | SRNDI | AYYADSVKGRFTVSRDD | PAGRIED | ELWGQGT | Vicugna |
| | LVQPGGSLRLS | | GKEREFVA | | AKNTVYLQMNSLKPEDT | | QVTVSS | |
| | CVASG | | GVG | | GVYYCKR | | | |
| ATL25009.1 | QVQLAESGGG | FTFSTSP | MSWFRQAP | SRNDI | TYYADFVKGRFTISRDNA | PARQIEY | ENWGQG | Vicugna |
| | LVQPGGSLRLS | | GKEREFVA | | KNVAYLQMNNLKPEDTG | | TQVTVSS | |
| | CAASG | | NVG | | VYYCKR | | | |
| ATL24979.1 | QVQLVETGGG | RTFSVSGR | LGWFRQAP | WSVDG | TDLANSVKGRFTISGVNA | GLRGGTYARTIYE | DYWGQG | Vicugna |
| | VVQAGGSLRLS | TFSDHG | GKEREFVG | DATYY | KNTVYLQMNSLKPEDTAV | Y | TQVTVSL | |
| | CVASG | | SIS | | YYCAA | | | |
| ATL25012.1 | QVQLVESGGG | VTFSDYY | IGWHRQDP | WRGDV | TYYGDSVKGRFTISRDNA | YREGI | EYWGKGT | Vicugna |
| | LVQPGGSLRLS | | GKEREFVG | | RNTVYLQMNSLKAGDTA | | QVTVSS | |
| | CAASG | | AVN | | VYYCKA | | | |
| ATL25007.1 | QLQLAETGGGF | RTFSNAL | MAWFRQAP | WSTNN | TRHADSVKGRFTISGDNA | DTSLDRWLRNGN | RYWGRGT | Vicugna |
| | VQAGGSLRLSC | | GKEREFVA | | KNTVYLQMNSLKPEDTAV | P | QVTVSS | |
| | VASG | | RIN | | YYCAG | | | |
| ATL24983.1 | QLQLVESGGSL | FTFSAKG | MSWYRQAP | HTGEN | VNYADSVKGRFRISRNNA | RRILRP | DFWGQGI | Vicugna |
| | KLSCAASG | | GKERELVA | | KNMLYLHMTSLKPEDTAV | | EVTVSP | |
| | | | YIS | | YYCAA | | | |
| ATL24985.1 | QLQLAETGGGL | RSFSLAS | MGWFRQAP | RSISL | TKYADFVKGRYTISRDNV | DLGAWSSVIVEPT | DYWGQG | Vicugna |
| | VQAGGSLRLSC | | GKEREFVA | | KNTVYLQMNTLKPEDTAV | YEW | TQVTVSP | |
| | AASG | | AVS | | YYCAA | | | |
| ATL24986.1 | QVQLVESGGG | SISSIDV | MGWYRQA | SGGS | TDYAGSVKGRFTISRDNA | EKLRAGIPY | NYWGQG | Vicugna |
| | LVQAGGSLRLS | | SGKEREQV | | KNTVSLQMNSLKPEDTAV | | TQVTASS | |
| | CAASE | | AVST | | YYCQA | | | |
| ATL24990.1 | QLQLAETGGGL | SMFSMYN | ITWYRQPP | NIGG | TNYVDSVKGRFTISRDNA | KYSLRSSW | DYWGQG | Vicugna |
| | VQPGGSLRLSC | | GKQRELVA | | KKTAYLQMNSLKPEDTAV | | TQVTVSS | |
| | AASG | | AIT | | YYCNA | | | |
| ATL24993.1 | QVQLVETGGG | GTFSSYA | MGWFRQAP | LSGAG | TYYQDSVKGRFTISRDNA | TGERGYGDQGYL | EVWGRGT | Vicugna |
| | LVQAGGSLRLS | | GKERDFVA | | KNTVYLQMNSLKPEDTAV | | LVTVSS | |
| | CVASG | | GIS | | YYCKA | | | |
| ATL24995.1 | QVQLAETGGG | FSFSDYQ | MSWYRQAP | TTGTF | TQYADSVKGRFTISRDNA | VDLGGSF | GSWGQG | Vicugna |
| | LVQPGGSLRLS | | GKEREWVA | | KNTVYLQLNSVKPDDTAV | | TQVTVSS | |
| | CAASG | | LIT | | YYCKA | | | |
| ATL24996.1 | QVQLAETGGG | SMFSMYR | MSWYRQAP | SGGR | LNYAESVKGRFTISRDNG | YYSDNF | NGWGQG | Vicugna |
| | SVQPGGSLGLS | | GKERELVA | | KKTVYLQMNSLKPEDTAV | | TQVTVSS | |
| | CAASG | | SIG | | YYCNA | | | |
| ATL24997.1 | QVQLAETGGG | RTSSVYS | MGWFRQAA | STNEI | TYYADSVKGRFTVSRDN | PARTIEL | ENWGQG | Vicugna |
| | LVQAGDSLRLS | | GKEREFVA | | AKETVYLQMNNLKPEDT | | TQVTVSS | |
| | CTASG | | SVG | | GVYYCKR | | | |
| ATL24998.1 | QLQLAETGGGL | RMVSSRA | MGWFRQPP | WTGDS | TYYADSVKGRFTISRDNA | PAHFSGNYLSPH | EHWGQG | Vicugna |
| | VQAGGSLRLSC | | GKEREFVA | | NNTVYLQMNSLKPEDTG | VYEY | TQVTVSS | |
| | AASG | | AIS | | VYYCAA | | | |
| ATL25000.1 | QVQLVETGGG | FIFDNYA | IGWFRQAP | SHDGN | TYYADSVKGRFTVSRDS | DRYLYSGSGIVTY | EYWGQGT | Vicugna |
| | LVQAGGSLRLS | | GKEREGVS | | GKNTVYLEMNSLSPEDTA | CPNP | QVTVSS | |
| | CAASG | | CTS | | VYYCAA | | | |
| ATL25001.1 | QVQLAESGGG | GTFSDYG | MGWFRQAP | WNGN | IEYADSVKGRFTISRDNA | SISGYAYNAIERY | NYWGQG | Vicugna |
| | LVQAGGSLRLS | | GKEREFVA | GGNG | KNTVHLQMNSLTPEDTAV | | TQVTVSS | |
| | CATSG | | AIR | | YYCAA | | | |
| ATL25011.1 | QVQLAESGGG | RINSIYA | MDWHRQA | SGGT | ETYADAVKGRFTISRDNA | DVADPGYDD | HFWGQGT | Vicugna |
| | LAQSGGSLRLS | | PGKQREWV | | KNTAYLQMNHLKPEDTG | | QVTVSS | |
| | CVASG | | ARLT | | VYLCDV | | | |
| CAP58558.1 | EVQLQASGGG | FIFGWST | MSWYRQAP | GGGSA | TTYTDSVKGRFTISRDRA | DVSTGFRYQRK | DYWGRGT | Vicugna |
| | SVQPGGSLRLS | | GKQREWVS | | KNTLYLQMNSLKPEDTAI | | QVTVSS | |
| | CAASG | | IS | | YYCNA | | | |
| CAQ53176.1 | QVQLMESGGG | FTLDYYA | IGWFRQAP | SSDGS | TYYADSVKGRFTISRDNA | DRPPCYYCSGYG | GSWGQG | Vicugna |
| | LVQPGGSLRLS | | GKEREGVS | | KNTVYLQMNSLKPEDTAV | CYR | TQVTVSS | |
| | CAASG | | CIS | | YYCAA | | | |
| CAQ53177.1 | QLQLVESGGGL | SIFSINA | MGWYRQA | SGGS | TNYADSVKGRFTISRDNA | ESSWAEGGYL | EVWGQGT | Vicugna |
| | VQPGGSLRLSC | | PGKQRELV | | KNTVYLQMNSLKPEDTAV | | LVTVSS | |
| | AASG | | AAIT | | YYCNA | | | |
| CAQ53178.1 | QLQLVESGGGL | CTFSSYA | MGWFRQAP | WSGGS | TYYADSVKGRFTISRDNA | EAVVAGLLRPPPY | DYWGQG | Vicugna |
| | VRAGGSLRLSC | | GKEREFVA | | KNTVYLQMNSLKPEDTAV | EY | TQVTVSS | |
| | AASG | | AIS | | YYCAA | | | |
| CAQ53179.1 | QVQLVESGGG | RTFSSYA | MGWFRQAP | WSGGS | TYYADSVKGRFTISRDNA | DRSYTVVAGPRY | DYWGQG | Vicugna |
| | LVQAGGSLRLS | | GKEREFVA | | KNTVYLQMNSLKPEDTAV | EY | TQVTVSS | |
| | CAASG | | AIS | | YYCAA | | | |
| CAQ53181.1 | QVQLMESGGG | RTFSSYD | MGWYRQA | WSGGS | TYYADSVKGRFTISRDNA | DKDSDYDVQYGM | DYWGKGT | Vicugna |
| | LVQAGGSLRLS | | PGKEREFV | | KNTVYLQMNSLKPEDTAI | | LVTVSS | |
| | CAASG | | AAIS | | YYCNA | | | |
| CAQ53183.1 | QVQLMESGGG | RTFSSYA | MGWFRQAP | WSGGS | TYYADSVKGRFTISRDNA | APFPDGVLALGTI | GSWGQG | Vicugna |
| | LVQAGGSLRLS | | GKEREFVA | | KNTVYLQMNSLKPEDTAV | ATMPGFF | TQVTVSS | |
| | CAASG | | AIS | | YYCAA | | | |
| CAQ53185.1 | QLQLVESGGGL | FTLDYYA | IGWFRQAP | SSDGS | TYYADSVKGRFTISRDNA | DPNTDYGLEDLN | DYWGQG | Vicugna |
| | VQPGGSLRLSC | | GKEREGVS | | ENTVYLQMNSLKPEDTAV | PQEY | TQVTVSS | |
| | AASG | | CIS | | YYCAT | | | |

TABLE 11
Amino acid profile of natural VHHs and synthetic VHHs in the VHH input library. Position-wise amino acid profile
of natural VHHs and VHHs in the input library. Positions are relative positions within each segment and numbers
are percentage of the corresponding amino acid labelled to the left of each segment.
natural VHHs (298 unique VHHs from RSCB)

| | Frame1 | | | | | | | | | | | | |
|---|---|---|---|---|---|---|---|---|---|---|---|---|---|
| | 1 | 2 | 3 | 4 | 5 | 6 | 7 | 8 | 9 | 10 | 11 | 12 | 13 |
| P | 0 | 0 | 0 | 0.34 | 0 | 0 | 0 | 0 | 0 | 0 | 0.34 | 0 | 0.67 |
| A | 1.34 | 0 | 0.34 | 0 | 2.35 | 1.34 | 0 | 0 | 0 | 1.34 | 0.34 | 2.35 | 0 |
| G | 0 | 1.68 | 0 | 0.34 | 0 | 0 | 0 | 99 | 99 | 97.7 | 0.34 | 0 | 0 |
| M | 0 | 0.34 | 0 | 0.34 | 0 | 0 | 0 | 0 | 0 | 0 | 0.67 | 0.67 | 0.34 |
| I | 0 | 0 | 0 | 0 | 0 | 0 | 0 | 0 | 0 | 0 | 0 | 0 | 0 |
| L | 0 | 1.68 | 0 | 98.7 | 0 | 0 | 0 | 0 | 0 | 0 | 80.2 | 0.67 | 0 |
| V | 0 | 95 | 0 | 0 | 43.3 | 0 | 0 | 0 | 0.34 | 0 | 0.67 | 95.6 | 0.34 |
| F | 0 | 0 | 0 | 0.34 | 0 | 0 | 0.34 | 0 | 0 | 0 | 0 | 0 | 0 |
| W | 0 | 0 | 0 | 0 | 0 | 0 | 0 | 0 | 0 | 0 | 0 | 0 | 0 |
| C | 0 | 0 | 0 | 0 | 0 | 0 | 0 | 0 | 0 | 0.34 | 0 | 0 | 0 |
| S | 0 | 0 | 0 | 0 | 0.34 | 0 | 94 | 0 | 0 | 0 | 16.1 | 0 | 0 |
| T | 0 | 0 | 0 | 0 | 0 | 0 | 5.7 | 0 | 0 | 0 | 1.34 | 0 | 0.34 |
| N | 0 | 0 | 0 | 0 | 0 | 0 | 0 | 0 | 0 | 0 | 0 | 0 | 0 |
| Q | 77.2 | 0 | 96 | 0 | 51 | 2.01 | 0 | 0 | 0 | 0.34 | 0 | 0 | 95 |
| Y | 0 | 0 | 0 | 0 | 0 | 0 | 0 | 0 | 0 | 0 | 0 | 0 | 0 |
| H | 0 | 0 | 0 | 0 | 0 | 0 | 0 | 0 | 0 | 0 | 0 | 0 | 1.34 |
| R | 0 | 0.34 | 0.34 | 0 | 0 | 0 | 0 | 0 | 0 | 0.34 | 0 | 0 | 0.67 |
| K | 1.34 | 0 | 3.36 | 0 | 0 | 0 | 0 | 0 | 0 | 0 | 0 | 0 | 0 |
| D | 8.05 | 0 | 0 | 0 | 0 | 0.34 | 0 | 0 | 0 | 0 | 0 | 0 | 0 |
| E | 7.38 | 0 | 0 | 0 | 3.02 | 96.3 | 0 | 0.34 | 0 | 0 | 0 | 0.67 | 1.34 |
| | 4.7 | 1.01 | 0 | 0 | 0 | 0 | 0 | 0 | 0 | 0 | 0 | 0 | 0 |
| MAX | 77.2 | 95 | 96 | 98.7 | 51 | 96.3 | 94 | 99 | 99 | 97.7 | 80.2 | 95.6 | 95 |
| | 14 | 15 | 16 | 17 | 18 | 19 | 20 | 21 | 22 | 23 | 24 | 25 | 26 |
| | 27.2 | 0 | 0 | 0 | 0 | 0 | 0 | 0 | 0 | 0 | 1.01 | 1.01 | 0.34 |
| | 66.4 | 0.34 | 1.34 | 0.34 | 0 | 0 | 0 | 1.01 | 0.34 | 75.5 | 83.2 | 1.34 | 1.01 |
| | 0 | 99.3 | 89.9 | 0.67 | 0 | 0 | 0 | 0 | 0 | 0.67 | 2.35 | 0 | 86.6 |
| | 0 | 0 | 0 | 0 | 0.34 | 0 | 0 | 0 | 0 | 0 | 0 | 0 | 0 |
| | 0 | 0 | 0 | 0 | 0 | 0 | 0 | 0 | 0 | 0.34 | 0.34 | 0 | 0.67 |
| | 0 | 0 | 0 | 0 | 98.7 | 0.67 | 98 | 0.67 | 0 | 0.67 | 0.34 | 0 | 0 |
| | 1.01 | 0 | 0 | 0 | 0 | 0 | 1.34 | 0 | 0 | 7.72 | 7.72 | 0 | 1.01 |
| | 0 | 0 | 0 | 0 | 0 | 0 | 0 | 1.01 | 0 | 0 | 0.67 | 0 | 0 |
| | 0 | 0 | 0 | 0 | 0 | 0 | 0 | 0 | 0 | 0 | 0 | 0 | 0 |
| | 0 | 0 | 0 | 0 | 0 | 0 | 0 | 0 | 99 | 0.67 | 0 | 0 | 0 |
| | 0.67 | 0 | 0.34 | 98.3 | 0.67 | 1.01 | 0 | 95.3 | 0.67 | 2.01 | 0.34 | 97 | 0.67 |
| | 4.03 | 0 | 0 | 0.34 | 0 | 4.36 | 0 | 1.34 | 0 | 8.72 | 2.35 | 0.67 | 0.67 |
| | 0 | 0 | 0 | 0 | 0 | 0 | 0 | 0.34 | 0 | 0 | 0 | 0 | 0 |
| | 0.34 | 0 | 0.34 | 0 | 0 | 0 | 0 | 0 | 0 | 0.34 | 0 | 0 | 0.34 |
| | 0 | 0 | 0 | 0 | 0 | 0 | 0 | 0 | 0 | 0 | 0.34 | 0 | 0 |
| | 0 | 0 | 0.34 | 0 | 0 | 0 | 0 | 0.34 | 0 | 0 | 0 | 0 | 0 |
| | 0 | 0 | 0 | 0.34 | 0.34 | 90.3 | 0.67 | 0 | 0 | 0 | 0.34 | 0 | 2.35 |
| | 0 | 0 | 0.34 | 0 | 0 | 3.69 | 0 | 0 | 0 | 1.01 | 0.34 | 0 | 0 |
| | 0 | 0 | 6.04 | 0 | 0 | 0 | 0 | 0 | 0 | 0 | 0.67 | 0 | 0.34 |
| | 0.34 | 0.34 | 1.34 | 0 | 0 | 0 | 0 | 0 | 0 | 2.35 | 0 | 0 | 6.04 |
| | 0 | 0 | 0 | 0 | 0 | 0 | 0 | 0 | 0 | 0 | 0 | 0 | 0 |
| | 66.4 | 99.3 | 89.9 | 98.3 | 98.7 | 90.3 | 98 | 95.3 | 99 | 75.5 | 83.2 | 97 | 86.6 |

| | CDR1 | | | | | | | | | |
|---|---|---|---|---|---|---|---|---|---|---|
| | 1 | 2 | 3 | 4 | 5 | 6 | 7 | 8 | 9 | 10 |
| P | 0.34 | 3.36 | 1.01 | 1.34 | 3.02 | 1.01 | 3.02 | 0 | 0.34 | 0 |
| A | 1.01 | 4.03 | 2.01 | 2.68 | 2.68 | 3.02 | 33.2 | 1.01 | 0 | 1.34 |
| G | 4.03 | 1.01 | 2.35 | 5.03 | 3.02 | 1.34 | 4.36 | 0.34 | 0.34 | 0.34 |
| M | 0 | 1.01 | 0.34 | 0.34 | 2.35 | 0 | 0.34 | 0.34 | 0.34 | 0 |
| I | 3.02 | 19.8 | 4.36 | 0.67 | 14.4 | 2.01 | 3.02 | 0 | 0 | 0 |
| L | 3.69 | 1.68 | 10.7 | 0 | 4.36 | 4.03 | 1.34 | 0 | 0 | 0 |
| V | 1.34 | 1.01 | 4.03 | 0.67 | 2.01 | 0.67 | 8.72 | 0 | 0 | 0 |
| F | 15.8 | 1.34 | 51.3 | 1.68 | 3.02 | 2.35 | 1.68 | 0 | 0.34 | 0.67 |
| W | 0.34 | 0 | 0.67 | 0.34 | 0.67 | 1.01 | 0 | 0 | 0 | 0 |
| C | 0 | 0 | 0 | 0.67 | 0 | 0.67 | 5.7 | 0 | 0 | 0.34 |
| S | 19.5 | 4.7 | 8.39 | 52.3 | 17.8 | 5.03 | 7.05 | 0 | 0 | 0.67 |
| T | 1.34 | 55.7 | 1.34 | 5.7 | 11.4 | 1.34 | 8.05 | 0.67 | 0.34 | 0.34 |
| N | 3.36 | 0.67 | 0.67 | 4.7 | 9.4 | 15.4 | 3.69 | 0.34 | 0 | 0.34 |
| Q | 0 | 0.34 | 0.34 | 0.67 | 0.34 | 0.34 | 0 | 0 | 0 | 0 |
| Y | 9.73 | 0.67 | 6.71 | 1.01 | 6.38 | 48.7 | 5.37 | 1.01 | 2.35 | 0 |
| H | 1.34 | 0.34 | 1.34 | 0.67 | 1.34 | 2.01 | 2.01 | 0.67 | 0 | 0 |
| R | 33.2 | 1.34 | 1.01 | 9.4 | 7.72 | 1.34 | 2.01 | 0.34 | 0 | 0 |
| K | 0 | 0.34 | 0 | 0.34 | 0.67 | 0.67 | 0.34 | 0 | 0 | 0 |
| D | 1.68 | 2.35 | 2.68 | 10.7 | 6.04 | 4.7 | 6.38 | 0.67 | 0 | 0 |
| E | 0.34 | 0.34 | 0.67 | 1.01 | 1.01 | 1.34 | 0 | 0 | 0.34 | 0 |
| | 0 | 0 | 0 | 0 | 2.35 | 3.02 | 3.69 | 94.6 | 95.6 | 96 |
| | 33.2 | 55.7 | 51.3 | 52.3 | 17.8 | 48.7 | 33.2 | 1.01 | 2.35 | 1.34 |

| | Frame2 | | | | | | | | | |
|---|---|---|---|---|---|---|---|---|---|---|
| | 1 | 2 | 3 | 4 | 5 | 6 | 7 | 8 | 9 | 10 |
| P | 0 | 0 | 0 | 0 | 0 | 0 | 1.34 | 97 | 0.34 | 0.34 |
| A | 1.68 | 14.4 | 0 | 0 | 0 | 0 | 89.6 | 1.01 | 0 | 0.67 |
| G | 0.34 | 75.8 | 0 | 0 | 0 | 0 | 1.01 | 0 | 99 | 0.34 |
| M | 73.2 | 0.34 | 0 | 0 | 0 | 0 | 0 | 0 | 0 | 0.34 |
| I | 13.8 | 0 | 0 | 0 | 0 | 0 | 0.34 | 0 | 0 | 0 |
| L | 2.68 | 0 | 0 | 0.67 | 0 | 0 | 0.34 | 0.67 | 0 | 0.34 |
| V | 5.7 | 0 | 0 | 0.67 | 0 | 0 | 3.69 | 0 | 0 | 0 |
| F | 0 | 0 | 0 | 67.1 | 0.34 | 0 | 0 | 0 | 0 | 0 |
| W | 0.67 | 0 | 99.3 | 0.67 | 0 | 0 | 0 | 0 | 0 | 0 |
| C | 0.34 | 0.34 | 0 | 0 | 0 | 0 | 0 | 0 | 0 | 0 |
| S | 0.67 | 1.68 | 0 | 0 | 0 | 0 | 0.67 | 0.34 | 0 | 0.67 |
| T | 0.67 | 1.34 | 0 | 0 | 0 | 0 | 1.68 | 0.67 | 0 | 1.01 |
| N | 0 | 1.68 | 0 | 0 | 0 | 0 | 0 | 0 | 0 | 2.01 |
| Q | 0.34 | 0.34 | 0 | 0 | 0 | 95 | 0.34 | 0 | 0 | 1.34 |
| Y | 0 | 0 | 0.34 | 30.5 | 0 | 0 | 0 | 0 | 0 | 0 |
| H | 0 | 0 | 0 | 0 | 0.34 | 0 | 0 | 0 | 0 | 0 |
| R | 0 | 2.35 | 0.34 | 0 | 99.3 | 4.7 | 0.34 | 0.34 | 0 | 1.68 |
| K | 0 | 0 | 0 | 0 | 0 | 0.34 | 0 | 0 | 0 | 88.9 |
| D | 0 | 1.68 | 0 | 0.34 | 0 | 0 | 0.67 | 0 | 0 | 0 |
| E | 0 | 0 | 0 | 0 | 0 | 0 | 0 | 0 | 0.67 | 2.35 |
| | 0 | 0 | 0 | 0 | 0 | 0 | 0 | 0 | 0 | 0 |
| | 73.2 | 75.8 | 99.3 | 67.1 | 99.3 | 95 | 89.6 | 97 | 99 | 88.9 |

| 11 | 12 | 13 | 14 | 15 | 16 | 17 | 18 | 19 |
|---|---|---|---|---|---|---|---|---|
| 1.01 | 0.34 | 0 | 0.67 | 0 | 0 | 0 | 0 | 0.34 |
| 1.34 | 0 | 0.67 | 1.34 | 0 | 79.5 | 32.9 | 0.34 | 2.01 |
| 4.36 | 0.34 | 0.67 | 21.5 | 0 | 3.69 | 9.73 | 0.34 | 3.36 |
| 0 | 0 | 0 | 1.34 | 0 | 0 | 0 | 5.37 | 0.34 |
| 0 | 0 | 0.34 | 0 | 2.01 | 0 | 1.68 | 80.9 | 0.34 |
| 0.67 | 1.34 | 0 | 25.2 | 3.36 | 0.67 | 2.35 | 3.36 | 1.34 |
| 0 | 0 | 0.34 | 1.34 | 94 | 1.34 | 4.03 | 5.03 | 1.01 |
| 0 | 0 | 0 | 38.9 | 0 | 0 | 2.01 | 0.67 | 2.01 |
| 0 | 0 | 0 | 6.38 | 0 | 0 | 0 | 0 | 0 |
| 0 | 1.01 | 0 | 0 | 0 | 0 | 10.4 | 0 | 0 |
| 0.34 | 0 | 0 | 1.34 | 0.34 | 13.8 | 12.1 | 1.68 | 36.2 |
| 0 | 0.34 | 0 | 0 | 0 | 0.67 | 10.4 | 0.67 | 20.8 |
| 0 | 0.34 | 0 | 0 | 0 | 0 | 0.67 | 0.67 | 13.1 |
| 18.1 | 0 | 0.67 | 0 | 0 | 0 | 1.34 | 0 | 0 |
| 0 | 0.34 | 0 | 1.01 | 0 | 0 | 1.68 | 0 | 3.36 |
| 0.34 | 0.67 | 0 | 0 | 0 | 0 | 1.34 | 0 | 1.34 |
| 1.01 | 95.3 | 0 | 0.34 | 0 | 0 | 5.7 | 0.34 | 7.38 |
| 0.67 | 0 | 0 | 0.67 | 0 | 0 | 0.67 | 0.34 | 0.67 |
| 1.68 | 0 | 4.03 | 0 | 0.34 | 0 | 2.01 | 0 | 6.04 |
| 70.5 | 0 | 93.3 | 0 | 0 | 0.34 | 1.01 | 0.34 | 0.34 |
| 0 | 0 | 0 | 0 | 0 | 0 | 0 | 0 | 0 |
| 70.5 | 95.3 | 93.3 | 38.9 | 94 | 79.5 | 32.9 | 80.9 | 36.2 |

| | CDR2 | | | | | | | | | |
|---|---|---|---|---|---|---|---|---|---|---|
| | 1 | 2 | 3 | 4 | 5 | 6 | 7 | 8 | 9 | 10 |
| P | 2.01 | 0.34 | 1.01 | 0 | 0.34 | 0.34 | 0 | 0 | 0 | 0 |
| A | 3.69 | 4.7 | 2.35 | 4.36 | 1.01 | 0.34 | 0.67 | 0.34 | 0 | 0 |
| G | 5.7 | 23.5 | 69.5 | 37.2 | 6.71 | 0.67 | 1.01 | 0 | 0 | 0 |
| M | 0.67 | 0.34 | 0.34 | 1.01 | 1.01 | 0 | 0 | 0 | 0 | 0 |
| I | 1.34 | 2.01 | 0 | 3.02 | 2.68 | 0.67 | 0.34 | 0 | 0 | 0 |
| L | 1.01 | 1.68 | 0.67 | 0.67 | 3.02 | 0 | 0 | 0 | 0 | 0 |
| V | 1.34 | 3.02 | 0.67 | 3.36 | 2.01 | 0 | 0 | 0 | 0 | 0 |
| F | 1.01 | 1.68 | 1.01 | 0.34 | 0.34 | 0.67 | 0 | 0 | 0.34 | 0 |
| W | 21.8 | 0 | 0 | 0.34 | 0.34 | 0 | 0 | 0 | 0 | 0 |
| C | 0.34 | 0 | 0 | 0 | 0 | 0 | 0 | 0 | 0 | 0 |
| S | 30.9 | 32.6 | 5.7 | 16.4 | 20.8 | 0.67 | 0.34 | 0.34 | 0.34 | 0 |
| T | 7.05 | 5.7 | 3.36 | 7.05 | 8.72 | 0 | 0 | 0.34 | 0.34 | 0 |
| N | 4.03 | 5.37 | 2.01 | 3.36 | 6.38 | 0.34 | 0 | 0 | 0 | 0 |
| Q | 1.01 | 0.67 | 0 | 0.34 | 0.34 | 0 | 0 | 0 | 0 | 0 |
| Y | 0.34 | 2.01 | 0.67 | 1.68 | 2.68 | 0.34 | 0.67 | 0.34 | 0.34 | 0.67 |
| H | 0 | 1.01 | 0.34 | 0.67 | 0.34 | 0 | 0 | 0 | 0 | 0 |
| R | 13.8 | 5.37 | 2.35 | 7.05 | 5.37 | 0 | 0 | 0 | 0.34 | 0 |
| K | 1.01 | 1.01 | 0 | 1.68 | 1.01 | 0.34 | 0 | 0.34 | 0 | 0 |
| D | 2.01 | 7.38 | 9.73 | 8.39 | 2.01 | 0.34 | 0 | 0.67 | 0 | 0 |
| E | 1.01 | 1.68 | 0 | 1.01 | 0.67 | 0 | 0 | 0 | 0 | 0 |
| | 0 | 0 | 0.34 | 2.01 | 34.2 | 95.3 | 97 | 97.7 | 98.3 | 99.3 |
| | 30.9 | 32.6 | 69.5 | 37.2 | 20.8 | 0.67 | 1.01 | 0.67 | 0.34 | 0.67 |

| | Frame3 | | | | | | | | | | | | | |
|---|---|---|---|---|---|---|---|---|---|---|---|---|---|---|
| | 1 | 2 | 3 | 4 | 5 | 6 | 7 | 8 | 9 | 10 | 11 | 12 | 13 | 14 |
| P | 3 | 0 | 0 | 2 | 0 | 2 | 0 | 0 | 0 | 0 | 0 | 0 | 0 | 0 |
| A | 6 | 2 | 0 | 73 | 1 | 1 | 2 | 1 | 0 | 0 | 0 | 3 | 1 | 1 |
| G | 0 | 0 | 0 | 6 | 2 | 0 | 0 | 0 | 94 | 0 | 0 | 0 | 0 | 0 |
| M | 0 | 1 | 0 | 0 | 0 | 0 | 1 | 0 | 0 | 0 | 0 | 0 | 1 | 0 |
| I | 4 | 2 | 2 | 1 | 0 | 0 | 0 | 0 | 0 | 0 | 0 | 0 | 90 | 0 |
| L | 2 | 4 | 1 | 1 | 0 | 0 | 2 | 1 | 0 | 0 | 0 | 0 | 1 | 0 |
| V | 1 | 3 | 1 | 3 | 0 | 0 | 93 | 0 | 0 | 0 | 1 | 0 | 4 | 0 |
| F | 0 | 2 | 1 | 0 | 0 | 3 | 0 | 0 | 0 | 0 | 96 | 0 | 1 | 0 |
| W | 0 | 3 | 0 | 0 | 0 | 0 | 0 | 0 | 0 | 0 | 0 | 0 | 0 | 0 |
| C | 0 | 0 | 0 | 0 | 0 | 0 | 0 | 0 | 0 | 0 | 0 | 0 | 0 | 0 |
| S | 3 | 5 | 1 | 2 | 1 | 92 | 0 | 0 | 0 | 0 | 0 | 2 | 0 | 97 |
| T | 76 | 6 | 0 | 6 | 0 | 1 | 0 | 0 | 0 | 0 | 0 | 93 | 1 | 1 |
| N | 0 | 18 | 0 | 0 | 2 | 0 | 0 | 1 | 0 | 0 | 0 | 0 | 0 | 0 |
| Q | 1 | 0 | 0 | 1 | 0 | 0 | 0 | 2 | 0 | 0 | 0 | 0 | 0 | 0 |
| Y | 0 | 34 | 92 | 0 | 0 | 0 | 0 | 0 | 0 | 0 | 0 | 0 | 0 | 0 |
| H | 0 | 4 | 1 | 0 | 0 | 0 | 0 | 0 | 0 | 0 | 0 | 0 | 0 | 0 |
| R | 1 | 3 | 0 | 2 | 0 | 0 | 0 | 4 | 0 | 99 | 1 | 0 | 0 | 0 |
| K | 0 | 2 | 0 | 1 | 0 | 0 | 0 | 88 | 0 | 0 | 0 | 0 | 0 | 0 |
| D | 0 | 8 | 0 | 0 | 89 | 0 | 0 | 0 | 4 | 0 | 0 | 1 | 0 | 0 |
| E | 0 | 1 | 0 | 1 | 4 | 0 | 0 | 2 | 1 | 0 | 0 | 0 | 0 | 0 |
| | 0 | 0 | 0 | 0 | 0 | 0 | 0 | 0 | 0 | 0 | 0 | 0 | 0 | 0 |
| | 76 | 34 | 92 | 73 | 89 | 92 | 93 | 88 | 94 | 99 | 96 | 93 | 90 | 97 |
| | 15 | 16 | 17 | 18 | 19 | 20 | 21 | 22 | 23 | 24 | 25 | 26 | 27 | 28 |
| | 0 | 0 | 0 | 0 | 0 | 0 | 0 | 0 | 0 | 0 | 0 | 0 | 0 | 0 |
| | 1 | 0 | 0 | 87 | 3 | 0 | 4 | 5 | 1 | 0 | 0 | 0 | 0 | 0 |
| | 2 | 1 | 0 | 4 | 0 | 0 | 0 | 0 | 0 | 0 | 0 | 0 | 0 | 2 |
| | 0 | 0 | 0 | 0 | 1 | 0 | 5 | 4 | 0 | 0 | 0 | 97 | 0 | 0 |
| | 1 | 0 | 2 | 0 | 0 | 0 | 1 | 1 | 0 | 0 | 0 | 0 | 0 | 0 |
| | 1 | 0 | 0 | 0 | 0 | 0 | 1 | 9 | 0 | 99 | 2 | 2 | 0 | 0 |
| | 0 | 0 | 1 | 2 | 0 | 0 | 0 | 80 | 0 | 0 | 0 | 0 | 0 | 1 |
| | 0 | 0 | 1 | 0 | 0 | 0 | 0 | 0 | 2 | 0 | 0 | 0 | 0 | 0 |
| | 0 | 0 | 0 | 0 | 0 | 0 | 0 | 0 | 0 | 0 | 0 | 0 | 0 | 0 |
| | 0 | 0 | 0 | 0 | 0 | 0 | 0 | 0 | 0 | 0 | 0 | 0 | 0 | 0 |
| | 2 | 0 | 4 | 1 | 1 | 2 | 1 | 0 | 5 | 0 | 0 | 0 | 4 | 82 |
| | 0 | 0 | 1 | 1 | 0 | 3 | 84 | 0 | 2 | 0 | 1 | 0 | 1 | 1 |
| | 0 | 1 | 79 | 1 | 2 | 84 | 0 | 0 | 1 | 0 | 0 | 0 | 84 | 12 |
| | 9 | 0 | 0 | 0 | 1 | 0 | 0 | 0 | 0 | 0 | 90 | 0 | 0 | 0 |
| | 0 | 0 | 1 | 0 | 0 | 0 | 0 | 0 | 83 | 0 | 0 | 0 | 0 | 0 |
| | 0 | 0 | 1 | 0 | 0 | 0 | 0 | 0 | 1 | 0 | 1 | 0 | 1 | 0 |
| | 82 | 0 | 0 | 0 | 3 | 1 | 1 | 0 | 0 | 0 | 2 | 0 | 0 | 1 |
| | 3 | 0 | 5 | 0 | 84 | 5 | 0 | 0 | 0 | 0 | 0 | 0 | 0 | 0 |
| | 0 | 97 | 5 | 3 | 0 | 2 | 0 | 0 | 3 | 0 | 1 | 0 | 9 | 1 |
| | 0 | 1 | 1 | 0 | 5 | 0 | 0 | 0 | 0 | 0 | 4 | 0 | 0 | 0 |
| | 0 | 0 | 0 | 0 | 0 | 0 | 0 | 0 | 0 | 0 | 0 | 0 | 0 | 0 |
| | 82 | 97 | 79 | 87 | 84 | 84 | 84 | 80 | 83 | 99 | 90 | 97 | 84 | 82 |

| 29 | 30 | 31 | 32 | 33 | 34 | 35 | 36 | 37 | 38 | 39 | 40 | 41 |
|---|---|---|---|---|---|---|---|---|---|---|---|---|
| 0 | 0 | 90 | 0 | 0 | 0 | 0 | 0 | 0 | 0 | 0 | 0 | 0 |
| 0 | 1 | 1 | 0 | 0 | 1 | 96 | 1 | 0 | 0 | 0 | 64 | 69 |
| 0 | 0 | 0 | 1 | 0 | 0 | 3 | 0 | 0 | 0 | 0 | 3 | 3 |
| 0 | 0 | 0 | 0 | 0 | 0 | 0 | 5 | 0 | 0 | 0 | 0 | 0 |
| 0 | 0 | 0 | 0 | 0 | 0 | 0 | 14 | 0 | 0 | 0 | 0 | 1 |
| 97 | 0 | 3 | 0 | 0 | 0 | 0 | 2 | 0 | 1 | 0 | 0 | 4 |
| 2 | 0 | 0 | 0 | 0 | 0 | 0 | 68 | 0 | 2 | 0 | 2 | 7 |
| 0 | 0 | 0 | 0 | 0 | 0 | 0 | 0 | 0 | 4 | 0 | 1 | 0 |
| 0 | 0 | 0 | 0 | 0 | 0 | 0 | 0 | 0 | 0 | 0 | 0 | 0 |
| 0 | 0 | 0 | 0 | 0 | 0 | 0 | 0 | 0 | 0 | 99 | 0 | 0 |
| 0 | 0 | 2 | 0 | 0 | 1 | 0 | 1 | 0 | 2 | 0 | 1 | 2 |
| 0 | 1 | 1 | 0 | 0 | 98 | 0 | 5 | 0 | 2 | 0 | 2 | 6 |
| 0 | 2 | 0 | 0 | 0 | 0 | 0 | 1 | 0 | 0 | 0 | 17 | 0 |
| 0 | 1 | 0 | 0 | 0 | 0 | 0 | 0 | 0 | 0 | 0 | 0 | 0 |
| 0 | 0 | 1 | 0 | 0 | 0 | 0 | 0 | 100 | 87 | 0 | 1 | 2 |
| 0 | 0 | 0 | 0 | 0 | 0 | 0 | 0 | 0 | 1 | 0 | 4 | 0 |
| 0 | 4 | 1 | 0 | 0 | 0 | 0 | 1 | 0 | 0 | 0 | 1 | 4 |
| 0 | 87 | 0 | 0 | 0 | 0 | 0 | 0 | 0 | 0 | 0 | 2 | 0 |
| 0 | 0 | 0 | 4 | 99 | 0 | 0 | 1 | 0 | 0 | 0 | 0 | 1 |
| 0 | 4 | 0 | 95 | 0 | 0 | 0 | 0 | 0 | 0 | 0 | 0 | 1 |
| 0 | 0 | 0 | 0 | 0 | 0 | 0 | 0 | 0 | 0 | 0 | 0 | 0 |
| 97 | 87 | 90 | 95 | 99 | 98 | 96 | 68 | 100 | 87 | 99 | 64 | 69 |

| | CDR3 | | | | | | | | | | | | | | |
|---|---|---|---|---|---|---|---|---|---|---|---|---|---|---|---|
| | 1 | 2 | 3 | 4 | 5 | 6 | 7 | 8 | 9 | 10 | 11 | 12 | 13 | 14 | 15 |
| P | 1.01 | 6.71 | 2.68 | 6.04 | 4.03 | 3.02 | 4.7 | 6.04 | 5.03 | 6.38 | 3.69 | 1.34 | 1.34 | 0.67 | 1.68 |
| A | 6.71 | 5.7 | 5.7 | 7.38 | 5.37 | 6.38 | 6.38 | 3.02 | 6.04 | 7.05 | 5.37 | 2.68 | 3.02 | 2.01 | 2.01 |
| G | 15.4 | 7.72 | 15.8 | 14.4 | 12.1 | 15.4 | 10.1 | 6.38 | 5.7 | 5.37 | 6.38 | 5.7 | 5.03 | 2.68 | 1.68 |
| M | 0 | 1.34 | 0 | 1.68 | 1.01 | 2.01 | 0.67 | 1.34 | 1.34 | 0.34 | 0.34 | 1.68 | 0.67 | 1.01 | 0 |
| I | 1.34 | 4.03 | 2.35 | 3.69 | 3.02 | 2.35 | 3.69 | 3.02 | 1.68 | 0.67 | 3.36 | 1.01 | 1.01 | 0.67 | 1.01 |
| L | 2.35 | 9.06 | 4.36 | 5.03 | 6.71 | 4.36 | 7.72 | 5.7 | 4.03 | 4.03 | 2.68 | 3.02 | 0.34 | 1.34 | 1.68 |
| V | 3.69 | 6.71 | 5.03 | 6.71 | 6.04 | 5.7 | 4.7 | 4.7 | 3.69 | 3.36 | 2.35 | 2.01 | 2.68 | 0.67 | 0.67 |
| F | 2.01 | 3.36 | 4.03 | 4.36 | 4.03 | 2.35 | 1.34 | 2.68 | 2.68 | 1.01 | 1.34 | 1.01 | 1.01 | 2.68 | 0.67 |
| W | 0.67 | 3.69 | 3.36 | 3.02 | 5.03 | 4.03 | 3.02 | 2.68 | 1.68 | 2.68 | 2.01 | 1.34 | 1.01 | 1.01 | 0.34 |
| C | 0.67 | 1.34 | 0.34 | 2.35 | 1.34 | 3.02 | 1.01 | 3.02 | 2.35 | 1.01 | 2.01 | 0.34 | 0 | 0.67 | 0.67 |
| S | 8.05 | 8.05 | 7.38 | 7.72 | 12.4 | 9.73 | 15.1 | 10.4 | 10.4 | 8.05 | 5.37 | 5.7 | 2.35 | 3.69 | 2.35 |
| T | 8.72 | 7.05 | 6.71 | 9.06 | 7.72 | 7.38 | 6.04 | 6.04 | 7.72 | 5.37 | 2.68 | 4.03 | 4.36 | 0.67 | 1.01 |
| N | 4.7 | 2.68 | 3.69 | 1.68 | 2.68 | 1.34 | 0 | 2.68 | 1.68 | 3.02 | 3.02 | 2.35 | 3.36 | 2.35 | 1.34 |
| Q | 2.01 | 1.34 | 5.03 | 1.68 | 1.68 | 1.01 | 1.01 | 1.01 | 1.68 | 1.01 | 2.68 | 1.68 | 1.01 | 0.67 | 0 |
| Y | 2.01 | 3.69 | 10.4 | 8.39 | 7.05 | 8.72 | 9.73 | 8.05 | 9.73 | 12.1 | 6.38 | 8.72 | 10.7 | 6.38 | 6.04 |
| H | 1.34 | 1.01 | 1.01 | 2.01 | 1.34 | 0 | 0.67 | 1.01 | 0.34 | 1.68 | 1.01 | 1.68 | 1.01 | 0.67 | 0 |
| R | 13.8 | 13.8 | 12.1 | 8.39 | 6.71 | 7.38 | 6.71 | 8.72 | 4.7 | 5.03 | 5.37 | 5.37 | 3.36 | 2.68 | 0.67 |
| K | 6.04 | 3.02 | 2.35 | 0 | 0.67 | 0.67 | 0 | 0 | 1.01 | 1.01 | 1.68 | 1.34 | 1.34 | 1.01 | 0.67 |
| D | 15.4 | 5.03 | 3.69 | 1.68 | 3.02 | 4.36 | 6.04 | 6.04 | 5.7 | 4.03 | 4.36 | 4.7 | 3.69 | 2.68 | 2.01 |
| E | 4.03 | 3.36 | 2.01 | 1.68 | 1.68 | 2.01 | 0.67 | 1.68 | 3.36 | 3.36 | 4.36 | 3.36 | 2.01 | 2.01 | 2.68 |
| | 0 | 1.34 | 2.01 | 3.02 | 6.38 | 8.72 | 10.7 | 15.8 | 19.5 | 23.5 | 33.6 | 40.9 | 50.7 | 63.8 | 72.8 |
| | 15.4 | 13.8 | 15.8 | 14.4 | 12.4 | 15.4 | 15.1 | 10.4 | 10.4 | 12.1 | 6.38 | 8.72 | 10.7 | 6.38 | 6.04 |
| | 16 | 17 | 18 | 19 | 20 | 21 | 22 | 23 | 24 | 25 | 26 | 27 | 28 | 29 | 30 |
| | 0.67 | 1.34 | 0 | 0.34 | 0.34 | 0 | 0 | 0 | 0 | 0 | 0 | 0 | 0 | 0 | 0 |
| | 0.34 | 0.34 | 1.01 | 0 | 0 | 0.34 | 0 | 0.34 | 0 | 0 | 0 | 0 | 0 | 0 | 0 |
| | 2.01 | 1.01 | 1.01 | 1.34 | 0 | 1.01 | 0 | 0.34 | 0.34 | 0 | 0 | 0 | 0 | 0 | 0 |
| | 0 | 0 | 0.67 | 0 | 0 | 0.34 | 0.67 | 0.34 | 0 | 0 | 0 | 0 | 0 | 0 | 0 |
| | 0 | 0.34 | 0 | 0 | 0.34 | 0.34 | 0.34 | 0 | 0 | 0 | 0 | 0 | 0 | 0 | 0.34 |
| | 2.01 | 1.34 | 0.34 | 0 | 0 | 0 | 0 | 0 | 0 | 0 | 0 | 0 | 0 | 0 | 0 |
| | 0.67 | 0 | 0 | 0 | 0.67 | 0.34 | 0 | 0 | 0 | 0 | 0 | 0 | 0 | 0 | 0 |
| | 0.34 | 0.67 | 0.34 | 0.34 | 0 | 0 | 0 | 0 | 0 | 0 | 0 | 0 | 0 | 0 | 0 |
| | 0 | 0 | 0 | 0 | 0 | 0 | 0 | 0 | 0 | 0 | 0 | 0.34 | 0.34 | 0 | 0 |
| | 0.34 | 0 | 0 | 0 | 0 | 0 | 0 | 0 | 0 | 0 | 0 | 0 | 0 | 0 | 0 |
| | 1.34 | 1.01 | 0.34 | 0.34 | 0.34 | 0 | 0 | 0 | 0 | 0 | 0 | 0 | 0 | 0.34 | 0.34 |
| | 1.68 | 1.01 | 0 | 0 | 0 | 0.34 | 0 | 0 | 0 | 0 | 0.34 | 0.34 | 0 | 0 | 0 |
| | 0.34 | 1.01 | 0.34 | 0 | 0 | 0 | 0 | 0 | 0 | 0 | 0 | 0 | 0 | 0 | 0 |
| | 0.67 | 0 | 0 | 0 | 0 | 0 | 0 | 0 | 0 | 0 | 0 | 0 | 0 | 0 | 0 |
| | 8.39 | 3.02 | 2.68 | 1.01 | 1.34 | 0 | 1.01 | 0 | 0.34 | 0 | 0 | 0 | 0 | 0 | 0 |
| | 0 | 0.34 | 0 | 0 | 0 | 0 | 0 | 0 | 0 | 0.34 | 0.34 | 0 | 0 | 0 | 0 |
| | 0.67 | 0.34 | 0 | 0.34 | 0 | 0 | 0 | 0 | 0.34 | 0.34 | 0 | 0 | 0 | 0 | 0 |
| | 0 | 0 | 0.67 | 0.34 | 0 | 0 | 0.34 | 0 | 0 | 0 | 0 | 0 | 0 | 0 | 0 |
| | 1.01 | 0.67 | 0.67 | 0 | 0.34 | 0 | 0 | 0 | 0 | 0 | 0 | 0 | 0 | 0 | 0 |
| | 0.67 | 0 | 0 | 0 | 0 | 0 | 0 | 0 | 0 | 0 | 0 | 0 | 0.34 | 0.34 | 0 |
| | 78.9 | 87.6 | 91.9 | 96 | 96.6 | 97.3 | 97.7 | 99 | 99 | 99.3 | 99.3 | 99.3 | 99.3 | 99.3 | 99.3 |
| | 8.39 | 3.02 | 2.68 | 1.34 | 1.34 | 1.01 | 1.01 | 0.34 | 0.34 | 0.34 | 0.34 | 0.34 | 0.34 | 0.34 | 0.34 |

VHH input library (43105 VHHs)

| | Frame4 | | | | | | | | | | | | |
|---|---|---|---|---|---|---|---|---|---|---|---|---|---|
| | 1 | 2 | 3 | 4 | 5 | 6 | 7 | 8 | 9 | 10 | 11 | 12 | 13 |
| P | 2.35 | 1.01 | 0 | 0 | 1.01 | 0 | 0 | 1.34 | 0 | 0 | 0 | 0 | 0 |
| A | 4.36 | 1.01 | 0.34 | 0 | 0 | 0 | 0.34 | 0 | 0 | 0 | 0 | 0 | 1.68 |
| G | 8.05 | 0.67 | 0 | 100 | 0 | 100 | 0 | 0 | 0 | 0 | 0 | 0 | 0 |
| M | 0.67 | 0 | 0 | 0 | 0 | 0 | 0 | 0 | 0 | 0 | 0 | 0 | 0 |
| I | 2.01 | 1.34 | 0 | 0 | 0 | 0 | 0 | 0 | 0 | 0 | 0.67 | 0 | 0 |
| L | 0.67 | 1.68 | 0 | 0 | 0.34 | 0 | 0 | 2.35 | 0 | 0 | 0 | 0 | 0.34 |
| V | 1.68 | 2.68 | 0 | 0 | 0 | 0 | 0 | 0 | 100 | 0 | 99.3 | 0.34 | 0 |
| F | 0.34 | 3.69 | 0 | 0 | 0 | 0 | 0 | 0 | 0 | 0 | 0 | 0 | 0 |
| W | 0.67 | 0.34 | 97 | 0 | 0 | 0 | 0 | 0 | 0 | 0 | 0 | 0 | 0 |
| C | 0 | 0 | 0 | 0 | 0 | 0 | 0 | 0 | 0 | 0 | 0 | 0 | 0 |
| S | 4.03 | 7.38 | 0.34 | 0 | 0 | 0 | 0 | 0 | 0 | 0 | 0 | 99 | 92.3 |
| T | 3.69 | 1.68 | 0 | 0 | 0 | 0 | 99 | 0.34 | 0 | 100 | 0 | 0 | 0 |
| N | 11.1 | 1.01 | 0 | 0 | 0 | 0 | 0 | 0 | 0 | 0 | 0 | 0 | 0 |
| Q | 0.34 | 0.67 | 0 | 0 | 90.3 | 0 | 0 | 94 | 0 | 0 | 0 | 0 | 0 |
| Y | 1.01 | 67.8 | 0.67 | 0 | 0 | 0 | 0 | 0 | 0 | 0 | 0 | 0 | 0 |
| H | 2.01 | 5.37 | 0 | 0 | 0.34 | 0 | 0 | 0 | 0 | 0 | 0 | 0 | 0.34 |
| R | 3.02 | 0.67 | 1.68 | 0 | 2.68 | 0 | 0 | 1.68 | 0 | 0 | 0 | 0 | 0 |
| K | 1.34 | 0.34 | 0 | 0 | 5.37 | 0 | 0 | 0.34 | 0 | 0 | 0 | 0 | 0.34 |
| D | 46 | 2.68 | 0 | 0 | 0 | 0 | 0 | 0 | 0 | 0 | 0 | 0 | 0 |
| E | 6.71 | 0 | 0 | 0 | 0 | 0 | 0 | 0 | 0 | 0 | 0 | 0 | 0 |
| | 0 | 0 | 0 | 0 | 0 | 0 | 0 | 0 | 0 | 0 | 0 | 0 | 5.03 |
| | 46 | 67.8 | 97 | 100 | 90.3 | 100 | 99 | 14 | 100 | 100 | 99.3 | 99 | 92.3 |

| | Frame1 | | | | | | | | | | | | |
|---|---|---|---|---|---|---|---|---|---|---|---|---|---|
| | 1 | 2 | 3 | 4 | 5 | 6 | 7 | 8 | 9 | 10 | 11 | 12 | 13 |
| P | 0 | 0 | 0 | 0 | 0 | 0 | 0 | 0 | 0 | 0 | 0 | 0 | 0 |
| A | 0 | 0 | 0 | 0 | 0 | 0 | 0 | 0 | 0 | 32 | 0 | 0 | 0 |
| G | 0 | 0 | 0 | 0 | 0 | 0 | 0 | 99 | 99 | 67 | 0 | 0 | 0 |
| M | 0 | 0 | 0 | 0 | 0 | 0 | 0 | 0 | 0 | 0 | 0 | 0 | 0 |
| I | 0 | 0 | 0 | 0 | 0 | 0 | 0 | 0 | 0 | 0 | 0 | 0 | 0 |
| L | 0 | 0 | 0 | 99 | 0 | 0 | 0 | 0 | 0 | 0 | 99 | 0 | 0 |
| V | 0 | 99 | 0 | 0 | 69 | 0 | 0 | 0 | 0 | 0 | 0 | 99 | 0 |
| F | 0 | 0 | 0 | 0 | 1 | 0 | 0 | 0 | 0 | 0 | 0 | 0 | 0 |
| W | 0 | 0 | 0 | 0 | 0 | 0 | 0 | 0 | 0 | 0 | 0 | 0 | 0 |
| C | 0 | 0 | 0 | 0 | 0 | 0 | 0 | 0 | 0 | 0 | 0 | 0 | 0 |
| S | 0 | 0 | 0 | 0 | 0 | 0 | 99 | 0 | 0 | 0 | 0 | 0 | 0 |
| T | 0 | 0 | 0 | 0 | 0 | 0 | 0 | 0 | 0 | 0 | 0 | 0 | 0 |
| N | 0 | 0 | 0 | 0 | 0 | 0 | 0 | 0 | 0 | 0 | 0 | 0 | 0 |
| Q | 63 | 0 | 99 | 0 | 30 | 0 | 0 | 0 | 0 | 0 | 0 | 0 | 98 |
| Y | 0 | 0 | 0 | 0 | 0 | 0 | 0 | 0 | 0 | 0 | 0 | 0 | 0 |
| H | 0 | 0 | 0 | 0 | 0 | 0 | 0 | 0 | 0 | 0 | 0 | 0 | 2 |
| R | 0 | 0 | 0 | 0 | 0 | 0 | 0 | 0 | 0 | 0 | 0 | 0 | 0 |
| K | 0 | 0 | 0 | 0 | 0 | 0 | 0 | 0 | 0 | 0 | 0 | 0 | 0 |
| D | 0 | 0 | 0 | 0 | 0 | 1 | 0 | 0 | 0 | 0 | 0 | 0 | 0 |
| E | 37 | 0 | 0 | 0 | 0 | 99 | 0 | 0 | 0 | 0 | 0 | 0 | 0 |
| MAX | 0 | 0 | 0 | 0 | 0 | 0 | 0 | 0 | 0 | 0 | 0 | 0 | 0 |
| | 63 | 99 | 99 | 99 | 69 | 99 | 99 | 99 | 99 | 67 | 99 | 99 | 98 |
| | 14 | 15 | 16 | 17 | 18 | 19 | 20 | 21 | 22 | 23 | 24 | 25 | 26 |
| | 32 | 0 | 0 | 0 | 0 | 0 | 0 | 0 | 0 | 0 | 0 | 0 | 0 |
| | 67 | 0 | 0 | 0 | 0 | 0 | 0 | 0 | 0 | 89 | 98 | 0 | 0 |
| | 0 | 99 | 63 | 0 | 0 | 0 | 0 | 0 | 0 | 0 | 0 | 0 | 97 |
| | 0 | 0 | 0 | 0 | 0 | 0 | 0 | 0 | 0 | 0 | 0 | 0 | 0 |
| | 0 | 0 | 0 | 0 | 0 | 0 | 0 | 0 | 0 | 0 | 0 | 0 | 0 |
| | 0 | 0 | 0 | 0 | 99 | 0 | 99 | 0 | 0 | 0 | 0 | 0 | 0 |
| | 0 | 0 | 0 | 0 | 0 | 0 | 0 | 0 | 0 | 0 | 0 | 0 | 0 |
| | 0 | 0 | 0 | 0 | 0 | 0 | 0 | 0 | 0 | 0 | 0 | 0 | 0 |
| | 0 | 0 | 0 | 0 | 0 | 0 | 0 | 0 | 0 | 0 | 0 | 0 | 0 |
| | 0 | 0 | 0 | 0 | 0 | 0 | 0 | 0 | 99 | 0 | 0 | 0 | 0 |
| | 0 | 0 | 0 | 98 | 0 | 0 | 0 | 99 | 0 | 0 | 0 | 98 | 0 |
| | 0 | 0 | 0 | 0 | 0 | 0 | 0 | 0 | 0 | 10 | 0 | 0 | 0 |
| | 0 | 0 | 0 | 0 | 0 | 0 | 0 | 0 | 0 | 0 | 0 | 0 | 0 |
| | 0 | 0 | 0 | 0 | 0 | 0 | 0 | 0 | 0 | 0 | 0 | 0 | 0 |
| | 0 | 0 | 0 | 0 | 0 | 0 | 0 | 0 | 0 | 0 | 0 | 0 | 0 |
| | 0 | 0 | 0 | 0 | 0 | 0 | 0 | 0 | 0 | 0 | 0 | 0 | 0 |
| | 0 | 0 | 0 | 2 | 0 | 99 | 0 | 0 | 0 | 0 | 0 | 0 | 0 |
| | 0 | 0 | 0 | 0 | 0 | 0 | 0 | 0 | 0 | 0 | 0 | 0 | 0 |
| | 0 | 0 | 37 | 0 | 0 | 0 | 0 | 0 | 0 | 0 | 0 | 0 | 0 |
| | 0 | 0 | 0 | 0 | 0 | 0 | 0 | 0 | 0 | 0 | 0 | 0 | 0 |
| | 0 | 0 | 0 | 0 | 0 | 0 | 0 | 0 | 0 | 0 | 0 | 0 | 0 |
| | 67 | 99 | 63 | 98 | 99 | 99 | 99 | 99 | 99 | 89 | 98 | 98 | 97 |

| | CDR1 | | | | | | | | | |
|---|---|---|---|---|---|---|---|---|---|---|
| | 1 | 2 | 3 | 4 | 5 | 6 | 7 | 8 | 9 | 10 |
| P | 3 | 3 | 3 | 3 | 2 | 2 | 2 | 0 | 0 | 0 |
| A | 5 | 5 | 5 | 5 | 5 | 5 | 6 | 0 | 0 | 0 |
| G | 9 | 7 | 8 | 8 | 8 | 8 | 8 | 0 | 0 | 0 |
| M | 3 | 3 | 2 | 2 | 3 | 2 | 2 | 0 | 0 | 0 |
| I | 4 | 5 | 4 | 4 | 4 | 4 | 4 | 0 | 0 | 0 |
| L | 8 | 8 | 8 | 8 | 8 | 7 | 7 | 0 | 0 | 0 |
| V | 9 | 8 | 10 | 9 | 9 | 9 | 9 | 0 | 0 | 0 |
| F | 4 | 6 | 7 | 5 | 5 | 4 | 4 | 0 | 0 | 0 |
| W | 2 | 3 | 3 | 3 | 3 | 3 | 2 | 0 | 0 | 0 |
| C | 6 | 6 | 6 | 5 | 5 | 5 | 5 | 0 | 0 | 0 |
| S | 9 | 9 | 8 | 10 | 10 | 8 | 8 | 0 | 0 | 0 |
| T | 4 | 6 | 4 | 4 | 4 | 4 | 4 | 0 | 0 | 0 |
| N | 4 | 3 | 3 | 3 | 2 | 2 | 2 | 0 | 0 | 0 |
| Q | 2 | 1 | 1 | 1 | 1 | 1 | 1 | 0 | 0 | 0 |
| Y | 5 | 5 | 4 | 4 | 4 | 5 | 4 | 0 | 0 | 0 |
| H | 4 | 3 | 3 | 3 | 2 | 2 | 2 | 0 | 0 | 0 |
| R | 8 | 7 | 7 | 7 | 7 | 7 | 7 | 0 | 0 | 0 |
| K | 2 | 2 | 2 | 2 | 2 | 2 | 1 | 0 | 0 | 0 |
| D | 3 | 3 | 3 | 3 | 3 | 3 | 3 | 0 | 0 | 0 |
| E | 2 | 2 | 2 | 2 | 2 | 2 | 2 | 0 | 0 | 0 |
| | 3 | 6 | 8 | 10 | 13 | 14 | 17 | 99 | 99 | 99 |
| | 9 | 9 | 10 | 10 | 10 | 9 | 9 | 0 | 0 | 0 |

| | Frame2 | | | | | | | | | |
|---|---|---|---|---|---|---|---|---|---|---|
| | 1 | 2 | 3 | 4 | 5 | 6 | 7 | 8 | 9 | 10 |
| P | 0 | 0 | 0 | 0 | 0 | 0 | 0 | 99 | 0 | 0 |
| A | 0 | 0 | 0 | 0 | 0 | 0 | 99 | 0 | 0 | 0 |
| G | 1 | 99 | 0 | 0 | 0 | 0 | 0 | 0 | 99 | 0 |
| M | 98 | 0 | 0 | 0 | 0 | 0 | 0 | 0 | 0 | 0 |
| I | 0 | 0 | 0 | 0 | 0 | 0 | 0 | 0 | 0 | 0 |
| L | 0 | 0 | 0 | 0 | 0 | 0 | 0 | 0 | 0 | 0 |
| V | 0 | 0 | 0 | 0 | 0 | 0 | 0 | 0 | 0 | 0 |
| F | 0 | 0 | 0 | 78 | 0 | 0 | 0 | 0 | 0 | 0 |
| W | 0 | 0 | 99 | 0 | 0 | 0 | 0 | 0 | 0 | 0 |
| C | 0 | 0 | 0 | 0 | 0 | 0 | 0 | 0 | 0 | 0 |
| S | 0 | 0 | 0 | 0 | 0 | 0 | 0 | 0 | 0 | 0 |
| T | 0 | 0 | 0 | 0 | 0 | 0 | 0 | 0 | 0 | 0 |
| N | 0 | 0 | 0 | 0 | 0 | 0 | 0 | 0 | 0 | 0 |
| Q | 0 | 0 | 0 | 0 | 0 | 99 | 0 | 0 | 0 | 0 |
| Y | 0 | 0 | 0 | 22 | 0 | 0 | 0 | 0 | 0 | 0 |
| H | 0 | 0 | 0 | 0 | 0 | 0 | 0 | 0 | 0 | 0 |
| R | 0 | 0 | 0 | 0 | 99 | 0 | 0 | 0 | 0 | 0 |
| K | 0 | 0 | 0 | 0 | 0 | 0 | 0 | 0 | 0 | 99 |
| D | 0 | 0 | 0 | 0 | 0 | 0 | 0 | 0 | 0 | 0 |
| E | 0 | 0 | 0 | 0 | 0 | 0 | 0 | 0 | 0 | 0 |
| | 0 | 0 | 0 | 0 | 0 | 0 | 0 | 0 | 0 | 0 |
| | 98 | 99 | 99 | 78 | 99 | 99 | 99 | 99 | 99 | 99 |

| 11 | 12 | 13 | 14 | 15 | 16 | 17 | 18 | 19 |
|---|---|---|---|---|---|---|---|---|
| 0 | 0 | 0 | 0 | 0 | 0 | 0 | 0 | 0 |
| 0 | 0 | 0 | 0 | 0 | 99 | 30 | 0 | 0 |
| 0 | 0 | 0 | 0 | 0 | 0 | 0 | 0 | 0 |
| 0 | 0 | 0 | 0 | 0 | 0 | 0 | 0 | 0 |
| 0 | 0 | 0 | 0 | 0 | 0 | 0 | 98 | 0 |
| 0 | 0 | 0 | 0 | 0 | 0 | 0 | 0 | 0 |
| 0 | 0 | 0 | 0 | 99 | 0 | 0 | 0 | 0 |
| 0 | 0 | 0 | 99 | 0 | 0 | 0 | 0 | 0 |
| 0 | 0 | 0 | 0 | 0 | 0 | 0 | 0 | 0 |
| 0 | 0 | 0 | 0 | 0 | 0 | 0 | 0 | 0 |
| 0 | 0 | 0 | 0 | 0 | 0 | 30 | 0 | 28 |
| 0 | 0 | 0 | 0 | 0 | 0 | 38 | 0 | 34 |
| 0 | 0 | 0 | 0 | 0 | 0 | 0 | 0 | 36 |
| 0 | 0 | 0 | 0 | 0 | 0 | 0 | 0 | 0 |
| 0 | 0 | 0 | 0 | 0 | 0 | 0 | 0 | 0 |
| 0 | 0 | 0 | 0 | 0 | 0 | 0 | 0 | 0 |
| 0 | 99 | 0 | 0 | 0 | 0 | 0 | 0 | 0 |
| 0 | 0 | 0 | 0 | 0 | 0 | 0 | 0 | 0 |
| 0 | 0 | 0 | 0 | 0 | 0 | 0 | 0 | 0 |
| 99 | 0 | 99 | 0 | 0 | 0 | 0 | 0 | 0 |
| 0 | 0 | 0 | 0 | 0 | 0 | 0 | 0 | 0 |
| 99 | 99 | 99 | 99 | 99 | 99 | 3 | 98 | 36 |

| | CDR2 | | | | | | | | | |
|---|---|---|---|---|---|---|---|---|---|---|
| | 1 | 2 | 3 | 4 | 5 | 6 | 7 | 8 | 9 | 10 |
| P | 4 | 4 | 4 | 4 | 3 | 0 | 0 | 0 | 0 | 0 |
| A | 4 | 6 | 6 | 6 | 6 | 0 | 0 | 0 | 0 | 0 |
| G | 7 | 7 | 8 | 9 | 9 | 0 | 0 | 0 | 0 | 0 |
| M | 3 | 2 | 2 | 2 | 2 | 0 | 0 | 0 | 0 | 0 |
| I | 5 | 4 | 4 | 3 | 4 | 0 | 0 | 0 | 0 | 0 |
| L | 10 | 9 | 8 | 9 | 8 | 0 | 0 | 0 | 0 | 0 |
| V | 8 | 9 | 8 | 8 | 9 | 0 | 0 | 0 | 0 | 0 |
| F | 7 | 5 | 5 | 5 | 5 | 0 | 0 | 0 | 0 | 0 |
| W | 3 | 3 | 3 | 3 | 3 | 0 | 0 | 0 | 0 | 0 |
| C | 6 | 6 | 6 | 6 | 6 | 0 | 0 | 0 | 0 | 0 |
| S | 10 | 10 | 10 | 9 | 9 | 0 | 0 | 0 | 0 | 0 |
| T | 5 | 5 | 5 | 4 | 4 | 0 | 0 | 0 | 0 | 0 |
| N | 3 | 3 | 3 | 3 | 3 | 0 | 0 | 0 | 0 | 0 |
| Q | 2 | 2 | 2 | 2 | 1 | 0 | 0 | 0 | 0 | 0 |
| Y | 4 | 5 | 4 | 4 | 4 | 0 | 0 | 0 | 0 | 0 |
| H | 4 | 3 | 3 | 3 | 3 | 0 | 0 | 0 | 0 | 0 |
| R | 8 | 8 | 8 | 8 | 8 | 0 | 0 | 0 | 0 | 0 |
| K | 1 | 1 | 1 | 1 | 1 | 0 | 0 | 0 | 0 | 0 |
| D | 3 | 3 | 4 | 3 | 4 | 0 | 0 | 0 | 0 | 0 |
| E | 1 | 2 | 2 | 2 | 2 | 0 | 0 | 0 | 0 | 0 |
| | 2 | 3 | 4 | 5 | 6 | 99 | 99 | 99 | 99 | 99 |
| | 10 | 10 | 10 | 9 | 9 | 0 | 0 | 0 | 0 | 0 |

| | Frame3 | | | | | | | | | | | | | |
|---|---|---|---|---|---|---|---|---|---|---|---|---|---|---|
| | 1 | 2 | 3 | 4 | 5 | 6 | 7 | 8 | 9 | 10 | 11 | 12 | 13 | 14 |
| P | 0 | 0 | 0 | 0 | 0 | 0 | 0 | 0 | 0 | 0 | 0 | 0 | 0 | 0 |
| A | 0 | 0 | 0 | 99 | 0 | 0 | 0 | 0 | 0 | 0 | 0 | 0 | 0 | 0 |
| G | 0 | 0 | 0 | 0 | 0 | 0 | 0 | 0 | 99 | 0 | 0 | 0 | 0 | 0 |
| M | 0 | 0 | 0 | 0 | 0 | 0 | 0 | 0 | 0 | 0 | 0 | 0 | 0 | 0 |
| I | 0 | 0 | | 0 | 0 | 0 | 0 | 0 | 0 | 0 | 0 | 0 | 99 | 0 |
| L | 0 | 0 | 0 | 0 | 0 | 0 | 0 | 0 | 0 | 0 | 0 | 0 | 0 | 0 |
| V | 0 | 0 | 0 | 0 | 0 | 0 | 99 | 0 | 0 | 0 | 0 | 0 | 0 | 0 |
| F | 0 | 0 | 0 | 0 | 0 | 0 | 0 | 0 | 0 | 0 | 99 | 0 | 0 | 0 |
| W | 0 | 0 | 0 | 0 | 0 | 0 | 0 | 0 | 0 | 0 | 0 | 0 | 0 | 0 |
| C | 0 | 0 | 0 | 0 | 0 | 0 | 0 | 0 | 0 | 0 | 0 | 0 | 0 | 0 |
| S | 0 | 0 | 0 | 0 | 0 | 99 | 0 | 0 | 0 | 0 | 0 | 34 | 0 | 99 |
| T | 99 | 0 | 0 | 0 | 0 | 0 | 0 | 0 | 0 | 0 | 0 | 66 | 0 | 0 |
| N | 0 | 25 | 0 | 0 | 0 | 0 | 0 | 0 | 0 | 0 | 0 | 0 | 0 | 0 |
| Q | 0 | 0 | 0 | 0 | 0 | 0 | 0 | 0 | 0 | 0 | 0 | 0 | 0 | 0 |
| Y | 0 | 36 | 99 | 0 | 0 | 0 | 0 | 0 | 0 | 0 | 0 | 0 | 0 | 0 |
| H | 0 | 0 | 0 | 0 | 0 | 0 | 0 | 0 | 0 | 0 | 0 | 0 | 0 | 0 |
| R | 0 | 0 | 0 | 0 | 0 | 0 | 0 | 34 | 0 | 99 | 0 | 0 | 0 | 0 |
| K | 0 | 0 | 0 | 0 | 0 | 0 | 0 | 66 | 0 | 0 | 0 | 0 | 0 | 0 |
| D | 0 | 39 | 0 | 0 | 100 | 0 | 0 | 0 | 0 | 0 | 0 | 0 | 0 | 0 |
| E | 0 | 0 | 0 | 0 | 0 | 0 | 0 | 0 | 0 | 0 | 0 | 0 | 0 | 0 |
| | 0 | 0 | 0 | 0 | 0 | 0 | 0 | 0 | 0 | 0 | 0 | 0 | 0 | 0 |
| | 99 | 39 | 99 | 99 | 100 | 99 | 99 | 66 | 99 | 99 | 99 | 66 | 99 | 99 |
| | 15 | 16 | 17 | 18 | 19 | 20 | 21 | 22 | 23 | 24 | 25 | 26 | 27 | 28 |
| | 0 | 0 | 0 | 0 | 0 | 0 | 0 | 0 | 0 | 0 | 0 | 0 | 0 | 0 |
| | 33 | 0 | 0 | 99 | 0 | 0 | 0 | 0 | 0 | 0 | 0 | 0 | 0 | 0 |
| | 0 | 0 | 0 | 0 | 0 | 0 | 0 | 0 | 0 | 0 | 0 | 0 | 0 | 0 |
| | 0 | 0 | 0 | 0 | 0 | 0 | 0 | 0 | 0 | 0 | 0 | 99 | 0 | 0 |
| | 0 | 0 | 0 | 0 | 0 | 0 | 0 | 0 | 0 | 0 | 0 | 0 | 0 | 0 |
| | 0 | 0 | 0 | 0 | 0 | 0 | 0 | 0 | 0 | 99 | 0 | 0 | 0 | 0 |
| | 0 | 0 | 0 | 0 | 0 | 0 | 0 | 99 | 0 | 0 | 0 | 0 | 0 | 0 |
| | 0 | 0 | 0 | 0 | 0 | 0 | 0 | 0 | 0 | 0 | 0 | 0 | 0 | 0 |
| | 0 | 0 | 0 | 0 | 0 | 0 | 0 | 0 | 0 | 0 | 0 | 0 | 0 | 0 |
| | 0 | 0 | 0 | 0 | 0 | 0 | 0 | 0 | 0 | 0 | 0 | 0 | 0 | 0 |
| | 0 | 0 | 34 | 0 | 0 | 0 | 0 | 0 | 0 | 0 | 0 | 0 | 0 | 99 |
| | 0 | 0 | 0 | 0 | 0 | 0 | 99 | 0 | 0 | 0 | 0 | 0 | 0 | 0 |
| | 0 | 0 | 27 | 0 | 0 | 99 | 0 | 0 | 0 | 0 | 0 | 0 | 99 | 0 |
| | 0 | 0 | 0 | 0 | 0 | 0 | 0 | 0 | 0 | 0 | 99 | 0 | 0 | 0 |
| | 0 | 0 | 0 | 0 | 0 | 0 | 0 | 0 | 99 | 0 | 0 | 0 | 0 | 0 |
| | 0 | 0 | 0 | 0 | 0 | 0 | 0 | 0 | 0 | 0 | 0 | 0 | 0 | 0 |
| | 66 | 0 | 0 | 0 | 40 | 0 | 0 | 0 | 0 | 0 | 0 | 0 | 0 | 0 |
| | 0 | 0 | 0 | 0 | 60 | 0 | 0 | 0 | 0 | 0 | 0 | 0 | 0 | 0 |
| | 0 | 99 | 39 | 0 | 0 | 0 | 0 | 0 | 0 | 0 | 0 | 0 | 0 | 0 |
| | 0 | 0 | 0 | 0 | 0 | 0 | 0 | 0 | 0 | 0 | 0 | 0 | 0 | 0 |
| | 0 | 0 | 0 | 0 | 0 | 0 | 0 | 0 | 0 | 0 | 0 | 0 | 0 | 0 |
| | 66 | 99 | 39 | 99 | 60 | 99 | 99 | 99 | 99 | 99 | 99 | 99 | 99 | 99 |

| 29 | 30 | 31 | 32 | 33 | 34 | 35 | 36 | 37 | 38 | 39 | 40 | 41 |
|---|---|---|---|---|---|---|---|---|---|---|---|---|
| 0 | 0 | 99 | 0 | 0 | 0 | 0 | 0 | 0 | 0 | 0 | 0 | 0 |
| 0 | 0 | 0 | 0 | 0 | 0 | 99 | 0 | 0 | 0 | 0 | 87 | 75 |
| 0 | 0 | 0 | 0 | 0 | 0 | 0 | 0 | 0 | 0 | 0 | 0 | 0 |
| 0 | 0 | 0 | 0 | 0 | 0 | 0 | 0 | 0 | 0 | 0 | 0 | 0 |
| 0 | 0 | 0 | 0 | 0 | 0 | 0 | 0 | 0 | 0 | 0 | 0 | 0 |
| 99 | 0 | 0 | 0 | 0 | 0 | 0 | 0 | 0 | 0 | 0 | 0 | 0 |
| 0 | 0 | 0 | 0 | 0 | 0 | 0 | 99 | 0 | 0 | 0 | 0 | 6 |
| 0 | 0 | 0 | 0 | 0 | 0 | 0 | 0 | 0 | 0 | 0 | 0 | 0 |
| 0 | 0 | 0 | 0 | 0 | 0 | 0 | 0 | 0 | 0 | 0 | 0 | 0 |
| 0 | 0 | 0 | 0 | 0 | 0 | 0 | 0 | 0 | 0 | 98 | 0 | 0 |
| 0 | 0 | 0 | 0 | 0 | 0 | 0 | 0 | 0 | 0 | 0 | 0 | 0 |
| 0 | 0 | 0 | 0 | 0 | 99 | 0 | 0 | 0 | 0 | 0 | 0 | 8 |
| 0 | 0 | 0 | 0 | 0 | 0 | 0 | 0 | 0 | 0 | 0 | 10 | 0 |
| 0 | 0 | 0 | 0 | 0 | 0 | 0 | 0 | 0 | 0 | 0 | 0 | 0 |
| 0 | 0 | 0 | 0 | 0 | 0 | 0 | 0 | 99 | 99 | 0 | 0 | 0 |
| 0 | 0 | 0 | 0 | 0 | 0 | 0 | 0 | 0 | 0 | 0 | 0 | 0 |
| 0 | 0 | 0 | 0 | 0 | 0 | 0 | 0 | 0 | 0 | 0 | 0 | 8 |
| 0 | 99 | 0 | 0 | 0 | 0 | 0 | 0 | 0 | 0 | 0 | 0 | 0 |
| 0 | 0 | 0 | 0 | 99 | 0 | 0 | 0 | 0 | 0 | 0 | 0 | 0 |
| 0 | 0 | 0 | 99 | 0 | 0 | 0 | 0 | 0 | 0 | 0 | 0 | 0 |
| 0 | 0 | 0 | 0 | 0 | 0 | 0 | 0 | 0 | 0 | 0 | 0 | 0 |
| 99 | 99 | 99 | 99 | 99 | 99 | 99 | 99 | 99 | 99 | 98 | 87 | 75 |

| | CDR3 | | | | | | | | | | | | | | |
|---|---|---|---|---|---|---|---|---|---|---|---|---|---|---|---|
| | 1 | 2 | 3 | 4 | 5 | 6 | 7 | 8 | 9 | 10 | 11 | 12 | 13 | 14 | 15 |
| P | 11 | 10 | 8 | 7 | 7 | 7 | 3 | 3 | 3 | 2 | 1 | 1 | 1 | 0 | 0 |
| A | 6 | 6 | 6 | 6 | 6 | 5 | 4 | 4 | 4 | 4 | 1 | 1 | 1 | 0 | 0 |
| G | 4 | 4 | 6 | 6 | 6 | 6 | 7 | 6 | 7 | 5 | 2 | 2 | 2 | 0 | 0 |
| M | 2 | 2 | 2 | 2 | 2 | 2 | 2 | 2 | 2 | 1 | 0 | 0 | 0 | 0 | 0 |
| I | 4 | 4 | 4 | 4 | 4 | 4 | 3 | 3 | 3 | 2 | 1 | 1 | 1 | 0 | 0 |
| L | 8 | 7 | 8 | 7 | 7 | 7 | 6 | 6 | 6 | 5 | 1 | 1 | 1 | 0 | 0 |
| V | 4 | 4 | 6 | 6 | 6 | 6 | 7 | 6 | 7 | 5 | 2 | 2 | 2 | 0 | 0 |
| F | 3 | 3 | 4 | 4 | 3 | 3 | 4 | 4 | 3 | 3 | 1 | 1 | 1 | 0 | 0 |
| W | 1 | 1 | 2 | 2 | 2 | 2 | 2 | 2 | 2 | 2 | 1 | 1 | 1 | 0 | 0 |
| C | 3 | 3 | 4 | 4 | 4 | 4 | 4 | 4 | 4 | 3 | 1 | 1 | 1 | 0 | 0 |
| S | 9 | 10 | 10 | 10 | 9 | 9 | 7 | 7 | 7 | 5 | 2 | 2 | 2 | 0 | 0 |
| T | 9 | 9 | 7 | 7 | 7 | 7 | 3 | 3 | 3 | 2 | 1 | 1 | 1 | 0 | 0 |
| N | 5 | 6 | 4 | 5 | 4 | 4 | 2 | 2 | 2 | 2 | 0 | 0 | 0 | 0 | 0 |
| Q | 2 | 2 | 2 | 2 | 2 | 2 | 1 | 1 | 1 | 1 | 0 | 0 | 0 | 0 | 0 |
| Y | 4 | 4 | 4 | 4 | 4 | 4 | 3 | 3 | 3 | 2 | 1 | 1 | 1 | 0 | 0 |
| H | 7 | 7 | 5 | 5 | 5 | 5 | 2 | 2 | 2 | 2 | 0 | 1 | 0 | 0 | 0 |
| R | 8 | 8 | 8 | 7 | 8 | 7 | 6 | 6 | 6 | 4 | 2 | 2 | 2 | 0 | 0 |
| K | 2 | 2 | 2 | 2 | 2 | 2 | 1 | 1 | 1 | 1 | 0 | 0 | 0 | 0 | 0 |
| D | 4 | 4 | 4 | 4 | 4 | 4 | 2 | 2 | 2 | 2 | 1 | 1 | 1 | 0 | 0 |
| E | 1 | 1 | 2 | 2 | 2 | 2 | 1 | 2 | 2 | 1 | 0 | 0 | 0 | 0 | 0 |
| | 1 | 2 | 3 | 5 | 7 | 9 | 30 | 31 | 32 | 45 | 82 | 82 | 83 | 100 | 100 |
| | 11 | 10 | 10 | 10 | 9 | 9 | 7 | 7 | 7 | 5 | 2 | 2 | 2 | 0 | 0 |
| | 16 | 17 | 18 | 19 | 20 | 21 | 22 | 23 | 24 | 25 | 26 | 27 | 28 | 29 | 30 |
| | 0 | 0 | 0 | 0 | 0 | 0 | 0 | 0 | 0 | 0 | 0 | 0 | 0 | 0 | 0 |
| | 0 | 0 | 0 | 0 | 0 | 0 | 0 | 0 | 0 | 0 | 0 | 0 | 0 | 0 | 0 |
| | 0 | 0 | 0 | 0 | 0 | 0 | 0 | 0 | 0 | 0 | 0 | 0 | 0 | 0 | 0 |
| | 0 | 0 | 0 | 0 | 0 | 0 | 0 | 0 | 0 | 0 | 0 | 0 | 0 | 0 | 0 |
| | 0 | 0 | 0 | 0 | 0 | 0 | 0 | 0 | 0 | 0 | 0 | 0 | 0 | 0 | 0 |
| | 0 | 0 | 0 | 0 | 0 | 0 | 0 | 0 | 0 | 0 | 0 | 0 | 0 | 0 | 0 |
| | 0 | 0 | 0 | 0 | 0 | 0 | 0 | 0 | 0 | 0 | 0 | 0 | 0 | 0 | 0 |
| | 0 | 0 | 0 | 0 | 0 | 0 | 0 | 0 | 0 | 0 | 0 | 0 | 0 | 0 | 0 |
| | 0 | 0 | 0 | 0 | 0 | 0 | 0 | 0 | 0 | 0 | 0 | 0 | 0 | 0 | 0 |
| | 0 | 0 | 0 | 0 | 0 | 0 | 0 | 0 | 0 | 0 | 0 | 0 | 0 | 0 | 0 |
| | 0 | 0 | 0 | 0 | 0 | 0 | 0 | 0 | 0 | 0 | 0 | 0 | 0 | 0 | 0 |
| | 0 | 0 | 0 | 0 | 0 | 0 | 0 | 0 | 0 | 0 | 0 | 0 | 0 | 0 | 0 |
| | 0 | 0 | 0 | 0 | 0 | 0 | 0 | 0 | 0 | 0 | 0 | 0 | 0 | 0 | 0 |
| | 0 | 0 | 0 | 0 | 0 | 0 | 0 | 0 | 0 | 0 | 0 | 0 | 0 | 0 | 0 |
| | 0 | 0 | 0 | 0 | 0 | 0 | 0 | 0 | 0 | 0 | 0 | 0 | 0 | 0 | 0 |
| | 0 | 0 | 0 | 0 | 0 | 0 | 0 | 0 | 0 | 0 | 0 | 0 | 0 | 0 | 0 |
| | 0 | 0 | 0 | 0 | 0 | 0 | 0 | 0 | 0 | 0 | 0 | 0 | 0 | 0 | 0 |
| | 0 | 0 | 0 | 0 | 0 | 0 | 0 | 0 | 0 | 0 | 0 | 0 | 0 | 0 | 0 |
| | 0 | 0 | 0 | 0 | 0 | 0 | 0 | 0 | 0 | 0 | 0 | 0 | 0 | 0 | 0 |
| | 0 | 0 | | 0 | 0 | 0 | 0 | 0 | 0 | 0 | 0 | 0 | 0 | 0 | 0 |
| | 100 | 100 | 100 | 100 | 100 | 100 | 100 | 100 | 100 | 100 | 100 | 100 | 100 | 100 | 100 |
| | 0 | 0 | 0 | 0 | 0 | 0 | 0 | 0 | 0 | 0 | 0 | 0 | 0 | 0 | 0 |

| | Frame4 | | | | | | | | | | | | |
|---|---|---|---|---|---|---|---|---|---|---|---|---|---|
| | 1 | 2 | 3 | 4 | 5 | 6 | 7 | 8 | 9 | 10 | 11 | 12 | 13 |
| P | 0 | 0 | 0 | 0 | 0 | 0 | 0 | 0 | 0 | 0 | 0 | 0 | 0 |
| A | 0 | 0 | 0 | 0 | 0 | 0 | 0 | 0 | 0 | 0 | 0 | 0 | 0 |
| G | 13 | 0 | 0 | 99 | 0 | 99 | 0 | 0 | 0 | 0 | 0 | 0 | 0 |
| M | 0 | 0 | 0 | 0 | 0 | 0 | 0 | 0 | 0 | 0 | 0 | 0 | 0 |
| I | 0 | 0 | 0 | 0 | 0 | 0 | 0 | 0 | 0 | 0 | 0 | 0 | 0 |
| L | 0 | 0 | 0 | 0 | 0 | 0 | 0 | 0 | 0 | 0 | 0 | 0 | 0 |
| V | 0 | 0 | 0 | 0 | 0 | 0 | 0 | 0 | 99 | 0 | 99 | 0 | 0 |
| F | 0 | 0 | 0 | 0 | 0 | 0 | 0 | 0 | 0 | 0 | 0 | 0 | 0 |
| W | 0 | 0 | 99 | 0 | 0 | 0 | 0 | 0 | 0 | 0 | 0 | 0 | 0 |
| C | 0 | 0 | 0 | 0 | 0 | 0 | 0 | 0 | 0 | 0 | 0 | 0 | 0 |
| S | 0 | 7 | 0 | 0 | 0 | 0 | 0 | 0 | 0 | 0 | 0 | 99 | 99 |
| T | 0 | 0 | 0 | 0 | 0 | 0 | 100 | 0 | 0 | 99 | 0 | 0 | 0 |
| N | 13 | 0 | 0 | 0 | 0 | 0 | 0 | 0 | 0 | 0 | 0 | 0 | 0 |
| Q | 0 | 0 | 0 | 0 | 99 | 0 | 0 | 99 | 0 | 0 | 0 | 0 | 0 |
| Y | 0 | 91 | 0 | 0 | 0 | 0 | 0 | 0 | 0 | 0 | 0 | 0 | 0 |
| H | 0 | 0 | 0 | 0 | 0 | 0 | 0 | 0 | 0 | 0 | 0 | 0 | 0 |
| R | 0 | 0 | 0 | 0 | 0 | 0 | 0 | 0 | 0 | 0 | 0 | 0 | 0 |
| K | 0 | 0 | 0 | 0 | 0 | 0 | 0 | 0 | 0 | 0 | 0 | 0 | 0 |
| D | 64 | 0 | 0 | 0 | 0 | 0 | 0 | 0 | 0 | 0 | 0 | 0 | 0 |
| E | 7 | 0 | 0 | 0 | 0 | 0 | 0 | 0 | 0 | 0 | 0 | 0 | 0 |
| | 0 | 0 | 0 | 0 | 0 | 0 | 0 | 0 | 0 | 0 | 0 | 0 | 0 |
| | 64 | 9 | 99 | 99 | 99 | 99 | 100 | 99 | 99 | 99 | 99 | 99 | 99 |

TABLE 12
Primers and templates used for generation, selection and sequencing of VHH library.
Primer sequences used in this study and VHH frame template sequences. PCR cycling
conditions were also shown. (SEQ ID NOS: 15102-15157)
Primers and Templates for VHH library generation templates

| | |
|---|---|
| frames_v1 | GTAACCCACTCGTGCACCCAACTGATCTTCAGCATCTTTTACTTTCACCAGCGTTTCTGGGTGAGCAAAAACAGGAAGGCA |
| | AAATGCCGCAAAAAAGGGAATAAGGGCGACACGGAAATGTTGAATACTCATACTCTTCCTTTTTCAATATTATTGAAGCAT |
| | TTATCAGGGTTATTGTCTCATGAGCGGATACATATTTGAATGTATTTAGAAAAATAAACAAATAGGGGTTCCGCGCACATT |
| | TCCCCGAAAAGTGCCACCTGACGTCGACGGATCGGGAGTTTAAACTAATACGACTCACTATAGGGTCTAGAAATAATTTTG |
| | TTTAACTTTAAGAAGGAGATATACCATGCAGGTTCAACTGGTTGAATCTGGTGGCGCATTAGTTCAACCGGGTGGTAGCCT |
| | TCGTCTGAGCTGCGCCGCAAGCGGACGTACATTCAGCAGCTATGCAATGGGTTGGTTTCGCCAGGCACCTGGTAAAGAAC |
| | GTGAATTTGTGGCAGCCATTTCAAGCAGTGGTGGCACCTACTATGCCGATTCTGTTAAAGGTCGCTTCACTATTTCACGCG |
| | ATGATGCGCGTAATACCGTGTACTTACAGATGAACTCACTGAAACCTGAGGATACCGCCGTTTATTATTGTGCGGCAGGCC |
| | GTGGAGGCGGTAGCGACTATTGGGGTCAGGGCACACAAGTCACGGTCTCAAGCGGCGGaagctctGGtGAACAGAAACTG |
| | ATTTCAGAAGAGGATCTGGCAGAACAGAAATTAATCTCAGAGGAAGACCTGGGTTCTGGTGAGCAAAAGTTAATTTCTGA |
| | AGAAGACCTGGCAGGTGGCTCTGGTGATGGAGGTAGCTCTGGCGATGGTGCGGATGGCAGCGGTGGTGCATCTGGTTCA |
| | AGCGCTTACAGCGATGATGTTAGTGCAAGCGGTCGTACCTACCGCATCTTCTCATATAACTACGCCAGCTATAGCGACTGG |
| | GTTTAAACCGGCTGCTAACAAAGCCCGAAAGGAAGCTGAGTTGGCTGCTGCCACCGCTGAGCAATAACTAGCATAACCCC |
| | TTGGGGCCTCTAAACGGGTCTTGAGGGGTTTTTTGCTGAAAGGAGGAACTATATCCGGTGAAAGGTTGGGCTTCGGAATC |
| | GTTTTCCGGGACGCCGGCTGGATGATCCTCCAGCGCGGGGATCTCATGCTGGAGTTCTTCGCCCACCCCAACTTGTTTATT |
| | GCAGCTTATAATGGTTACAAATAAAGCAATAGCATCACAAATTTCACAAATAAAGCATTTTTTTCACTGCATTCTAGTTGTG |
| | GTTTGTCCAAACTCATCAATGTATCTTATCATGTCTGTATACCGTCGACCTCTAGCTAGAGCTTGGC |
| frames_v2 | GTAACCCACTCGTGCACCCAACTGATCTTCAGCATCTTTTACTTTCACCAGCGTTTCTGGGTGAGCAAAAACAGGAAGGCA |
| | AAATGCCGCAAAAAAGGGAATAAGGGCGACACGGAAATGTTGAATACTCATACTCTTCCTTTTTCAATATTATTGAAGCAT |
| | TTATCAGGGTTATTGTCTCATGAGCGGATACATATTTGAATGTATTTAGAAAAATAAACAAATAGGGGTTCCGCGCACATT |
| | TCCCCGAAAAGTGCCACCTGACGTCGACGGATCGGGAGTTTAAACTAATACGACTCACTATAGGGTCTAGAAATAATTTTG |
| | TTTAACTTTAAGAAGGAGATATACCATGGAAGTTCAACTGGTTGAATCTGGTGGCGGTTTAGTTCAAGCCGGTGATAGCCT |
| | TCGTCTGAGCTGCGCCGCAAGCGGACGTACATTCAGCAGCTATGCAATGGGTTGGTTTCGCCAGGCACCTGGTAAAGAAC |
| | GTGAATTTGTGGCAGCCATTTCAAGCAGTGGTGGCACCTACTATGCCGATTCTGTTCGTGGTCGCTTCAGCATTTCAGCAG |
| | ATTCTGCGAAGAATACCGTGTACTTACAGATGAACTCACTGAAACCTGAGGATACCGCCGTTTATTATTGTGCGGCAGGCC |
| | GTGGAGGCGGTAGCGACTATTGGGGTCAGGGCACACAAGTCACGGTCTCAAGCGGCGGaagctctGGtGAACAGAAACTG |
| | ATTTCAGAAGAGGATCTGGCAGAACAGAAATTAATCTCAGAGGAAGACCTGGGTTCTGGTGAGCAAAAGTTAATTTCTGA |
| | AGAAGACCTGGCAGGTGGCTCTGGTGATGGAGGTAGCTCTGGCGATGGTGCGGATGGCAGCGGTGGTGCATCTGGTTCA |
| | AGCGCTTACAGCGATGATGTTAGTGCAAGCGGTCGTACCTACCGCATCTTCTCATATAACTACGCCAGCTATAGCGACTGG |
| | GTTTAAACCGGCTGCTAACAAAGCCCGAAAGGAAGCTGAGTTGGCTGCTGCCACCGCTGAGCAATAACTAGCATAACCCC |
| | TTGGGGCCTCTAAACGGGTCTTGAGGGGTTTTTTGCTGAAAGGAGGAACTATATCCGGTGAAAGGTTGGGCTTCGGAATC |
| | GTTTTCCGGGACGCCGGCTGGATGATCCTCCAGCGCGGGGATCTCATGCTGGAGTTCTTCGCCCACCCCAACTTGTTTATT |
| | GCAGCTTATAATGGTTACAAATAAAGCAATAGCATCACAAATTTCACAAATAAAGCATTTTTTTCACTGCATTCTAGTTGTG |
| | GTTTGTCCAAACTCATCAATGTATCTTATCATGTCTGTATACCGTCGACCTCTAGCTAGAGCTTGGC |
| frames_v3 | GTAACCCACTCGTGCACCCAACTGATCTTCAGCATCTTTTACTTTCACCAGCGTTTCTGGGTGAGCAAAAACAGGAAGGCA |
| | AAATGCCGCAAAAAAGGGAATAAGGGCGACACGGAAATGTTGAATACTCATACTCTTCCTTTTTCAATATTATTGAAGCAT |
| | TTATCAGGGTTATTGTCTCATGAGCGGATACATATTTGAATGTATTTAGAAAAATAAACAAATAGGGGTTCCGCGCACATT |
| | TCCCCGAAAAGTGCCACCTGACGTCGACGGATCGGGAGTTTAAACTAATACGACTCACTATAGGGTCTAGAAATAATTTTG |
| | TTTAACTTTAAGAAGGAGATATACCATGCAGGTTCAACTGCAAGAATCTGGTGGCGGTTTAGTTCAAGCCGGTGGTAGCCT |
| | TCGTCTGAGCTGCGCCGCAAGCGGACGTACATTCAGCAGCTATGCAATGGGTTGGTTTCGCCAGGCACCTGGTAAAGAAC |
| | GTGAATTTGTGGCAGCCATTTCAAGCAGTGGTGGCACCTACTATGCCGATTCTGTTAAAGGTCGCTTCACTATTTCACGCG |
| | ATAATGCGAAGAATACCGTGTACTTACAGATGAACTCACTGAAACCTGAGGATACCGCCGTTTATTATTGTGCGGCAGGCC |
| | GTGGAGGCGGTAGCGACTATTGGGGTCAGGGCACACAAGTCACGGTCTCAAGCGGCGGaagctctGGtGAACAGAAACTG |
| | ATTTCAGAAGAGGATCTGGCAGAACAGAAATTAATCTCAGAGGAAGACCTGGGTTCTGGTGAGCAAAAGTTAATTTCTGA |
| | AGAAGACCTGGCAGGTGGCTCTGGTGATGGAGGTAGCTCTGGCGATGGTGCGGATGGCAGCGGTGGTGCATCTGGTTCA |
| | AGCGCTTACAGCGATGATGTTAGTGCAAGCGGTCGTACCTACCGCATCTTCTCATATAACTACGCCAGCTATAGCGACTGG |
| | GTTTAAACCGGCTGCTAACAAAGCCCGAAAGGAAGCTGAGTTGGCTGCTGCCACCGCTGAGCAATAACTAGCATAACCCC |
| | TTGGGGCCTCTAAACGGGTCTTGAGGGGTTTTTTGCTGAAAGGAGGAACTATATCCGGTGAAAGGTTGGGCTTCGGAATC |
| | GTTTTCCGGGACGCCGGCTGGATGATCCTCCAGCGCGGGGATCTCATGCTGGAGTTCTTCGCCCACCCCAACTTGTTTATT |
| | GCAGCTTATAATGGTTACAAATAAAGCAATAGCATCACAAATTTCACAAATAAAGCATTTTTTTCACTGCATTCTAGTTGTG |
| | GTTTGTCCAAACTCATCAATGTATCTTATCATGTCTGTATACCGTCGACCTCTAGCTAGAGCTTGGC |

| stage 1 PCR1 primers | | |
|---|---|---|
| (CDR2 randomization) | cycling condition | |
| sense | GCGGCCGCTGGGCACCTTTTGGTGCCCAGCGGCCGCCACCTGACGT | 95° C. 1 mins, (95° C. 15s, 55° |
| | CCGAGGATCGGGAG | C. 20s) 65° C. 40s) X30, 65° C. |
| antisense | GBTAATGGHTGCCACAAATTCACGTTC | 2 mins |
| stage 1 PCR2 primers | | |
| (CDR2 randomization) | | |
| sense | NNBNNBNNBNNBNNBACCDACTATGCCGATTCTGTT | 95° C. 1 mins, (95° C. 15s, 55° |
| antisense | GCGGCCGCTCCGCAGCTTTTGCTGCGGAGCGGCCGCGCCAAGCTCT | C. 20s) 65° C. 40s) X30, 65° C. |
| | AGCTAGAGGTCGAC | 2 mins |
| stage 2 PCR1 primers | | |
| (CDR1 randomization) | cycling condition | |
| sense | GCGGCCGCTGGGCACCTTTTGGTGCCCAGCGGCCGCGTAACCCACT | 95° C. 1 mins, (95° C. 15s, 55° |
| | CGTGCACCCAACTG | C. 20s) 65° C. 40s) X30, 65° C. |
| antisense | mixture of the following 2 primers at 1:1 ratio | 2 mins |
| | TCCGCTTGCGGCGCAGCTCAGACGAAGG | |
| | TCCGCTTGCGGTGCAGCTCAGACGAAGG | |
| stage 2 PCR2 primers | | |
| (CDR1 randomization) | cycling condition | |
| sense | mixture of the following 2 primers at 1:1 ratio | 95° C. 1 mins, (95° C. 15s, 55° |
| | NNBNNBNNBNNBNNBNNBNNBATGGGTTGGTTTCGCCAGGCACCTG | C. 20s) 65° C. 40s) X30, 65° C. |
| | GT | 2 mins |
| | NNBNNBNNBNNBNNBNNBNNBATGGGTTGGTATCGCCAGGCACCTG | |
| | GT | |
| antisense | GCGGCCGCTCCGCAGCTTTTGCTGCGGAGCGGCCGCGCCAAGCTCT | |
| | AGCTAGAGGTCGAC | |
| stage 3 PCR1 primers | | |
| (CDR3 randomization) | cycling condition | |
| sense | GCGGCCGCTGGGCACCTTTTGGTGCCCAGCGGCCGCCACCTGACGT | 95° C. 1 mins, (95° C. 15s, 55° |
| | CGACGGATCGGGAG | C. 20s) 65° C. 40s) X30, 65° C. |
| antisense | mixture of the following 10 primers at | 2 mins |
| | 66:8:7:6:13:66:8:7:6:13 ratio | |
| | VNNVNNTGCCGCACAATAATAAACGGCGGTATCCTCAGGTTTCAG | |
| | VNNVNNACGCGCACAATAATAAACGGCGGTATCCTCAGGTTTCAG | |
| | VNNVNNTGTCGCACAATAATAAACGGCGGTATCCTCAGGTTTCAG | |
| | VNNVNNAACCGCACAATAATAAACGGCGGTATCCTCAGGTTTCAG | |
| | VNNVNNTGCATTACAATAATAAACGGCGGTATCCTCAGGTTTCAG | |
| | VNNVNNVNNVNNVNNVNNTGCCGCACAATAATAAACGGCGGTATC | |
| | VNNVNNVNNVNNVNNVNNACGCGCACAATAATAAACGGCGGTATC | |
| | VNNVNNVNNVNNVNNVNNTGTCGCACAATAATAAACGGCGGTATC | |
| | VNNVNNVNNVNNVNNVNNAACCGCACAATAATAAACGGCGGTATC | |
| | VNNVNNVNNVNNVNNVNNTGCATTACAATAATAAACGGCGGTATC | |
| stage 3 PCR2 primers | | |
| (CDR3 randomization) | cycling condition | |
| sense | mixture of the following 10 primers at | 95° C. 1 mins, (95° C. 15s, 55° |
| | 57:14:13:8:8:57:14:13:8:8 ratio | C. 20s) 65° C. 40s) X30, 65° C. |
| | NNBNNBNNBNNBGACTATTGGGGTCAGGGCACACAAGTCACGGTC | 2 mins |
| | NNBNNBNNBNNBAACTATTGGGGTCAGGGCACACAAGTCACGGTC | |
| | NNBNNBNNBNNBGGCTATTGGGGTCAGGGCACACAAGTCACGGTC | |
| | NNBNNBNNBNNBGAGTATTGGGGTCAGGGCACACAAGTCACGGTC | |
| | NNBNNBNNBNNBGACTCTTGGGGTCAGGGCACACAAGTCACGGTC | |
| | NNBNNBNNBNNBNNBNNBNNBGACTATTGGGGTCAGGGCACACAA | |
| | NNBNNBNNBNNBNNBNNBNNBAACTATTGGGGTCAGGGCACACAA | |
| | NNBNNBNNBNNBNNBNNBNNBGGCTATTGGGGTCAGGGCACACAA | |
| | NNBNNBNNBNNBNNBNNBNNBGAGTATTGGGGTCAGGGCACACAA | |
| | NNBNNBNNBNNBNNBNNBNNBGACTCTTGGGGTCAGGGCACACAA | |
| antisense | GCGGCCGCTCCGCAGCTTTTGCTGCGGAGCGGCCGCGCCAAGCTCT | |
| | AGCTAGAGGTCGAC | |

Primers for ribosome display and in vitro selection

| DNA | | |
|---|---|---|
| recovery primer pair | cycling condition | |
| sense | AAACTAATACGACTCACTATAGGGTCTAGAAATAATTTTGTTTAAC | 95° C. 1 mins, (95° C. 15s, 65° |
| | TTTAAGAAGGAG | C.1 5s, 72° C. 20s) XN, 72° C. |
| antisense | ATAGCTGGCGTAGTTATATGAGAAGATG | 10s |

reverse transcription primer
CCAGTCGCTATAGCTGGCGTAGTTA
TATGAG

Primers for sequencing library generation

| Primers for first PCR | cycling condition | |
|---|---|---|
| sense | mixture of the following 8 primers at equal | 95° C. 1 mins, (95° C. 15s, 60° |
| | molar ratio | C. 15s, 72° C. 20s) X4, 72° C. |
| | ACACGACGCTCTTCCGATCTNNCTTTAAGAAGGAGATATACCATG | 1 mins |
| | ACACGACGCTCTTCCGATCTNNNNCTTTAAGAAGGAGATATACCATG | |
| | ACACGACGCTCTTCCGATCTNNNNNNCTTTAAGAAGGAGATATACC | |
| | ATG | |
| | ACACGACGCTCTTCCGATCTNNNNNNNNCTTTAAGAAGGAGATATA | |
| | CCATG | |
| | ACACGACGCTCTTCCGATCTNNNNNNNNNNCTTTAAGAAGGAGATA | |
| | TACCATG | |
| | ACACGACGCTCTTCCGATCTNNNNNNNNNNNCTTTAAGAAGGAGA | |
| | TATACCATG | |
| | ACACGACGCTCTTCCGATCTNNNNNNNNNNNNCTTTAAGAAGGAG | |
| | ATATACCATG | |
| | ACACGACGCTCTTCCGATCTNNNNNNNNNNNNNCTTTAAGAAGGA | |
| | GATATACCATG | |
| antisense | mixture of the following 8 primers at equal | |
| | molar ratio, or use subsets for multiplexing | |
| | samples, underlined sequences are indexes | |
| | CAGACGTGTGCTCTTCCGATCTGCTTCTGAAATCAGTTTCTGTTC | |
| | CAGACGTGTGCTCTTCCGATCTAACTTCTGAAATCAGTTTCTGTTC | |
| | CAGACGTGTGCTCTTCCGATCTTCGCTTCTGAAATCAGTTTCTGTTC | |
| | CAGACGTGTGCTCTTCCGATCTCGTACTTCTGAAATCAGTTTCTGTT | |
| | C | |
| | CAGACGTGTGCTCTTCCGATCTCTTGGCTTCTGAAATCAGTTTCTGT | |
| | TC | |
| | CAGACGTGTGCTCTTCCGATCTACCAACGCTTCTGAAATCAGTTTCT | |
| | GTTC | |
| | CAGACGTGTGCTCTTCCGATCTGGATCTAGCTTCTGAAATCAGTTTC | |
| | TGTTC | |
| | CAGACGTGTGCTCTTCCGATCTTAGCTGCTCCTTCTGAAATCAGTTT | |
| | CTGTTC | |
| Primers | | |
| for second PCR | condition cycling | |
| sense | AATGATACGGCGACCACCGAGATCTACACTCTTTCCCTACACGACGC | 95° C. 1 mins, (95° C. 15s, 65° |
| | TCTTCCGATCT | C. 15s, 72° C. 20s) XN, 72° C. |
| antisense | CAAGCAGAAGACGGCATACGAGATGTGACTGGAGTTCAGACGTGTG | 20s |
| | CTCTTCCGATCT | |

TABLE 13
Affinity maturation subtracted amino acid profile for SR4 and SR6. Position-wise post- minus pre- affinity maturation
amino acid profile for SR4 and SR6. Numbers are percent point change of each amino acid after affinity maturation.
SR4 post- minus pre- affinity maturation a.a. profile
Frame1

| | 1 | 2 | 3 | 4 | 5 | 6 | 7 | 8 | 9 | 10 | 11 | 12 | 13 | 14 |
|---|---|---|---|---|---|---|---|---|---|---|---|---|---|---|
| P | −0.01 | 0.00 | −1.78 | −0.94 | −0.05 | 0.00 | −0.70 | 0.00 | 0.00 | 0.00 | −0.59 | 0.00 | −0.12 | −0.02 |
| A | −0.01 | −0.05 | 0.00 | 0.00 | −0.86 | 1.35 | −0.01 | −0.05 | 0.10 | 0.15 | 0.00 | −0.92 | 0.00 | 0.45 |
| G | −1.76 | −0.06 | 0.00 | 0.00 | −1.83 | 1.73 | 0.00 | 0.83 | −4.74 | −2.74 | 0.00 | −0.72 | −0.01 | −0.40 |
| M | 0.01 | 0.00 | 0.00 | −0.11 | 0.00 | 0.00 | −0.01 | −0.01 | 0.00 | 0.00 | 0.10 | 0.00 | 0.00 | 0.00 |
| I | 0.00 | 0.00 | 0.00 | −0.05 | 0.33 | 0.04 | −1.18 | −0.01 | 0.01 | 0.01 | 0.00 | 0.00 | 0.00 | −0.01 |
| L | 0.00 | 0.00 | 0.02 | 4.17 | −0.02 | 0.05 | 0.69 | 0.00 | 0.01 | 0.01 | 2.59 | 0.04 | 0.64 | 0.00 |
| V | 0.02 | 1.96 | 0.01 | −0.05 | 3.27 | 12.60 | −0.03 | 0.10 | 1.83 | 1.59 | −0.01 | 2.02 | 0.00 | 0.15 |
| F | 0.00 | 0.00 | 0.00 | 0.00 | 0.46 | 0.00 | 0.04 | 0.00 | 0.00 | 0.00 | 0.00 | 0.13 | 0.00 | 0.00 |
| W | −0.03 | −0.01 | 0.00 | 0.00 | −0.02 | −0.06 | 0.00 | −0.01 | 0.01 | −0.05 | 0.00 | 0.00 | 0.00 | 0.00 |
| C | 0.00 | −0.01 | 0.00 | 0.00 | −0.01 | 0.00 | 0.00 | 0.19 | 0.01 | 0.02 | 0.00 | 0.00 | 0.00 | 0.00 |
| S | 0.00 | −1.77 | −0.06 | −0.03 | −0.01 | −0.02 | 0.34 | −0.05 | 0.01 | 0.01 | −0.04 | 0.00 | −0.57 | −0.07 |
| T | 0.00 | 0.00 | 0.00 | −1.79 | −0.02 | 0.03 | 0.89 | 0.00 | 0.00 | 0.00 | −0.80 | −0.02 | −0.01 | 0.02 |
| N | 0.02 | 0.00 | 0.00 | −0.03 | −0.02 | 0.00 | −0.03 | 0.00 | −0.04 | 0.00 | 0.00 | −0.05 | 0.00 | 0.00 |
| Q | 0.02 | 0.00 | 1.83 | −1.10 | 0.00 | 0.08 | 0.00 | −0.02 | 0.00 | −0.01 | −1.12 | 0.00 | 0.65 | 0.01 |
| Y | 0.03 | 0.00 | 0.00 | 0.00 | 0.00 | 0.03 | 0.02 | 0.01 | 0.00 | 0.00 | 0.00 | 0.00 | 0.00 | 0.00 |
| H | −0.01 | 0.00 | 0.02 | 0.00 | 0.00 | 0.00 | 0.00 | 0.00 | 0.00 | 0.00 | 0.00 | 0.00 | 0.12 | 0.00 |
| R | 0.00 | 0.00 | 0.02 | −0.07 | 0.00 | −1.43 | −0.01 | −0.78 | 2.96 | 1.10 | −0.12 | 0.00 | −0.70 | 0.00 |
| K | 1.20 | −0.03 | −0.02 | 0.00 | 0.00 | 2.26 | −0.04 | −0.01 | 0.01 | 0.00 | 0.00 | 0.00 | 0.03 | 0.00 |
| D | 0.59 | −0.02 | −0.02 | 0.00 | −1.21 | −0.26 | 0.00 | −0.17 | 0.00 | 0.00 | 0.00 | −0.47 | 0.00 | −0.01 |
| E | −0.01 | 0.01 | 0.00 | 0.00 | −0.01 | #### | 0.02 | −0.02 | −0.18 | −0.08 | 0.00 | −0.01 | −0.02 | −0.12 |

SR4 post- minus pre- affinity maturation a.a. profile
Frame1

| | 15 | 16 | 17 | 18 | 19 | 20 | 21 | 22 | 23 | 24 | 25 | 26 |
|---|---|---|---|---|---|---|---|---|---|---|---|---|
| P | 0.00 | 0.00 | −0.97 | −0.55 | −0.05 | 0.00 | 0.00 | 0.00 | −0.06 | −0.02 | 0.11 | 0.00 |
| A | −0.04 | −0.01 | 0.00 | 0.00 | 0.00 | 0.00 | 0.00 | 0.00 | −0.40 | 0.31 | 0.05 | 0.01 |
| G | 0.20 | 0.11 | −0.01 | 0.00 | −0.04 | 0.00 | −0.37 | −0.15 | −0.02 | −0.01 | 0.00 | 0.09 |
| M | 0.00 | 0.00 | 0.00 | 0.00 | 0.00 | −0.01 | 0.00 | 0.00 | 0.00 | 0.00 | 0.00 | 0.00 |
| I | 0.00 | −0.01 | −0.01 | 0.08 | 0.00 | −0.42 | 0.09 | 0.00 | 0.00 | 0.00 | 0.00 | 0.00 |
| L | 0.00 | 0.00 | −0.07 | 1.27 | 0.00 | 2.06 | −0.02 | 0.00 | 0.00 | 0.00 | 0.16 | 0.00 |
| V | −0.06 | 0.15 | −0.01 | −0.03 | 0.00 | −0.13 | 0.00 | 0.00 | 0.20 | 0.00 | 0.00 | 0.15 |
| F | 0.00 | 0.01 | 0.00 | −0.15 | 0.00 | −0.83 | 0.00 | −0.07 | 0.00 | 0.00 | 0.00 | 0.00 |
| W | 0.00 | 0.00 | 0.00 | 0.00 | 0.00 | 0.00 | 0.00 | −0.07 | 0.00 | 0.00 | 0.00 | 0.00 |
| C | 0.05 | 0.00 | −0.01 | 0.00 | −0.03 | 0.00 | 0.18 | 2.05 | 0.00 | 0.00 | 0.00 | −0.11 |
| S | −0.03 | 0.00 | 1.63 | 0.00 | −0.11 | −0.61 | 0.37 | −0.68 | 0.14 | −0.05 | −0.90 | −0.17 |
| T | 0.00 | 0.00 | −0.50 | 0.00 | 0.00 | −0.01 | 0.01 | 0.00 | 0.20 | −0.17 | 0.56 | 0.00 |
| N | 0.00 | −0.07 | −0.01 | 0.00 | 0.00 | 0.00 | −0.06 | 0.00 | 0.00 | 0.00 | 0.00 | 0.00 |
| Q | 0.00 | 0.00 | 0.00 | −0.04 | 0.00 | 0.00 | 0.00 | 0.00 | 0.00 | 0.00 | 0.00 | 0.00 |
| Y | 0.00 | −0.06 | 0.00 | 0.00 | 0.00 | −0.03 | 0.00 | −0.21 | 0.00 | 0.00 | 0.01 | 0.00 |
| H | 0.00 | 0.00 | 0.00 | −0.56 | −0.29 | 0.00 | 0.00 | 0.00 | 0.00 | 0.00 | 0.00 | 0.00 |
| R | −0.01 | 0.00 | 0.00 | −0.03 | 0.52 | 0.00 | −0.22 | −0.86 | 0.00 | 0.00 | 0.00 | −0.01 |
| K | 0.00 | −0.02 | −0.03 | 0.00 | 0.00 | −0.01 | 0.00 | 0.00 | 0.00 | 0.00 | 0.00 | 0.00 |
| D | −0.12 | 0.01 | 0.00 | 0.00 | 0.00 | 0.00 | 0.00 | 0.00 | 0.00 | 0.00 | 0.00 | 0.04 |
| E | 0.00 | −0.12 | 0.00 | 0.00 | 0.00 | 0.00 | 0.00 | 0.00 | −0.06 | −0.07 | 0.00 | 0.00 |

CDR1

| | 1 | 2 | 3 | 4 | 5 | 6 | 7 | 8 | 9 | 10 |
|---|---|---|---|---|---|---|---|---|---|---|
| P | 0.00 | 0.20 | −0.51 | 0.00 | 0.00 | 0.00 | 0.00 | 0.00 | 0.00 | 0.00 |
| A | 0.00 | 0.00 | 0.00 | −0.01 | 0.00 | 0.00 | 0.00 | 0.00 | 0.00 | 0.00 |
| G | 0.00 | 0.00 | 0.00 | −0.61 | −0.15 | 0.00 | −0.20 | 0.00 | 0.00 | 0.00 |
| M | 0.00 | 0.00 | 0.06 | 0.00 | 0.00 | 0.00 | 0.00 | 0.00 | 0.00 | 0.00 |
| I | 0.06 | 0.00 | 0.00 | −0.09 | 0.00 | −0.01 | −0.02 | 0.00 | 0.00 | 0.00 |
| L | −0.16 | −0.37 | 1.29 | 0.00 | −0.01 | −0.01 | 0.00 | 0.00 | 0.00 | 0.00 |
| V | −0.03 | 0.00 | 0.00 | 0.00 | 0.00 | 0.00 | 0.00 | 0.00 | 0.00 | 0.00 |
| F | 0.79 | 0.00 | 0.00 | 0.00 | 0.03 | 0.01 | −0.13 | 0.00 | 0.00 | 0.00 |
| W | 0.00 | 0.00 | 0.00 | 0.00 | 0.02 | 0.00 | −0.04 | 0.00 | 0.00 | 0.00 |
| C | −0.02 | 0.00 | 0.00 | −0.79 | 1.48 | −0.34 | 3.59 | 0.00 | 0.00 | 0.00 |
| S | −0.21 | 0.00 | 0.00 | 1.80 | −0.81 | −0.14 | −1.65 | 0.00 | 0.00 | 0.00 |
| T | 0.00 | 0.00 | −0.01 | 0.00 | 0.00 | −0.01 | 0.00 | 0.00 | 0.00 | 0.00 |
| N | 0.00 | 0.00 | 0.00 | −0.15 | 0.01 | −0.58 | 0.00 | 0.00 | 0.00 | 0.00 |
| Q | 0.00 | 0.92 | −0.54 | 0.00 | 0.00 | 0.00 | 0.00 | 0.00 | 0.00 | 0.00 |
| Y | −0.42 | 0.00 | 0.00 | 0.00 | 0.18 | 1.90 | −0.28 | 0.00 | 0.00 | 0.00 |
| H | −0.01 | −0.04 | 0.00 | 0.00 | 0.00 | −0.71 | 0.00 | 0.00 | 0.00 | 0.00 |
| R | 0.00 | −0.59 | −0.31 | −0.15 | −0.76 | 0.00 | −1.26 | 0.00 | 0.00 | 0.00 |
| K | 0.00 | −0.15 | 0.00 | 0.00 | 0.00 | 0.00 | 0.00 | 0.00 | 0.00 | 0.00 |
| D | 0.00 | 0.00 | 0.00 | −0.01 | 0.00 | −0.13 | 0.00 | 0.00 | 0.00 | 0.00 |
| E | 0.00 | 0.02 | 0.00 | 0.00 | 0.00 | 0.00 | 0.00 | 0.00 | 0.00 | 0.00 |

Frame2

| | 1 | 2 | 3 | 4 | 5 | 6 | 7 | 8 | 9 | 10 | 11 | 12 | 13 | 14 | 15 | 16 | 17 | 18 | 19 |
|---|---|---|---|---|---|---|---|---|---|---|---|---|---|---|---|---|---|---|---|
| P | 0.00 | 0.00 | 0.00 | −0.01 | −0.05 | −0.36 | −0.01 | 0.46 | 0.00 | 0.00 | 0.00 | 0.09 | 0.00 | 0.00 | −0.01 | −0.03 | 0.00 | −0.01 | −0.13 |
| A | 0.02 | 0.01 | 0.00 | −0.03 | 0.00 | 0.00 | 0.17 | 0.01 | −0.04 | 0.00 | 0.01 | 0.00 | −0.03 | 0.00 | −0.93 | 0.81 | 0.00 | 0.01 | −0.66 |
| G | 0.00 | 0.61 | −0.28 | 0.00 | −0.04 | 0.00 | −0.04 | 0.00 | 0.55 | −0.01 | −0.64 | −0.01 | −0.87 | 0.00 | −0.15 | −0.05 | −0.89 | 0.00 | 0.00 |
| M | −3.71 | 0.00 | −0.01 | 0.00 | 0.00 | 0.00 | 0.00 | 0.00 | 0.00 | 0.00 | −0.01 | 0.00 | 0.00 | 0.00 | 0.00 | 0.00 | 0.00 | −0.12 | −0.51 |
| I | 0.61 | 0.00 | 0.00 | −0.53 | 0.00 | 0.00 | 0.00 | 0.00 | 0.00 | −0.44 | 0.00 | 0.00 | 0.00 | −0.65 | −0.24 | 0.00 | 0.07 | 2.47 | 0.00 |
| L | 1.09 | 0.00 | −0.13 | −2.29 | −0.15 | −0.45 | 0.00 | −0.05 | 0.00 | 0.00 | 0.00 | 0.44 | 0.00 | −1.57 | −0.06 | 0.00 | 0.00 | −0.17 | 0.00 |
| V | 3.31 | −0.06 | 0.00 | −0.28 | 0.00 | 0.00 | −0.06 | 0.00 | −0.16 | 0.00 | −0.46 | 0.00 | −0.81 | −0.16 | 2.27 | −0.20 | 0.00 | −0.16 | 0.00 |
| F | −0.01 | 0.00 | 0.00 | 4.90 | 0.00 | 0.00 | 0.00 | 0.00 | 0.00 | 0.00 | 0.00 | 0.00 | 0.00 | 4.49 | 0.00 | 0.00 | 0.00 | −0.89 | 0.00 |
| W | 0.00 | 0.00 | 2.38 | 0.00 | 0.00 | 0.00 | 0.00 | 0.00 | 0.00 | 0.00 | 0.00 | 0.41 | 0.00 | 0.00 | 0.00 | 0.00 | 0.00 | 0.00 | 0.00 |
| C | 0.00 | −0.08 | 0.30 | −0.11 | −0.31 | 0.00 | 0.00 | 0.00 | −0.05 | 0.00 | 0.00 | 0.01 | 0.00 | −0.10 | 0.00 | 0.00 | 0.20 | 0.00 | 0.00 |
| S | −0.01 | −0.10 | −0.03 | −1.00 | −0.21 | 0.00 | −0.07 | −0.14 | −0.28 | −0.01 | 0.00 | 0.00 | 0.00 | −0.95 | 0.00 | −0.18 | 1.07 | −0.16 | −0.56 |
| T | −0.09 | 0.00 | 0.00 | −0.02 | 0.00 | 0.00 | −0.01 | −0.03 | 0.00 | 0.00 | 0.00 | 0.00 | 0.00 | −0.01 | 0.00 | −0.21 | 0.00 | −0.46 | 2.06 |
| N | 0.00 | 0.00 | 0.00 | 0.00 | 0.00 | 0.00 | 0.00 | 0.00 | 0.00 | −0.17 | 0.00 | 0.00 | 0.00 | 0.00 | 0.00 | 0.00 | −0.16 | −0.49 | 0.00 |
| Q | −0.01 | 0.00 | 0.00 | 0.00 | 0.00 | 1.90 | 0.00 | 0.01 | 0.00 | −0.02 | −0.02 | 0.18 | 0.00 | 0.00 | 0.00 | 0.00 | 0.00 | 0.00 | 0.00 |
| Y | 0.00 | 0.00 | 0.00 | −0.61 | 0.00 | −0.01 | 0.00 | 0.00 | 0.00 | 0.01 | 0.00 | 0.00 | 0.00 | −1.05 | 0.00 | 0.00 | −0.01 | −0.01 | 0.00 |
| H | 0.00 | 0.00 | 0.00 | −0.01 | −0.49 | −0.20 | 0.00 | −0.24 | 0.00 | 0.00 | 0.00 | −0.01 | 0.00 | 0.00 | 0.00 | 0.00 | 0.00 | 0.00 | 0.00 |
| R | −0.14 | −0.02 | −2.23 | 0.00 | 1.24 | −0.84 | 0.00 | −0.02 | −0.03 | 0.13 | 0.00 | −1.11 | 0.00 | 0.00 | 0.00 | 0.00 | −0.28 | 0.00 | −0.01 |
| K | −1.07 | 0.00 | 0.00 | 0.00 | 0.00 | −0.02 | 0.00 | 0.00 | 0.00 | 0.52 | −0.12 | 0.00 | −0.17 | 0.00 | 0.00 | 0.00 | 0.00 | 0.00 | −0.19 |
| D | 0.00 | −0.37 | 0.00 | −0.01 | 0.00 | 0.00 | 0.00 | 0.00 | 0.01 | 0.00 | −0.16 | 0.00 | 0.00 | −0.01 | 0.00 | 0.00 | −0.01 | 0.00 | 0.00 |
| E | 0.00 | 0.00 | 0.00 | 0.00 | 0.00 | −0.01 | 0.01 | 0.00 | 0.00 | −0.01 | 1.40 | 0.00 | 1.88 | 0.00 | −0.89 | −0.13 | 0.00 | 0.00 | 0.00 |

CDR2

| | 1 | 2 | 3 | 4 | 5 | 6 | 7 | 8 | 9 | 10 |
|---|---|---|---|---|---|---|---|---|---|---|
| P | −0.16 | −0.35 | −0.09 | 0.00 | −0.03 | 0.00 | 0.00 | 0.00 | 0.00 | 0.00 |
| A | 0.00 | 0.00 | 0.97 | 0.00 | 0.00 | 0.00 | 0.00 | 0.00 | 0.00 | 0.00 |
| G | 0.00 | 0.00 | 0.02 | 0.00 | −0.03 | 0.00 | 0.00 | 0.00 | 0.00 | 0.00 |
| M | 0.00 | 0.00 | 0.00 | 0.00 | 0.00 | 0.00 | 0.00 | 0.00 | 0.00 | 0.00 |
| I | 0.00 | 0.00 | 0.00 | −0.35 | 0.00 | 0.00 | 0.00 | 0.00 | 0.00 | 0.00 |
| L | −1.45 | −1.07 | 0.00 | −1.32 | −0.19 | 0.00 | 0.00 | 0.00 | 0.00 | 0.00 |
| V | 0.00 | 0.00 | −0.28 | −0.17 | 0.00 | 0.00 | 0.00 | 0.00 | 0.00 | 0.00 |
| F | 0.00 | 0.00 | 0.00 | 3.03 | 0.00 | 0.00 | 0.00 | 0.00 | 0.00 | 0.00 |
| W | 0.00 | 0.00 | 0.00 | 0.00 | 0.00 | 0.00 | 0.00 | 0.00 | 0.00 | 0.00 |
| C | 0.00 | −0.01 | 0.00 | −0.10 | −0.70 | 0.00 | 0.00 | 0.00 | 0.00 | 0.00 |
| S | 0.00 | 0.00 | 0.02 | −0.85 | −0.27 | 0.00 | 0.00 | 0.00 | 0.00 | 0.00 |
| T | 0.00 | 0.00 | −0.48 | 0.00 | 0.00 | 0.00 | 0.00 | 0.00 | 0.00 | 0.00 |
| N | 0.00 | 0.11 | 0.00 | 0.00 | 0.00 | 0.00 | 0.00 | 0.00 | 0.00 | 0.00 |
| Q | 3.92 | −0.25 | 0.00 | 0.00 | 0.00 | 0.00 | 0.00 | 0.00 | 0.00 | 0.00 |
| Y | 0.00 | 0.06 | 0.00 | −0.24 | 0.00 | 0.00 | 0.00 | 0.00 | 0.00 | 0.00 |
| H | −1.01 | 2.68 | 0.00 | 0.00 | −0.61 | 0.00 | 0.00 | 0.00 | 0.00 | 0.00 |
| R | −1.18 | −1.14 | 0.00 | 0.00 | 1.83 | 0.00 | 0.00 | 0.00 | 0.00 | 0.00 |
| K | −0.09 | 0.00 | 0.00 | 0.00 | 0.00 | 0.00 | 0.00 | 0.00 | 0.00 | 0.00 |
| D | 0.00 | −0.02 | −0.01 | 0.00 | 0.00 | 0.00 | 0.00 | 0.00 | 0.00 | 0.00 |
| E | −0.02 | 0.00 | −0.15 | 0.00 | 0.00 | 0.00 | 0.00 | 0.00 | 0.00 | 0.00 |

Frame3

| | 1 | 2 | 3 | 4 | 5 | 6 | 7 | 8 | 9 | 10 | 11 | 12 | 13 | 14 |
|---|---|---|---|---|---|---|---|---|---|---|---|---|---|---|
| P | −0.15 | 0.00 | 0.00 | −0.08 | 0.00 | 0.00 | 0.00 | 0.00 | 0.00 | −0.06 | −0.01 | −0.05 | 0.00 | 0.00 |
| A | −0.09 | 0.00 | 0.00 | 0.99 | −0.04 | 0.00 | −0.34 | −0.01 | 0.01 | 0.00 | 0.00 | −0.18 | 0.00 | 0.00 |
| G | 0.00 | 0.00 | 0.00 | −0.02 | −0.55 | −0.07 | −0.18 | 0.00 | 0.31 | −0.08 | 0.00 | 0.00 | 0.00 | −0.36 |
| M | 0.00 | 0.00 | 0.00 | 0.00 | 0.00 | 0.00 | 0.00 | −0.17 | 0.00 | 0.00 | 0.00 | 0.00 | −0.34 | 0.00 |
| I | 0.17 | −0.01 | 0.00 | 0.00 | 0.00 | −0.04 | −0.18 | 0.00 | 0.00 | 0.00 | −0.38 | −0.01 | 1.25 | 0.07 |
| L | 0.00 | 0.00 | −0.02 | 0.00 | 0.00 | 0.00 | 0.00 | 0.00 | 0.00 | −0.09 | −2.36 | 0.00 | 0.23 | 0.00 |
| V | −0.01 | 0.00 | 0.00 | −0.25 | −0.73 | 0.00 | 1.48 | 0.00 | −0.08 | 0.00 | −0.10 | 0.00 | −0.07 | 0.00 |
| F | −0.01 | −0.50 | −0.35 | 0.00 | 0.00 | 0.00 | −0.01 | 0.00 | 0.00 | 0.00 | 4.08 | 0.00 | 0.00 | 0.00 |
| W | 0.00 | −0.01 | 0.00 | 0.00 | 0.00 | 0.00 | 0.00 | 0.00 | 0.00 | 0.00 | 0.00 | 0.00 | 0.00 | 0.00 |
| C | 0.00 | −0.37 | −0.43 | 0.00 | 0.00 | −0.17 | 0.00 | 0.00 | −0.16 | −0.57 | −0.01 | 0.00 | 0.00 | −0.05 |
| S | 0.29 | −0.02 | −0.07 | −0.04 | 0.00 | 0.55 | 0.00 | 0.01 | −0.10 | −0.21 | −0.67 | −0.25 | −0.01 | 1.41 |
| T | −0.17 | 0.00 | 0.00 | −0.53 | 0.00 | −0.02 | −0.01 | −0.11 | 0.00 | 0.00 | 0.00 | 0.49 | −0.38 | −0.01 |
| N | −0.06 | −0.77 | −0.68 | 0.00 | −0.20 | 0.04 | 0.00 | −0.16 | 0.00 | 0.00 | −0.05 | −0.01 | −0.01 | −0.02 |
| Q | 0.00 | 0.00 | 0.00 | 0.00 | 0.00 | 0.00 | 0.00 | −0.07 | 0.00 | 0.00 | 0.00 | 0.00 | 0.00 | 0.00 |
| Y | 0.00 | 2.48 | 2.13 | −0.01 | −0.27 | 0.00 | 0.00 | 0.00 | 0.00 | 0.00 | −0.48 | −0.01 | 0.00 | 0.00 |
| H | 0.00 | −0.70 | −0.46 | 0.00 | −0.02 | 0.00 | 0.00 | 0.00 | 0.00 | −0.41 | −0.02 | 0.00 | 0.00 | 0.00 |
| R | 0.00 | 0.00 | −0.02 | 0.00 | 0.00 | −0.30 | 0.00 | −0.26 | −0.07 | 1.42 | −0.01 | 0.00 | −0.10 | −1.06 |
| K | 0.00 | 0.00 | 0.00 | 0.00 | 0.00 | 0.00 | 0.00 | 1.27 | 0.00 | 0.00 | 0.00 | 0.00 | −0.56 | 0.00 |
| D | 0.00 | −0.09 | −0.10 | −0.06 | 1.71 | 0.00 | −0.77 | 0.00 | 0.10 | 0.00 | 0.00 | 0.00 | 0.00 | 0.00 |
| E | 0.00 | 0.00 | 0.00 | 0.00 | 0.09 | 0.00 | 0.00 | −0.50 | 0.00 | 0.00 | 0.00 | 0.00 | 0.00 | 0.00 |

Frame3

| | 15 | 16 | 17 | 18 | 19 | 20 | 21 | 22 | 23 | 24 | 25 | 26 | 27 | 28 |
|---|---|---|---|---|---|---|---|---|---|---|---|---|---|---|
| P | −0.07 | 0.00 | 0.00 | −0.03 | −0.03 | 0.00 | −0.19 | 0.00 | 0.00 | −1.03 | −0.39 | 0.00 | 0.00 | 0.00 |
| A | 0.00 | −0.16 | −0.11 | 0.07 | 0.00 | 0.00 | −0.41 | −0.35 | 0.00 | 0.00 | 0.00 | 0.01 | 0.00 | −0.01 |
| G | −0.04 | −0.94 | −0.65 | −0.05 | 0.00 | 0.00 | 0.00 | −2.11 | 0.00 | 0.00 | 0.00 | 0.00 | −0.01 | −0.15 |
| M | 0.00 | 0.00 | 0.00 | 0.00 | 0.00 | 0.00 | 0.00 | 0.00 | 0.00 | 0.00 | 0.00 | 2.73 | 0.00 | 0.00 |
| I | 0.00 | 0.00 | 0.00 | 0.00 | 0.00 | −0.65 | −0.08 | −0.11 | 0.00 | −0.12 | 0.00 | −0.05 | −0.05 | 0.00 |
| L | −0.24 | 0.00 | 0.00 | 0.00 | 0.26 | 0.00 | 0.00 | 0.01 | −0.02 | 2.46 | −0.21 | −0.23 | 0.00 | 0.00 |
| V | 0.00 | −0.87 | −1.02 | 0.01 | 0.00 | −0.01 | 0.00 | 3.21 | 0.00 | −0.01 | 0.00 | −0.63 | 0.00 | 0.00 |
| F | 0.00 | 0.00 | 0.00 | 0.00 | 0.00 | 0.00 | −0.01 | 0.01 | −0.19 | −0.29 | 0.00 | 0.00 | 0.00 | 0.00 |
| W | 0.00 | 0.00 | 0.00 | 0.00 | −0.15 | 0.00 | 0.00 | 0.00 | 0.00 | 0.00 | −0.01 | 0.00 | 0.00 | 0.00 |
| C | −0.56 | 0.00 | 0.00 | 0.00 | 0.00 | 0.00 | 0.00 | 0.00 | −0.32 | −0.01 | 0.00 | 0.00 | 0.01 | −0.21 |
| S | −0.31 | 0.00 | −0.01 | −0.13 | 0.00 | −0.28 | −0.28 | 0.00 | 0.05 | 0.00 | 0.00 | −0.02 | −0.18 | 0.59 |
| T | 0.00 | 0.00 | 0.00 | −0.02 | 0.00 | −0.15 | 0.99 | 0.00 | −0.01 | 0.00 | 0.00 | −0.75 | 0.00 | −0.01 |
| N | 0.00 | −0.43 | −0.72 | 0.00 | 0.00 | 1.86 | −0.04 | 0.00 | −0.29 | 0.00 | 0.00 | 0.00 | 0.34 | 0.04 |
| Q | 0.00 | 0.00 | 0.00 | 0.00 | 0.34 | 0.00 | 0.00 | 0.00 | −0.01 | −0.02 | 1.61 | 0.00 | −0.01 | 0.00 |
| Y | 0.00 | −0.37 | −0.34 | 0.00 | 0.00 | −0.86 | 0.00 | 0.00 | 1.07 | 0.00 | 0.00 | 0.00 | −0.50 | 0.00 |
| H | −0.61 | −0.02 | −0.01 | 0.00 | −0.01 | −0.16 | 0.00 | 0.00 | −0.18 | −0.78 | −0.04 | 0.00 | −0.09 | 0.00 |
| R | 1.83 | 0.00 | 0.00 | 0.00 | −0.42 | 0.00 | 0.00 | 0.00 | −0.01 | −0.20 | −0.92 | −0.18 | −0.02 | −0.27 |
| K | 0.00 | 0.00 | 0.00 | 0.00 | 0.00 | −0.08 | 0.00 | 0.00 | 0.00 | 0.00 | −0.09 | −0.88 | −0.34 | 0.00 |
| D | 0.00 | 2.73 | 3.07 | 0.01 | 0.00 | 0.31 | 0.00 | −0.65 | −0.09 | 0.00 | 0.00 | 0.00 | 0.81 | 0.00 |
| E | 0.00 | 0.05 | −0.20 | 0.15 | 0.00 | 0.00 | 0.00 | −0.01 | 0.00 | 0.00 | 0.04 | 0.00 | 0.01 | 0.00 |

Frame3

| | 29 | 30 | 31 | 32 | 33 | 34 | 35 | 36 | 37 | 38 | 39 | 40 | 41 |
|---|---|---|---|---|---|---|---|---|---|---|---|---|---|
| P | −0.65 | 0.00 | 0.22 | 0.00 | 0.00 | −0.14 | −0.02 | 0.00 | 0.00 | 0.00 | 0.00 | −0.06 | −0.06 |
| A | 0.00 | 0.00 | 0.01 | −0.15 | −0.06 | −0.26 | 1.28 | −0.61 | 0.00 | 0.00 | −0.01 | 0.19 | 1.23 |
| G | 0.00 | 0.00 | 0.00 | −0.74 | −0.90 | 0.00 | 0.00 | −2.19 | 0.00 | −0.01 | −0.13 | −0.04 | −0.05 |
| M | 0.00 | 0.00 | 0.00 | −0.01 | 0.00 | −0.01 | 0.00 | 0.00 | 0.00 | 0.00 | 0.00 | 0.00 | 0.00 |
| I | −0.12 | 0.19 | 0.00 | 0.00 | −0.01 | −0.28 | 0.00 | 0.13 | −0.01 | 0.00 | 0.00 | 0.00 | 0.00 |
| L | 1.87 | 0.00 | −0.16 | 0.00 | 0.00 | 0.00 | 0.00 | 0.00 | 0.00 | 0.00 | 0.00 | 0.00 | 0.00 |
| V | 0.03 | 0.01 | 0.00 | −0.60 | −0.79 | 0.00 | −0.50 | 2.60 | 0.00 | 0.00 | 0.00 | 0.43 | −0.26 |
| F | −0.14 | 0.00 | 0.00 | 0.00 | 0.00 | 0.00 | 0.00 | 0.31 | −0.36 | 0.11 | −0.11 | 0.00 | 0.00 |
| W | 0.00 | 0.00 | 0.00 | −0.01 | 0.00 | 0.00 | 0.00 | 0.00 | 0.00 | 0.00 | −0.05 | 0.00 | 0.00 |
| C | 0.00 | 0.00 | 0.00 | 0.00 | 0.00 | 0.00 | 0.00 | 0.00 | −0.69 | −0.41 | 2.82 | 0.00 | 0.00 |
| S | 0.00 | 0.00 | −0.03 | 0.00 | 0.00 | −0.18 | −0.16 | −0.02 | −0.14 | −0.03 | −0.69 | −0.08 | −0.12 |
| T | −0.01 | 0.06 | 0.01 | 0.00 | 0.00 | 0.95 | −0.40 | −0.02 | −0.01 | −0.01 | 0.00 | −0.23 | −0.57 |
| N | 0.00 | 0.09 | 0.00 | 0.00 | −0.15 | −0.09 | 0.00 | 0.00 | −0.78 | −0.60 | −0.01 | 0.00 | 0.00 |
| Q | 0.00 | 0.06 | −0.02 | −0.03 | 0.00 | 0.00 | 0.00 | 0.00 | 0.00 | 0.00 | 0.00 | 0.00 | −0.01 |
| Y | −0.01 | −0.02 | 0.00 | 0.00 | −0.23 | 0.00 | 0.00 | 0.00 | 2.83 | 1.72 | −0.42 | 0.00 | 0.00 |
| H | −0.82 | 0.00 | 0.00 | 0.00 | −0.04 | 0.00 | 0.00 | 0.00 | −0.70 | −0.56 | 0.00 | 0.00 | 0.00 |
| R | −0.14 | −0.53 | −0.03 | −0.02 | 0.00 | 0.00 | −0.01 | 0.00 | −0.02 | −0.01 | −1.40 | 0.00 | 0.00 |
| K | 0.00 | −0.39 | 0.00 | −0.19 | 0.00 | 0.00 | 0.00 | 0.00 | 0.00 | 0.00 | 0.00 | 0.00 | 0.00 |
| D | 0.00 | 0.00 | 0.00 | 0.04 | 2.47 | 0.00 | 0.00 | −0.18 | −0.11 | −0.20 | 0.00 | −0.21 | 0.00 |
| E | 0.00 | 0.52 | 0.00 | 1.72 | −0.30 | 0.00 | −0.20 | −0.02 | 0.00 | 0.00 | 0.00 | 0.00 | −0.15 |

CDR3

| | 1 | 2 | 3 | 4 | 5 | 6 | 7 | 8 | 9 | 10 | 11 | 12 | 13 | 14 | 15 |
|---|---|---|---|---|---|---|---|---|---|---|---|---|---|---|---|
| P | −0.03 | 0.00 | −0.71 | 1.42 | 0.00 | 0.00 | −0.66 | 0.00 | 0.00 | 0.00 | 0.00 | 0.00 | 0.00 | 0.00 | 0.00 |
| A | 0.82 | −0.13 | −1.04 | 0.00 | 0.00 | 0.00 | 0.00 | −0.01 | 0.00 | −0.14 | 0.00 | 0.00 | 0.00 | 0.00 | 0.00 |
| G | 0.02 | −0.98 | 0.00 | 0.00 | −0.02 | 0.00 | 0.00 | 0.09 | 0.00 | −0.69 | 0.00 | 0.00 | 0.00 | 0.00 | 0.00 |
| M | 0.00 | 0.00 | 0.00 | 0.00 | 0.00 | 0.03 | −0.09 | 0.00 | 0.00 | 0.00 | 0.00 | 0.00 | 0.00 | 0.00 | 0.00 |
| I | 0.00 | 0.00 | −0.19 | 0.00 | 0.64 | 1.66 | 0.00 | 0.12 | 0.00 | 0.00 | 0.00 | 0.00 | 0.00 | 0.00 | 0.00 |
| L | −0.02 | 0.00 | 0.00 | −0.59 | −0.01 | −0.11 | 0.57 | −0.02 | 0.01 | −0.02 | 0.00 | 0.00 | 0.00 | 0.00 | 0.00 |
| V | −0.41 | −0.99 | 0.00 | 0.00 | 0.01 | −0.49 | 0.01 | −0.37 | 0.00 | −0.80 | 0.00 | 0.00 | 0.00 | 0.00 | 0.00 |
| F | 0.00 | 0.00 | 0.00 | −0.02 | −0.01 | 0.46 | 0.00 | 0.10 | 0.02 | 0.00 | 0.00 | 0.00 | 0.00 | 0.00 | 0.00 |
| W | 0.00 | 0.00 | 0.00 | 0.00 | 0.00 | 0.00 | 0.00 | 0.00 | 0.00 | 0.00 | 0.00 | 0.00 | 0.00 | 0.00 | 0.00 |
| C | 0.00 | 0.00 | 0.00 | 0.00 | 0.01 | −0.01 | 0.00 | 0.00 | 0.28 | 0.00 | 0.00 | 0.00 | 0.00 | 0.00 | 0.00 |
| S | 0.00 | 0.00 | −0.58 | −0.20 | −0.77 | −0.17 | 0.00 | −0.02 | 0.13 | 0.00 | 0.00 | 0.00 | 0.00 | 0.00 | 0.00 |
| T | −0.12 | 0.00 | 2.58 | −0.27 | −0.11 | −0.98 | 0.00 | 0.00 | 0.00 | −0.01 | 0.00 | 0.00 | 0.00 | 0.00 | 0.00 |
| N | 0.00 | 0.00 | −0.07 | 0.00 | 0.63 | −0.39 | 0.00 | 0.00 | 0.28 | 0.00 | 0.00 | 0.00 | 0.00 | 0.00 | 0.00 |
| Q | 0.00 | −0.03 | 0.00 | −0.01 | 0.00 | 0.00 | 0.30 | 0.00 | 0.00 | −0.03 | 0.00 | 0.00 | 0.00 | 0.00 | 0.00 |
| Y | 0.00 | 0.00 | 0.00 | 0.00 | −0.24 | −0.01 | 0.00 | 0.00 | −1.21 | 0.00 | 0.00 | 0.00 | 0.00 | 0.00 | 0.00 |
| H | 0.00 | 0.00 | 0.00 | −0.28 | 0.00 | 0.00 | 0.00 | 0.00 | 0.28 | 0.00 | 0.00 | 0.00 | 0.00 | 0.00 | 0.00 |
| R | −0.01 | 0.00 | 0.00 | −0.04 | 0.00 | 0.00 | −0.13 | 0.00 | 0.00 | −0.01 | 0.00 | 0.00 | 0.00 | 0.00 | 0.00 |
| K | 0.00 | −0.13 | 0.00 | 0.00 | −0.15 | 0.00 | 0.00 | 0.00 | 0.00 | −0.30 | 0.00 | 0.00 | 0.00 | 0.00 | 0.00 |
| D | 0.00 | −0.01 | 0.00 | 0.00 | 0.02 | 0.00 | 0.00 | 0.10 | 0.21 | 0.07 | 0.00 | 0.00 | 0.00 | 0.00 | 0.00 |
| E | −0.25 | 2.27 | 0.00 | 0.00 | 0.00 | 0.00 | 0.00 | 0.00 | 0.00 | 1.93 | 0.00 | 0.00 | 0.00 | 0.00 | 0.00 |

CDR3

| | 16 | 17 | 18 | 19 | 20 | 21 | 22 | 23 | 24 | 25 | 26 | 27 | 28 | 29 | 30 |
|---|---|---|---|---|---|---|---|---|---|---|---|---|---|---|---|
| P | 0.00 | 0.00 | 0.00 | 0.00 | 0.00 | 0.00 | 0.00 | 0.00 | 0.00 | 0.00 | 0.00 | 0.00 | 0.00 | 0.00 | 0.00 |
| A | 0.00 | 0.00 | 0.00 | 0.00 | 0.00 | 0.00 | 0.00 | 0.00 | 0.00 | 0.00 | 0.00 | 0.00 | 0.00 | 0.00 | 0.00 |
| G | 0.00 | 0.00 | 0.00 | 0.00 | 0.00 | 0.00 | 0.00 | 0.00 | 0.00 | 0.00 | 0.00 | 0.00 | 0.00 | 0.00 | 0.00 |
| M | 0.00 | 0.00 | 0.00 | 0.00 | 0.00 | 0.00 | 0.00 | 0.00 | 0.00 | 0.00 | 0.00 | 0.00 | 0.00 | 0.00 | 0.00 |
| I | 0.00 | 0.00 | 0.00 | 0.00 | 0.00 | 0.00 | 0.00 | 0.00 | 0.00 | 0.00 | 0.00 | 0.00 | 0.00 | 0.00 | 0.00 |
| L | 0.00 | 0.00 | 0.00 | 0.00 | 0.00 | 0.00 | 0.00 | 0.00 | 0.00 | 0.00 | 0.00 | 0.00 | 0.00 | 0.00 | 0.00 |
| V | 0.00 | 0.00 | 0.00 | 0.00 | 0.00 | 0.00 | 0.00 | 0.00 | 0.00 | 0.00 | 0.00 | 0.00 | 0.00 | 0.00 | 0.00 |
| F | 0.00 | 0.00 | 0.00 | 0.00 | 0.00 | 0.00 | 0.00 | 0.00 | 0.00 | 0.00 | 0.00 | 0.00 | 0.00 | 0.00 | 0.00 |
| W | 0.00 | 0.00 | 0.00 | 0.00 | 0.00 | 0.00 | 0.00 | 0.00 | 0.00 | 0.00 | 0.00 | 0.00 | 0.00 | 0.00 | 0.00 |
| C | 0.00 | 0.00 | 0.00 | 0.00 | 0.00 | 0.00 | 0.00 | 0.00 | 0.00 | 0.00 | 0.00 | 0.00 | 0.00 | 0.00 | 0.00 |
| S | 0.00 | 0.00 | 0.00 | 0.00 | 0.00 | 0.00 | 0.00 | 0.00 | 0.00 | 0.00 | 0.00 | 0.00 | 0.00 | 0.00 | 0.00 |
| T | 0.00 | 0.00 | 0.00 | 0.00 | 0.00 | 0.00 | 0.00 | 0.00 | 0.00 | 0.00 | 0.00 | 0.00 | 0.00 | 0.00 | 0.00 |
| N | 0.00 | 0.00 | 0.00 | 0.00 | 0.00 | 0.00 | 0.00 | 0.00 | 0.00 | 0.00 | 0.00 | 0.00 | 0.00 | 0.00 | 0.00 |
| Q | 0.00 | 0.00 | 0.00 | 0.00 | 0.00 | 0.00 | 0.00 | 0.00 | 0.00 | 0.00 | 0.00 | 0.00 | 0.00 | 0.00 | 0.00 |
| Y | 0.00 | 0.00 | 0.00 | 0.00 | 0.00 | 0.00 | 0.00 | 0.00 | 0.00 | 0.00 | 0.00 | 0.00 | 0.00 | 0.00 | 0.00 |
| H | 0.00 | 0.00 | 0.00 | 0.00 | 0.00 | 0.00 | 0.00 | 0.00 | 0.00 | 0.00 | 0.00 | 0.00 | 0.00 | 0.00 | 0.00 |
| R | 0.00 | 0.00 | 0.00 | 0.00 | 0.00 | 0.00 | 0.00 | 0.00 | 0.00 | 0.00 | 0.00 | 0.00 | 0.00 | 0.00 | 0.00 |
| K | 0.00 | 0.00 | 0.00 | 0.00 | 0.00 | 0.00 | 0.00 | 0.00 | 0.00 | 0.00 | 0.00 | 0.00 | 0.00 | 0.00 | 0.00 |
| D | 0.00 | 0.00 | 0.00 | 0.00 | 0.00 | 0.00 | 0.00 | 0.00 | 0.00 | 0.00 | 0.00 | 0.00 | 0.00 | 0.00 | 0.00 |
| E | 0.00 | 0.00 | 0.00 | 0.00 | 0.00 | 0.00 | 0.00 | 0.00 | 0.00 | 0.00 | 0.00 | 0.00 | 0.00 | 0.00 | 0.00 |

SR6 post- minus pre- affinity maturation a.a. profile
Frame4

| | 1 | 2 | 3 | 4 | 5 | 6 | 7 | 8 | 9 | 10 | 11 | 12 | 13 |
|---|---|---|---|---|---|---|---|---|---|---|---|---|---|
| P | −0.01 | 0.00 | 0.00 | 0.00 | 0.08 | 0.00 | −0.15 | 0.08 | 0.00 | −0.78 | 0.00 | −1.11 | 0.00 |
| A | 0.04 | −0.01 | 0.00 | 0.01 | 0.00 | −0.09 | −0.06 | 0.00 | 0.04 | −0.05 | 0.03 | 0.02 | −0.02 |
| G | 0.00 | 0.00 | −0.13 | 0.16 | 0.00 | 0.73 | 0.00 | 0.00 | 0.02 | 0.00 | −0.01 | 0.00 | 0.01 |
| M | 0.00 | 0.00 | 0.00 | 0.00 | 0.00 | 0.00 | 0.00 | 0.00 | 0.00 | 0.00 | 0.00 | 0.00 | −0.03 |
| I | −0.24 | 0.01 | 0.00 | 0.00 | 0.00 | −0.01 | −0.02 | 0.00 | 0.01 | 0.02 | −0.05 | 0.00 | −0.03 |
| L | 0.00 | −0.01 | −0.13 | 0.00 | 0.05 | 0.00 | 0.00 | 0.21 | −0.04 | 0.00 | 0.00 | −0.01 | 0.00 |
| V | 0.01 | 0.00 | 0.00 | 0.02 | 0.00 | −0.14 | 0.00 | 0.00 | 0.71 | 0.00 | 1.10 | −0.01 | −1.33 |
| F | −0.02 | −0.21 | 0.00 | 0.00 | 0.00 | 0.00 | 0.00 | 0.00 | −0.03 | 0.00 | −1.04 | 0.00 | 0.00 |
| W | 0.00 | 0.00 | 1.97 | 0.00 | 0.00 | −0.01 | 0.00 | 0.00 | 0.00 | 0.00 | 0.00 | 0.00 | 0.00 |
| C | −0.02 | −0.09 | −0.12 | −0.04 | 0.00 | −0.09 | 0.00 | 0.00 | 0.00 | 0.00 | 0.00 | −0.01 | −0.05 |
| S | 1.03 | −0.07 | −0.03 | −0.03 | 0.00 | −0.07 | −0.30 | 0.00 | −0.66 | −0.01 | −0.01 | 1.11 | 1.31 |
| T | 0.76 | 0.00 | 0.00 | 0.00 | 0.00 | 0.00 | 0.73 | 0.00 | 0.00 | 0.82 | 0.00 | 0.02 | 0.01 |
| N | −1.62 | −0.19 | 0.00 | 0.00 | 0.00 | 0.00 | −0.20 | 0.00 | 0.00 | 0.02 | 0.00 | 0.00 | 0.00 |
| Q | 0.00 | 0.00 | −0.01 | 0.00 | 0.32 | 0.00 | 0.00 | 0.65 | 0.00 | −0.01 | 0.00 | −0.01 | 0.00 |
| Y | 0.29 | 0.78 | 0.00 | −0.01 | 0.00 | 0.00 | −0.01 | 0.00 | −0.01 | 0.00 | −0.01 | 0.01 | 0.00 |
| H | 0.13 | −0.06 | 0.00 | 0.00 | −0.16 | 0.00 | 0.00 | −0.04 | 0.00 | 0.00 | 0.00 | 0.00 | 0.00 |
| R | −0.01 | 0.00 | −1.52 | −0.03 | −0.24 | −0.13 | 0.00 | −0.67 | 0.00 | 0.00 | 0.00 | 0.00 | 0.13 |
| K | −0.14 | 0.00 | −0.02 | 0.00 | −0.06 | 0.00 | 0.00 | −0.22 | 0.00 | 0.00 | 0.00 | 0.00 | 0.00 |
| D | −0.21 | −0.15 | 0.00 | −0.11 | 0.00 | −0.18 | 0.00 | 0.00 | −0.04 | 0.00 | −0.01 | 0.00 | 0.00 |
| E | 0.00 | 0.00 | −0.01 | 0.00 | 0.00 | −0.01 | 0.00 | 0.00 | 0.00 | 0.00 | 0.00 | 0.00 | 0.00 |

Frame1

| | 1 | 2 | 3 | 4 | 5 | 6 | 7 | 8 | 9 | 10 | 11 | 12 | 13 |
|---|---|---|---|---|---|---|---|---|---|---|---|---|---|
| P | 0.00 | 0.00 | 0.00 | 0.00 | 0.00 | 0.00 | −1.82 | 0.00 | 0.00 | 0.00 | 0.00 | 0.00 | −0.57 |
| A | 0.13 | −0.27 | 0.00 | 0.00 | 0.13 | −0.18 | −0.14 | 0.00 | 0.00 | 0.03 | 0.00 | −0.38 | 0.00 |
| G | −0.86 | −0.57 | −0.30 | 0.00 | −0.61 | −1.36 | 0.00 | 1.63 | 1.84 | −0.16 | 0.00 | −0.30 | 0.00 |
| M | 0.00 | 0.00 | 0.00 | 0.00 | 0.00 | 0.00 | 0.00 | 0.00 | 0.00 | 0.00 | 0.03 | 0.00 | 0.00 |
| I | 0.00 | −0.27 | 0.00 | −1.18 | −0.16 | 0.03 | −0.88 | −0.30 | 0.00 | 0.00 | −1.80 | −0.14 | 0.00 |
| L | 0.00 | 0.00 | 0.11 | 2.92 | 0.48 | 0.00 | 0.27 | 0.00 | 0.00 | 0.00 | 1.24 | 0.03 | −1.23 |
| V | 0.67 | 1.69 | 0.00 | −0.27 | 1.18 | 4.72 | 0.00 | −0.30 | 0.16 | 0.03 | 0.03 | 1.39 | 0.00 |
| F | 0.00 | 0.00 | 0.00 | −0.35 | 0.10 | 0.00 | 0.10 | 0.00 | 0.00 | 0.00 | 1.52 | 0.01 | 0.00 |
| W | 0.03 | 0.00 | 0.03 | 0.00 | 0.00 | 0.00 | 0.00 | 0.00 | 0.00 | 0.00 | 0.00 | 0.00 | 0.00 |
| C | 0.00 | 0.00 | 0.00 | 0.00 | 0.00 | 0.00 | 0.00 | 0.00 | 0.00 | 0.25 | 0.00 | 0.00 | 0.00 |
| S | 0.03 | −0.61 | −0.61 | −0.21 | −0.57 | 0.03 | 1.71 | 0.00 | 0.00 | 0.22 | −0.78 | 0.00 | −0.30 |
| T | 0.00 | 0.00 | −0.27 | −0.30 | −0.30 | 0.00 | 1.03 | 0.00 | 0.00 | 0.00 | 0.00 | 0.00 | 0.00 |
| N | 0.00 | 0.03 | 0.00 | 0.00 | 0.03 | 0.00 | 0.00 | 0.00 | 0.00 | 0.00 | 0.00 | 0.00 | 0.00 |
| Q | 5.30 | 0.00 | −0.12 | −0.61 | 0.00 | 0.51 | 0.00 | 0.00 | 0.00 | 0.00 | 0.00 | 0.00 | 0.97 |
| Y | 0.03 | 0.00 | 0.00 | 0.00 | 0.00 | 0.00 | 0.03 | 0.00 | 0.00 | 0.00 | 0.03 | 0.00 | 0.00 |
| H | −0.24 | 0.00 | 0.01 | 0.00 | 0.00 | 0.00 | 0.00 | 0.00 | 0.00 | 0.00 | 0.00 | 0.00 | −0.26 |
| R | 0.03 | 0.00 | 1.14 | 0.00 | 0.00 | −0.91 | −0.30 | −1.08 | −1.75 | −0.45 | −0.27 | 0.00 | 1.57 |
| K | 0.13 | 0.00 | 0.00 | 0.00 | 0.00 | −0.14 | 0.00 | 0.00 | 0.00 | 0.00 | 0.00 | 0.00 | 0.13 |
| D | 0.70 | 0.00 | 0.00 | 0.00 | 0.00 | −0.35 | 0.00 | 0.00 | 0.03 | 0.06 | 0.00 | −0.61 | 0.00 |
| E | −5.98 | 0.00 | 0.00 | 0.00 | −0.27 | −2.35 | 0.00 | 0.06 | −0.27 | 0.00 | 0.00 | 0.00 | −0.30 |

Frame1

| | 14 | 15 | 16 | 17 | 18 | 19 | 20 | 21 | 22 | 23 | 24 | 25 | 26 |
|---|---|---|---|---|---|---|---|---|---|---|---|---|---|
| P | 0.03 | 0.00 | 0.00 | −1.36 | −0.27 | 0.00 | 0.00 | 0.00 | 0.00 | −0.30 | 0.00 | −1.18 | 0.00 |
| A | 0.58 | 0.00 | −0.18 | −0.81 | 0.00 | 0.00 | 0.00 | 0.00 | 0.00 | −1.09 | 0.88 | 0.06 | 0.00 |
| G | −0.27 | 1.36 | −0.51 | 0.00 | 0.00 | 0.00 | 0.00 | −0.56 | 0.00 | 0.06 | 0.00 | 0.00 | 0.96 |
| M | 0.00 | 0.00 | 0.00 | 0.03 | −0.42 | 0.00 | 0.00 | 0.00 | 0.00 | 0.00 | 0.00 | 0.00 | 0.00 |
| I | 0.00 | 0.00 | 0.00 | 0.00 | 0.00 | 0.00 | 0.14 | 0.16 | 0.00 | 0.00 | 0.00 | 0.00 | 0.00 |
| L | 0.00 | 0.00 | 0.00 | −0.30 | 2.35 | −0.21 | 1.35 | 0.00 | 0.00 | 0.00 | 0.03 | 0.00 | 0.00 |
| V | 0.29 | 0.00 | −1.69 | 0.03 | −0.30 | 0.00 | −0.30 | 0.00 | 0.00 | 0.56 | −0.11 | 0.00 | −0.30 |
| F | 0.00 | 0.00 | 0.00 | 0.00 | 0.00 | 0.00 | −0.58 | 0.00 | −0.27 | 0.00 | 0.00 | 0.13 | 0.00 |
| W | 0.00 | 0.00 | 0.00 | 0.00 | 0.00 | 0.00 | 0.00 | 0.00 | 0.00 | 0.00 | 0.00 | 0.00 | 0.00 |
| C | 0.00 | 0.03 | 0.03 | 0.03 | 0.00 | −0.62 | 0.00 | −0.43 | 1.99 | 0.00 | 0.00 | 0.00 | −0.30 |
| S | −0.24 | −0.81 | 0.00 | 1.81 | 0.00 | 0.19 | −0.61 | 0.77 | −1.15 | 0.10 | −0.27 | 0.34 | −0.18 |
| T | −0.48 | 0.00 | 0.00 | 0.57 | 0.00 | 0.00 | 0.00 | 0.03 | 0.03 | 0.59 | −0.22 | 0.08 | 0.00 |
| N | 0.00 | 0.00 | 0.11 | 0.00 | 0.00 | 0.00 | 0.00 | −0.51 | 0.00 | 0.00 | 0.00 | 0.00 | 0.00 |
| Q | 0.00 | 0.00 | 0.00 | 0.00 | −1.48 | 0.00 | 0.00 | 0.00 | 0.00 | 0.00 | 0.00 | 0.00 | 0.00 |
| Y | 0.00 | 0.00 | −0.21 | 0.00 | 0.00 | 0.00 | 0.00 | 0.00 | 0.00 | 0.00 | 0.00 | 0.57 | 0.00 |
| H | 0.00 | 0.00 | 0.06 | 0.00 | 0.00 | −1.02 | 0.00 | 0.00 | 0.00 | 0.00 | 0.00 | 0.00 | 0.00 |
| R | 0.00 | 0.00 | 0.00 | 0.00 | 0.13 | 1.66 | 0.00 | 0.54 | −0.61 | 0.00 | 0.00 | 0.00 | 0.00 |
| K | 0.00 | 0.00 | 0.00 | 0.00 | 0.00 | 0.00 | 0.00 | 0.00 | 0.00 | 0.00 | 0.00 | 0.00 | 0.00 |
| D | 0.00 | −0.27 | 2.80 | 0.00 | 0.00 | 0.00 | 0.00 | 0.00 | 0.00 | 0.10 | 0.00 | 0.00 | −0.18 |
| E | 0.10 | −0.30 | −0.42 | 0.00 | 0.00 | 0.00 | 0.00 | 0.00 | 0.00 | 0.00 | −0.30 | 0.00 | 0.00 |

CDR1

| | 1 | 2 | 3 | 4 | 5 | 6 | 7 | 8 | 9 | 10 |
|---|---|---|---|---|---|---|---|---|---|---|
| P | 0.00 | 0.00 | −0.30 | 0.00 | 0.00 | 0.00 | 0.00 | 0.00 | 0.00 | 0.00 |
| A | −0.30 | 0.00 | 0.00 | −0.54 | 0.00 | 0.00 | 0.00 | 0.00 | 0.00 | 0.00 |
| G | −0.51 | −1.15 | 0.00 | −0.45 | 0.00 | 0.00 | 0.03 | 0.00 | 0.00 | 0.00 |
| M | 0.00 | 0.00 | 0.00 | 0.00 | 0.00 | 0.00 | 0.00 | 0.00 | 0.00 | 0.00 |
| I | 0.00 | 0.00 | 0.00 | −0.21 | 0.06 | 0.00 | 0.00 | 0.00 | 0.00 | 0.00 |
| L | 0.00 | 0.00 | −2.12 | 0.03 | 2.01 | −0.57 | 0.03 | 0.00 | 0.00 | 0.00 |
| V | −1.21 | 0.00 | 0.00 | 1.61 | −0.57 | 0.00 | 0.00 | 0.00 | 0.00 | 0.00 |
| F | 0.00 | 0.00 | 0.00 | 0.03 | −0.08 | 0.00 | 0.03 | 0.00 | 0.00 | 0.00 |
| W | 0.00 | −0.30 | 0.00 | 0.00 | 0.00 | 2.30 | 0.00 | 0.00 | 0.00 | 0.00 |
| C | 0.00 | 3.61 | 0.03 | 0.00 | 0.00 | 0.06 | −0.24 | 0.00 | 0.00 | 0.00 |
| S | 0.03 | −0.42 | 0.00 | 0.00 | −1.15 | 0.00 | −1.18 | 0.00 | 0.00 | 0.00 |
| T | 0.00 | 0.00 | 0.00 | 0.00 | 0.00 | 0.00 | 0.00 | 0.00 | 0.00 | 0.00 |
| N | 0.41 | 0.00 | −0.18 | 0.00 | 0.00 | 0.00 | 0.00 | 0.00 | 0.00 | 0.00 |
| Q | 0.00 | 0.00 | −0.08 | 0.00 | −0.30 | 0.00 | 0.00 | 0.00 | 0.00 | 0.00 |
| Y | −0.91 | −0.54 | −0.72 | 0.00 | 0.00 | 0.00 | 0.00 | 0.00 | 0.00 | 0.00 |
| H | 0.00 | 0.00 | 5.90 | 0.00 | 0.00 | 0.00 | −0.91 | 0.00 | 0.00 | 0.00 |
| R | 0.00 | −1.20 | −1.96 | 0.00 | 0.00 | −1.79 | 2.23 | 0.00 | 0.00 | 0.00 |
| K | 0.00 | 0.00 | 0.00 | 0.00 | 0.00 | 0.00 | 0.00 | 0.00 | 0.00 | 0.00 |
| D | 2.33 | 0.00 | −0.57 | −0.48 | 0.03 | 0.00 | 0.00 | 0.00 | 0.00 | 0.00 |
| E | 0.16 | 0.00 | 0.00 | 0.00 | 0.00 | 0.00 | 0.00 | 0.00 | 0.00 | 0.00 |

Frame2

| | 1 | 2 | 3 | 4 | 5 | 6 | 7 | 8 | 9 | 10 | 11 | 12 | 13 | 14 | 15 | 16 | 17 | 18 | 19 |
|---|---|---|---|---|---|---|---|---|---|---|---|---|---|---|---|---|---|---|---|
| P | 0.00 | 0.00 | 0.00 | 0.00 | 0.03 | 0.03 | 0.00 | −0.41 | 0.00 | 0.00 | 0.00 | 0.16 | 0.00 | 0.00 | 0.00 | 0.00 | 0.00 | 0.00 | 0.00 |
| A | 0.00 | 0.10 | 0.00 | 0.00 | 0.00 | 0.00 | 0.47 | 0.03 | −0.30 | 0.00 | 0.03 | 0.00 | 0.00 | 0.00 | −0.27 | 2.54 | 2.39 | 0.00 | 0.00 |
| G | 0.00 | 0.11 | 0.00 | 0.00 | 0.00 | 0.00 | 0.00 | 0.00 | 2.07 | 0.00 | 0.08 | 0.00 | −0.57 | 0.00 | 0.03 | 0.10 | −0.30 | 0.00 | 0.08 |
| M | 2.40 | 0.00 | 0.00 | 0.00 | 0.00 | 0.00 | 0.00 | 0.00 | 0.00 | 0.00 | 0.00 | 0.00 | 0.00 | 0.00 | 0.00 | 0.00 | 0.00 | 0.03 | 0.00 |
| I | 0.16 | 0.00 | 0.00 | −0.24 | 0.00 | 0.00 | 0.00 | 0.00 | 0.00 | −0.85 | 0.00 | 0.00 | 0.00 | −0.30 | −0.22 | 0.00 | 0.00 | 1.50 | −0.61 |
| L | 0.44 | 0.00 | −0.30 | −3.41 | 0.00 | −1.96 | 0.00 | 0.16 | 0.00 | 0.03 | 0.00 | 0.89 | 0.00 | −1.21 | 0.03 | 0.00 | 0.00 | 0.00 | 0.00 |
| V | −0.34 | 0.03 | 0.00 | −0.30 | 0.00 | 0.00 | −0.26 | 0.00 | −0.30 | 0.00 | −0.26 | 0.00 | 0.25 | 0.00 | 1.64 | −0.30 | −0.61 | 0.08 | 0.00 |
| F | 0.00 | 0.00 | 0.00 | 5.10 | 0.00 | 0.00 | 0.00 | 0.00 | 0.00 | 0.00 | 0.00 | 0.00 | 0.00 | 2.84 | −0.30 | 0.00 | 0.00 | −0.61 | 0.00 |
| W | 0.00 | 0.00 | 3.78 | 0.00 | 0.00 | 0.00 | 0.00 | 0.00 | 0.00 | 0.00 | 0.00 | 0.00 | 0.00 | 0.00 | 0.00 | 0.00 | 0.00 | 0.00 | 0.00 |
| C | 0.00 | 0.00 | −0.14 | 0.00 | −0.18 | 0.00 | 0.00 | 0.00 | 0.00 | 0.00 | 0.00 | 0.43 | 0.00 | −0.30 | 0.00 | 0.00 | 0.00 | 0.00 | −0.88 |
| S | 0.00 | 0.00 | 0.00 | −0.88 | 0.03 | 0.00 | −0.29 | 0.32 | 0.00 | 0.00 | 0.00 | 0.10 | 0.00 | −0.91 | 0.00 | −0.91 | 0.00 | 0.06 | 2.92 |
| T | −1.75 | 0.00 | 0.00 | 0.00 | 0.00 | 0.00 | −0.05 | 0.16 | 0.00 | −0.14 | 0.00 | 0.00 | 0.00 | 0.00 | 0.00 | −1.45 | −0.57 | −0.19 | 0.00 |
| N | 0.00 | 0.00 | 0.00 | 0.00 | 0.00 | 0.00 | 0.00 | 0.00 | 0.00 | −1.34 | 0.00 | 0.00 | 0.00 | 0.00 | 0.00 | 0.00 | 0.00 | −0.88 | −0.91 |
| Q | 0.00 | 0.00 | 0.00 | 0.00 | 0.00 | 3.85 | 0.00 | −0.27 | 0.00 | 0.03 | 0.03 | 0.00 | −0.27 | 0.00 | 0.00 | 0.00 | 0.00 | 0.00 | 0.00 |
| Y | 0.00 | 0.00 | 0.00 | −0.27 | 0.00 | 0.00 | 0.00 | 0.00 | 0.00 | 0.00 | 0.00 | 0.00 | 0.00 | −0.11 | 0.00 | 0.00 | 0.00 | 0.00 | 0.00 |
| H | 0.00 | 0.00 | 0.00 | 0.00 | −0.57 | −1.18 | 0.00 | −0.02 | 0.00 | 0.00 | 0.00 | 0.43 | 0.00 | 0.00 | 0.00 | 0.00 | 0.00 | 0.00 | 0.00 |
| R | −0.30 | 0.03 | −3.33 | 0.00 | 0.69 | −0.99 | 0.00 | 0.03 | −0.85 | −0.32 | 0.00 | −2.00 | 0.00 | 0.00 | 0.00 | 0.00 | 0.00 | 0.00 | −0.61 |
| K | −0.61 | 0.00 | 0.00 | 0.00 | 0.00 | 0.22 | 0.00 | 0.00 | 0.00 | 3.05 | −0.81 | 0.00 | −0.24 | 0.00 | 0.00 | 0.00 | 0.00 | 0.00 | 0.00 |
| D | 0.00 | 0.00 | 0.00 | 0.00 | 0.00 | 0.00 | 0.00 | 0.00 | 0.00 | 0.00 | −0.88 | 0.00 | −0.88 | 0.00 | −0.91 | 0.00 | 0.00 | 0.00 | 0.00 |
| E | 0.00 | −0.27 | 0.00 | 0.00 | 0.00 | 0.03 | 0.13 | 0.00 | −0.62 | −0.46 | 1.81 | 0.00 | 1.71 | 0.00 | 0.00 | 0.03 | −0.91 | 0.00 | 0.00 |

CDR2

| | 1 | 2 | 3 | 4 | 5 | 6 | 7 | 8 | 9 | 10 |
|---|---|---|---|---|---|---|---|---|---|---|
| P | 0.00 | 0.00 | 0.00 | −0.54 | 0.00 | 0.00 | 0.00 | 0.00 | 0.00 | 0.00 |
| A | 0.00 | −0.27 | 0.00 | 0.00 | 0.00 | 0.00 | 0.00 | 0.00 | 0.00 | 0.00 |
| G | 0.00 | −2.39 | 0.72 | 0.00 | 0.00 | 0.00 | 0.00 | 0.00 | 0.00 | 0.00 |
| M | 0.00 | 0.00 | 0.00 | −0.35 | 0.00 | 0.00 | 0.00 | 0.00 | 0.00 | 0.00 |
| I | −0.54 | 0.00 | 0.00 | 0.00 | −0.61 | 0.00 | 0.00 | 0.00 | 0.00 | 0.00 |
| L | 1.66 | 0.00 | 0.00 | −0.07 | −3.64 | 0.00 | 0.00 | 0.00 | 0.00 | 0.00 |
| V | 0.03 | −1.21 | 0.00 | 0.00 | −4.24 | 0.00 | 0.00 | 0.00 | 0.00 | 0.00 |
| F | −0.27 | 0.00 | 0.00 | 0.00 | 11.26 | 0.00 | 0.00 | 0.00 | 0.00 | 0.00 |
| W | 0.00 | 0.00 | 0.00 | 0.00 | 0.00 | 0.00 | 0.00 | 0.00 | 0.00 | 0.00 |
| C | 0.00 | 0.00 | −0.54 | 0.00 | −0.30 | 0.00 | 0.00 | 0.00 | 0.00 | 0.00 |
| S | −0.88 | 0.00 | 0.13 | 0.00 | −2.12 | 0.00 | 0.00 | 0.00 | 0.00 | 0.00 |
| T | 0.00 | 0.00 | 0.00 | 0.00 | 0.00 | 0.00 | 0.00 | 0.00 | 0.00 | 0.00 |
| N | 0.00 | 0.06 | 0.00 | 0.00 | 0.00 | 0.00 | 0.00 | 0.00 | 0.00 | 0.00 |
| Q | 0.00 | 0.00 | 0.00 | 0.82 | 0.00 | 0.00 | 0.00 | 0.00 | 0.00 | 0.00 |
| Y | 0.00 | −0.27 | 0.00 | 0.00 | −0.35 | 0.00 | 0.00 | 0.00 | 0.00 | 0.00 |
| H | 0.00 | 0.00 | 0.00 | 0.00 | 0.00 | 0.00 | 0.00 | 0.00 | 0.00 | 0.00 |
| R | 0.00 | 0.00 | 0.00 | 0.14 | 0.00 | 0.00 | 0.00 | 0.00 | 0.00 | 0.00 |
| K | 0.00 | 0.00 | 0.00 | 0.00 | 0.00 | 0.00 | 0.00 | 0.00 | 0.00 | 0.00 |
| D | 0.00 | 4.05 | −0.30 | 0.00 | 0.00 | 0.00 | 0.00 | 0.00 | 0.00 | 0.00 |
| E | 0.00 | 0.03 | 0.00 | 0.00 | 0.00 | 0.00 | 0.00 | 0.00 | 0.00 | 0.00 |

Frame3

| | 1 | 2 | 3 | 4 | 5 | 6 | 7 | 8 | 9 | 10 | 11 | 12 | 13 | 14 |
|---|---|---|---|---|---|---|---|---|---|---|---|---|---|---|
| P | −0.48 | 0.00 | 0.00 | 0.00 | 0.00 | −0.61 | 0.00 | 0.00 | 0.00 | 0.00 | 0.00 | 0.00 | 0.00 | −0.88 |
| A | 0.92 | 0.00 | 0.00 | 1.34 | 0.03 | 0.22 | 0.01 | 0.00 | 0.06 | 0.00 | 0.00 | 0.00 | 0.00 | 0.00 |
| G | 0.00 | 0.00 | 0.00 | 0.00 | −0.21 | 0.00 | 0.03 | 0.00 | 2.91 | 0.00 | 0.00 | −0.10 | 0.00 | 0.00 |
| M | 0.00 | 0.00 | 0.00 | 0.00 | 0.00 | 0.00 | 0.00 | 0.00 | 0.00 | 0.00 | 0.00 | 0.00 | 0.06 | 0.00 |
| I | −0.13 | −0.54 | 0.00 | 0.00 | 0.00 | 0.00 | −0.24 | 0.00 | 0.00 | 0.00 | −0.21 | 0.32 | 2.57 | 0.00 |
| L | 0.00 | 0.00 | 0.00 | 0.00 | 0.00 | −0.45 | 0.06 | 0.25 | 0.00 | 0.00 | −0.21 | 0.00 | 0.06 | 0.00 |
| V | 0.00 | 0.00 | 0.00 | −0.27 | −0.35 | 0.00 | 0.40 | 0.00 | −0.61 | 0.00 | −0.27 | 0.00 | 0.86 | 0.00 |
| F | 0.00 | 0.00 | −0.78 | 0.00 | 0.00 | 0.00 | 0.00 | 0.00 | 0.00 | 0.00 | 2.54 | 0.00 | −2.42 | 0.29 |
| W | 0.00 | 0.00 | 0.00 | 0.00 | 0.00 | 0.00 | 0.00 | 0.00 | 0.00 | −1.52 | 0.00 | 0.00 | 0.00 | 0.00 |
| C | 0.00 | 0.00 | −0.54 | 0.00 | 0.00 | 0.00 | 0.00 | −0.11 | −0.27 | 0.00 | −0.57 | −0.21 | 0.00 | 0.00 |
| S | 0.46 | −0.58 | 0.00 | −0.18 | 0.00 | 0.72 | 0.00 | 0.13 | −1.79 | 0.00 | −0.72 | 0.28 | 0.00 | 0.95 |
| T | −0.81 | 0.22 | 0.00 | −0.42 | 0.00 | 0.11 | 0.00 | 0.00 | 0.03 | 0.00 | 0.00 | 0.00 | −0.53 | 0.03 |
| N | 0.03 | 3.26 | −0.91 | 0.00 | −0.54 | 0.00 | 0.00 | 0.00 | 0.00 | 0.00 | 0.00 | −0.18 | −0.61 | 0.00 |
| Q | 0.00 | 0.00 | 0.00 | 0.00 | 0.00 | 0.00 | 0.00 | 0.00 | 0.00 | −0.54 | 0.00 | 0.00 | 0.00 | 0.00 |
| Y | 0.00 | −0.88 | 3.69 | 0.00 | −0.24 | 0.00 | 0.00 | 0.00 | 0.00 | 0.00 | −0.56 | 0.00 | 0.00 | −0.38 |
| H | 0.00 | −0.30 | −1.45 | 0.00 | 0.06 | 0.00 | 0.00 | −0.96 | 0.00 | 0.00 | 0.00 | 0.00 | 0.00 | 0.00 |
| R | 0.00 | 0.00 | 0.00 | 0.00 | 0.00 | 0.00 | 0.00 | 0.69 | 0.00 | 2.06 | 0.00 | −0.11 | 0.00 | 0.00 |
| K | 0.00 | −0.61 | 0.00 | 0.00 | 0.00 | 0.00 | 0.00 | 0.00 | 0.00 | 0.00 | 0.00 | 0.00 | 0.00 | 0.00 |
| D | 0.00 | −0.57 | 0.00 | −0.48 | 0.67 | 0.00 | 0.00 | 0.00 | −0.34 | 0.00 | 0.00 | 0.00 | 0.00 | 0.00 |
| E | 0.00 | 0.00 | 0.00 | 0.00 | 0.57 | 0.00 | −0.27 | 0.00 | 0.00 | 0.00 | 0.00 | 0.00 | 0.00 | 0.00 |

Frame3

| | 15 | 16 | 17 | 18 | 19 | 20 | 21 | 22 | 23 | 24 | 25 | 26 | 27 | 28 |
|---|---|---|---|---|---|---|---|---|---|---|---|---|---|---|
| P | 0.00 | 0.00 | 0.01 | 0.00 | 0.00 | 0.00 | 0.06 | 0.00 | 0.00 | −0.30 | −0.30 | 0.00 | 0.00 | 0.00 |
| A | 0.40 | −0.30 | −0.08 | −0.22 | 0.00 | 0.00 | −0.82 | −0.81 | 0.00 | 0.00 | 0.00 | 0.03 | 0.00 | 0.00 |
| G | 0.00 | −0.30 | 0.00 | 0.03 | 0.03 | 0.00 | 0.00 | −1.79 | 0.00 | 0.00 | 0.00 | 0.00 | 0.00 | 0.03 |
| M | 0.00 | 0.00 | 0.00 | 0.00 | 0.52 | 0.00 | 0.01 | 0.00 | 0.00 | 0.00 | 0.00 | 3.34 | 0.00 | 0.00 |
| I | 0.00 | 0.00 | 0.00 | 0.00 | 0.00 | −0.78 | 0.00 | −0.02 | 0.00 | −1.48 | 0.00 | −0.53 | −0.45 | 0.19 |
| L | 0.00 | 0.00 | −0.42 | 0.00 | 0.03 | 0.00 | 0.00 | 0.00 | 0.00 | 2.93 | 0.43 | 0.27 | 0.00 | 0.00 |
| V | −0.29 | −0.18 | 0.00 | −0.14 | 0.00 | 0.00 | 0.00 | 2.78 | 0.00 | 0.00 | 0.00 | −0.27 | 0.00 | 0.00 |
| F | 0.00 | 0.00 | 0.00 | 0.00 | 0.00 | 0.00 | 0.00 | 0.41 | −0.70 | −0.30 | 0.00 | 0.00 | −0.30 | 0.00 |
| W | 0.00 | 0.00 | 0.00 | 0.00 | 0.00 | 0.00 | 0.00 | 0.00 | 0.00 | 0.00 | 0.00 | 0.00 | 0.00 | 0.00 |
| C | 0.00 | 0.00 | 0.00 | 0.00 | 0.00 | −0.27 | 0.00 | 0.00 | −0.80 | 0.00 | 0.00 | 0.00 | 0.00 | −0.47 |
| S | 0.06 | 0.00 | 0.71 | 0.19 | 0.00 | 0.38 | −0.42 | 0.00 | −0.18 | 0.00 | 0.00 | 0.00 | −0.90 | 2.53 |
| T | −0.18 | 0.00 | −0.23 | −0.03 | −0.11 | −0.02 | 1.12 | 0.00 | 0.00 | 0.00 | 0.00 | −0.78 | −0.11 | 0.00 |
| N | 0.00 | 0.03 | 0.00 | 0.00 | 0.70 | 0.53 | 0.00 | 0.00 | −0.83 | 0.00 | 0.00 | 0.00 | 3.71 | −0.13 |
| Q | 0.00 | 0.00 | 0.00 | 0.00 | −0.14 | 0.00 | 0.00 | 0.00 | 0.00 | 0.00 | 0.72 | 0.00 | 0.00 | 0.00 |
| Y | 0.00 | −0.30 | 0.00 | 0.00 | 0.00 | 2.02 | 0.00 | 0.00 | 4.42 | 0.00 | 0.00 | 0.00 | 0.11 | 0.00 |
| H | 0.00 | 0.00 | 0.00 | 0.00 | 0.00 | 0.06 | 0.00 | 0.00 | −2.04 | −0.57 | −0.02 | 0.00 | −0.24 | 0.00 |
| R | 0.00 | 0.00 | 0.00 | 0.00 | 0.49 | 0.00 | 0.00 | 0.00 | 0.03 | −0.27 | −0.89 | −0.54 | 0.03 | −2.19 |
| K | 0.00 | 0.00 | 0.00 | 0.00 | −2.42 | −0.21 | 0.03 | 0.00 | 0.00 | 0.00 | 0.06 | −1.52 | 0.03 | 0.00 |
| D | 0.00 | 0.83 | 0.00 | 0.00 | 0.00 | −1.71 | 0.00 | −0.57 | 0.10 | 0.00 | 0.00 | 0.00 | −1.92 | 0.03 |
| E | 0.00 | 0.22 | 0.00 | 0.17 | 0.90 | 0.00 | 0.00 | 0.00 | 0.00 | 0.00 | 0.00 | 0.00 | 0.03 | 0.00 |

Frame3

| | 29 | 30 | 31 | 32 | 33 | 34 | 35 | 36 | 37 | 38 | 39 | 40 | 41 |
|---|---|---|---|---|---|---|---|---|---|---|---|---|---|
| P | −1.05 | 0.00 | 0.48 | 0.00 | 0.00 | 0.03 | 0.00 | 0.00 | 0.00 | 0.00 | 0.00 | 0.00 | −0.30 |
| A | 0.00 | 0.00 | 0.03 | 0.03 | 0.00 | −0.19 | 0.78 | −0.53 | 0.00 | 0.00 | 0.00 | 0.75 | 1.15 |
| G | 0.00 | 0.00 | 0.00 | −0.96 | −1.52 | 0.00 | 0.03 | −2.09 | 0.00 | 0.00 | 0.03 | 0.10 | 0.00 |
| M | −0.08 | 0.00 | 0.03 | 0.00 | 0.00 | 0.00 | 0.00 | 0.00 | 0.00 | 0.00 | 0.00 | 0.00 | 0.00 |
| I | 0.00 | 0.09 | 0.00 | 0.00 | 0.00 | −0.24 | 0.00 | −0.26 | 0.00 | 0.03 | 0.00 | 0.00 | 0.00 |
| L | 3.56 | 0.00 | 0.38 | 0.00 | 0.00 | 0.00 | 0.00 | 0.00 | 0.00 | 0.00 | 0.00 | 0.00 | 0.00 |
| V | 0.00 | 0.00 | 0.00 | −0.45 | −0.30 | 0.00 | 0.00 | 3.29 | 0.00 | 0.00 | 0.00 | −0.42 | −0.24 |
| F | 0.00 | 0.00 | 0.00 | 0.00 | 0.00 | 0.00 | 0.00 | 0.03 | −0.24 | 0.21 | −0.88 | 0.00 | 0.00 |
| W | 0.00 | 0.00 | 0.00 | 0.00 | 0.00 | 0.00 | 0.00 | 0.00 | 0.00 | 0.00 | 0.03 | 0.00 | 0.00 |
| C | 0.00 | 0.00 | 0.00 | 0.00 | 0.00 | 0.00 | 0.00 | 0.00 | −1.82 | −0.69 | 3.08 | 0.00 | 0.00 |
| S | 0.00 | 0.00 | −0.45 | 0.00 | 0.00 | 0.17 | −0.27 | 0.00 | −0.61 | 0.03 | −1.05 | −0.27 | 0.10 |
| T | 0.00 | −0.18 | 0.03 | 0.00 | 0.00 | 0.83 | −0.57 | 0.00 | 0.00 | 0.00 | 0.00 | −0.16 | 0.05 |
| N | 0.00 | 0.03 | 0.00 | 0.00 | −0.30 | −0.61 | 0.00 | −0.30 | −1.82 | −0.48 | 0.00 | 0.00 | 0.00 |
| Q | −2.12 | −0.18 | 0.06 | 0.00 | 0.00 | 0.00 | 0.00 | 0.00 | 0.00 | 0.00 | 0.00 | 0.00 | 0.00 |
| Y | 0.00 | 0.03 | 0.00 | 0.00 | −0.30 | 0.00 | 0.00 | 0.00 | 6.24 | 0.48 | −0.30 | 0.00 | 0.00 |
| H | 0.00 | 0.03 | 0.00 | 0.00 | 0.00 | 0.00 | 0.00 | 0.00 | −1.75 | 0.41 | 0.00 | 0.00 | 0.00 |
| R | −0.30 | −0.23 | −0.57 | 0.00 | 0.00 | 0.00 | 0.00 | 0.00 | 0.00 | 0.00 | −0.91 | 0.00 | 0.00 |
| K | 0.00 | −0.19 | 0.00 | −0.30 | 0.00 | 0.00 | 0.00 | 0.00 | 0.00 | 0.00 | 0.00 | 0.00 | 0.00 |
| D | 0.00 | 0.00 | 0.00 | 0.00 | 2.36 | 0.00 | 0.03 | −0.14 | 0.00 | 0.00 | 0.00 | 0.00 | −0.75 |
| E | 0.00 | 0.58 | 0.00 | 1.68 | 0.06 | 0.00 | 0.00 | 0.00 | 0.00 | 0.00 | 0.00 | 0.00 | 0.00 |

CDR3

| | 1 | 2 | 3 | 4 | 5 | 6 | 7 | 8 | 9 | 10 | 11 | 12 | 13 | 14 | 15 |
|---|---|---|---|---|---|---|---|---|---|---|---|---|---|---|---|
| P | 0.00 | 1.96 | 0.00 | 0.00 | 0.00 | 0.00 | 0.00 | 0.00 | 0.00 | 0.00 | 0.00 | 0.00 | 0.00 | 0.00 | 0.00 |
| A | 0.00 | 0.03 | 0.00 | 0.00 | 0.00 | 0.00 | 0.00 | 0.00 | 0.00 | 0.00 | 0.00 | 0.00 | 0.00 | 0.00 | 0.00 |
| G | 0.00 | 0.00 | 0.00 | 0.00 | 0.00 | 0.00 | 0.00 | 0.00 | 0.00 | 0.00 | 0.00 | 0.00 | 0.00 | 0.00 | 0.00 |
| M | 0.71 | 0.00 | 0.00 | 0.00 | 0.00 | 0.00 | 0.00 | 0.00 | 0.00 | 0.00 | 0.00 | 0.00 | 0.00 | 0.00 | 0.00 |
| I | −1.32 | 0.00 | −1.15 | −0.62 | 0.00 | 0.00 | 0.00 | 0.00 | 0.00 | 0.00 | 0.00 | 0.00 | 0.00 | 0.00 | 0.00 |
| L | 2.64 | −0.91 | −0.53 | 2.52 | 0.00 | 0.00 | 0.00 | 0.00 | 0.00 | 0.00 | 0.00 | 0.00 | 0.00 | 0.00 | 0.00 |
| V | −0.54 | 0.00 | 0.03 | 0.06 | 0.00 | 0.00 | 0.00 | 0.00 | 0.00 | 0.00 | 0.00 | 0.00 | 0.00 | 0.00 | 0.00 |
| F | 0.00 | 0.00 | 3.74 | −1.37 | 0.00 | 0.00 | 0.00 | 0.00 | 0.00 | 0.00 | 0.00 | 0.00 | 0.00 | 0.00 | 0.00 |
| W | 0.00 | 0.00 | 0.00 | 0.00 | 0.00 | 0.00 | 0.00 | 0.00 | 0.00 | 0.00 | 0.00 | 0.00 | 0.00 | 0.00 | 0.00 |
| C | 0.00 | 0.00 | 0.03 | 0.16 | 0.00 | 0.00 | 0.00 | 0.00 | 0.00 | 0.00 | 0.00 | 0.00 | 0.00 | 0.00 | 0.00 |
| S | 0.00 | 0.06 | −1.84 | −0.75 | 0.00 | 0.00 | 0.00 | 0.00 | 0.00 | 0.00 | 0.00 | 0.00 | 0.00 | 0.00 | 0.00 |
| T | −0.57 | −0.27 | 0.00 | 0.00 | 0.00 | 0.00 | 0.00 | 0.00 | 0.00 | 0.00 | 0.00 | 0.00 | 0.00 | 0.00 | 0.00 |
| N | 0.00 | 0.00 | 0.00 | 0.00 | 0.00 | 0.00 | 0.00 | 0.00 | 0.00 | 0.00 | 0.00 | 0.00 | 0.00 | 0.00 | 0.00 |
| Q | 0.00 | −0.91 | 0.00 | 0.00 | 0.00 | 0.00 | 0.00 | 0.00 | 0.00 | 0.00 | 0.00 | 0.00 | 0.00 | 0.00 | 0.00 |
| Y | 0.00 | 0.00 | −0.29 | 0.00 | 0.00 | 0.00 | 0.00 | 0.00 | 0.00 | 0.00 | 0.00 | 0.00 | 0.00 | 0.00 | 0.00 |
| H | 0.00 | 0.00 | 0.00 | 0.00 | 0.00 | 0.00 | 0.00 | 0.00 | 0.00 | 0.00 | 0.00 | 0.00 | 0.00 | 0.00 | 0.00 |
| R | −0.61 | 0.03 | 0.00 | 0.00 | 0.00 | 0.00 | 0.00 | 0.00 | 0.00 | 0.00 | 0.00 | 0.00 | 0.00 | 0.00 | 0.00 |
| K | −0.30 | 0.00 | 0.00 | 0.00 | 0.00 | 0.00 | 0.00 | 0.00 | 0.00 | 0.00 | 0.00 | 0.00 | 0.00 | 0.00 | 0.00 |
| D | 0.00 | 0.00 | 0.00 | 0.00 | 0.00 | 0.00 | 0.00 | 0.00 | 0.00 | 0.00 | 0.00 | 0.00 | 0.00 | 0.00 | 0.00 |
| E | 0.00 | 0.00 | 0.00 | 0.00 | 0.00 | 0.00 | 0.00 | 0.00 | 0.00 | 0.00 | 0.00 | 0.00 | 0.00 | 0.00 | 0.00 |

CDR3

| | 16 | 17 | 18 | 19 | 20 | 21 | 22 | 23 | 24 | 25 | 26 | 27 | 28 | 29 | 30 |
|---|---|---|---|---|---|---|---|---|---|---|---|---|---|---|---|
| P | 0.00 | 0.00 | 0.00 | 0.00 | 0.00 | 0.00 | 0.00 | 0.00 | 0.00 | 0.00 | 0.00 | 0.00 | 0.00 | 0.00 | 0.00 |
| A | 0.00 | 0.00 | 0.00 | 0.00 | 0.00 | 0.00 | 0.00 | 0.00 | 0.00 | 0.00 | 0.00 | 0.00 | 0.00 | 0.00 | 0.00 |
| G | 0.00 | 0.00 | 0.00 | 0.00 | 0.00 | 0.00 | 0.00 | 0.00 | 0.00 | 0.00 | 0.00 | 0.00 | 0.00 | 0.00 | 0.00 |
| M | 0.00 | 0.00 | 0.00 | 0.00 | 0.00 | 0.00 | 0.00 | 0.00 | 0.00 | 0.00 | 0.00 | 0.00 | 0.00 | 0.00 | 0.00 |
| I | 0.00 | 0.00 | 0.00 | 0.00 | 0.00 | 0.00 | 0.00 | 0.00 | 0.00 | 0.00 | 0.00 | 0.00 | 0.00 | 0.00 | 0.00 |
| L | 0.00 | 0.00 | 0.00 | 0.00 | 0.00 | 0.00 | 0.00 | 0.00 | 0.00 | 0.00 | 0.00 | 0.00 | 0.00 | 0.00 | 0.00 |
| V | 0.00 | 0.00 | 0.00 | 0.00 | 0.00 | 0.00 | 0.00 | 0.00 | 0.00 | 0.00 | 0.00 | 0.00 | 0.00 | 0.00 | 0.00 |
| F | 0.00 | 0.00 | 0.00 | 0.00 | 0.00 | 0.00 | 0.00 | 0.00 | 0.00 | 0.00 | 0.00 | 0.00 | 0.00 | 0.00 | 0.00 |
| W | 0.00 | 0.00 | 0.00 | 0.00 | 0.00 | 0.00 | 0.00 | 0.00 | 0.00 | 0.00 | 0.00 | 0.00 | 0.00 | 0.00 | 0.00 |
| C | 0.00 | 0.00 | 0.00 | 0.00 | 0.00 | 0.00 | 0.00 | 0.00 | 0.00 | 0.00 | 0.00 | 0.00 | 0.00 | 0.00 | 0.00 |
| S | 0.00 | 0.00 | 0.00 | 0.00 | 0.00 | 0.00 | 0.00 | 0.00 | 0.00 | 0.00 | 0.00 | 0.00 | 0.00 | 0.00 | 0.00 |
| T | 0.00 | 0.00 | 0.00 | 0.00 | 0.00 | 0.00 | 0.00 | 0.00 | 0.00 | 0.00 | 0.00 | 0.00 | 0.00 | 0.00 | 0.00 |
| N | 0.00 | 0.00 | 0.00 | 0.00 | 0.00 | 0.00 | 0.00 | 0.00 | 0.00 | 0.00 | 0.00 | 0.00 | 0.00 | 0.00 | 0.00 |
| Q | 0.00 | 0.00 | 0.00 | 0.00 | 0.00 | 0.00 | 0.00 | 0.00 | 0.00 | 0.00 | 0.00 | 0.00 | 0.00 | 0.00 | 0.00 |
| Y | 0.00 | 0.00 | 0.00 | 0.00 | 0.00 | 0.00 | 0.00 | 0.00 | 0.00 | 0.00 | 0.00 | 0.00 | 0.00 | 0.00 | 0.00 |
| H | 0.00 | 0.00 | 0.00 | 0.00 | 0.00 | 0.00 | 0.00 | 0.00 | 0.00 | 0.00 | 0.00 | 0.00 | 0.00 | 0.00 | 0.00 |
| R | 0.00 | 0.00 | 0.00 | 0.00 | 0.00 | 0.00 | 0.00 | 0.00 | 0.00 | 0.00 | 0.00 | 0.00 | 0.00 | 0.00 | 0.00 |
| K | 0.00 | 0.00 | 0.00 | 0.00 | 0.00 | 0.00 | 0.00 | 0.00 | 0.00 | 0.00 | 0.00 | 0.00 | 0.00 | 0.00 | 0.00 |
| D | 0.00 | 0.00 | 0.00 | 0.00 | 0.00 | 0.00 | 0.00 | 0.00 | 0.00 | 0.00 | 0.00 | 0.00 | 0.00 | 0.00 | 0.00 |
| E | 0.00 | 0.00 | 0.00 | 0.00 | 0.00 | 0.00 | 0.00 | 0.00 | 0.00 | 0.00 | 0.00 | 0.00 | 0.00 | 0.00 | 0.00 |

Frame4

| | 1 | 2 | 3 | 4 | 5 | 6 | 7 | 8 | 9 | 10 | 11 | 12 | 13 |
|---|---|---|---|---|---|---|---|---|---|---|---|---|---|
| P | 0.00 | 0.00 | 0.00 | 0.00 | −0.11 | 0.00 | 0.00 | 0.21 | 0.00 | 0.00 | 0.00 | 0.06 | 0.00 |
| A | −0.30 | 0.00 | 0.00 | 0.00 | 0.00 | 0.03 | −0.05 | 0.00 | 0.06 | 0.06 | 0.06 | 0.00 | −0.54 |
| G | −0.48 | 0.00 | 0.10 | 1.12 | 0.00 | 0.14 | 0.00 | 0.00 | 0.00 | 0.00 | 0.00 | 0.00 | 0.10 |
| M | 0.00 | 0.00 | 0.00 | 0.00 | 0.00 | 0.00 | 0.00 | 0.00 | 0.00 | 0.00 | 0.00 | 0.00 | 0.00 |
| I | 0.00 | 0.00 | 0.00 | 0.00 | 0.00 | 0.00 | −0.14 | 0.00 | 0.00 | 0.00 | 0.00 | 0.00 | 0.06 |
| L | 0.00 | 0.03 | 0.10 | 0.00 | −0.61 | 0.00 | 0.00 | 0.20 | 0.00 | 0.00 | 0.00 | −0.54 | 0.00 |
| V | −0.51 | 0.00 | 0.00 | 0.03 | 0.00 | 0.00 | 0.03 | 0.00 | −0.06 | 0.00 | 0.18 | 0.00 | 0.00 |
| F | 0.00 | 0.83 | 0.00 | 0.00 | 0.00 | 0.00 | 0.00 | 0.00 | 0.00 | 0.00 | 0.00 | 0.00 | 0.00 |
| W | 0.00 | 0.00 | 0.80 | 0.00 | 0.00 | 0.00 | 0.00 | 0.00 | 0.00 | 0.00 | 0.00 | 0.00 | 0.00 |
| C | 0.00 | −0.08 | 0.13 | 0.00 | 0.00 | −0.24 | 0.00 | 0.00 | 0.00 | 0.00 | 0.00 | 0.00 | 0.13 |
| S | 0.00 | −0.61 | 0.03 | 0.03 | 0.00 | 0.06 | −1.08 | 0.00 | 0.00 | 0.10 | 0.00 | 0.38 | 0.40 |
| T | 0.00 | 0.00 | 0.00 | 0.00 | 0.00 | 0.00 | 1.21 | 0.00 | 0.00 | −0.19 | 0.00 | 0.00 | 0.00 |
| N | 0.22 | −0.57 | 0.00 | 0.00 | 0.00 | 0.00 | 0.00 | 0.00 | 0.00 | 0.00 | 0.00 | 0.00 | −0.30 |
| Q | 0.00 | 0.00 | 0.00 | 0.00 | 2.72 | 0.00 | 0.00 | 2.08 | 0.00 | 0.03 | 0.00 | 0.00 | 0.00 |
| Y | −0.21 | 0.79 | 0.00 | 0.00 | 0.00 | 0.00 | 0.00 | 0.00 | 0.00 | 0.00 | −0.24 | 0.10 | 0.00 |
| H | 0.00 | −0.38 | 0.00 | 0.00 | −2.14 | 0.00 | 0.00 | 0.10 | 0.00 | 0.00 | 0.00 | 0.00 | 0.00 |
| R | 0.00 | 0.00 | −1.15 | −0.91 | 0.25 | 0.00 | 0.03 | −2.38 | 0.00 | 0.00 | 0.00 | 0.00 | 0.16 |
| K | 0.00 | 0.00 | 0.00 | 0.00 | −0.24 | 0.00 | 0.00 | −0.21 | 0.00 | 0.00 | 0.00 | 0.00 | 0.00 |
| D | 0.67 | 0.00 | 0.00 | 0.00 | 0.00 | 0.00 | 0.00 | 0.00 | 0.00 | 0.00 | 0.00 | 0.00 | 0.00 |
| E | 0.60 | 0.00 | 0.00 | −0.27 | 0.13 | 0.00 | 0.00 | 0.00 | 0.00 | 0.00 | 0.00 | 0.00 | 0.00 |

TABLE 14
VHH variants ELISA and neutralization data. ELISA binding assay and pseudotyped virus
neutralization assay results for all VHH variants characterized in this study.

| sample_ID | ELISA A450 | Pseudovirus neutralization % inhibition | | | | | |
|---|---|---|---|---|---|---|---|
| VHH concentration | 50 nM | 500 nM | | 50 nM | | 5 nM | |
| SR1 | 0.375 | 32.96703297 | 14.03921569 | 17.10843373 | 13.77431907 | 15.42130366 | 12.67605634 |
| SR1_t2 | 0.263 | 20.25117739 | 13.41176471 | 8.43373494 | 7.237354086 | −1.907790143 | 10.17214397 |
| SR2 | 0.625 | 31.711146 | 19.52941176 | 4.738955823 | 4.124513619 | 1.430842607 | 4.225352113 |
| SR2_c3 | 0.455 | 67.81789639 | 59.37254902 | 16.30522088 | 16.42023346 | 0.635930048 | 4.851330203 |
| SR2_c4 | 1.650 | 49.45054945 | 38.03921569 | 12.77108434 | 11.28404669 | 14.30842607 | 2.660406886 |
| SR2_f3 | 0.006 | 6.017699115 | −0.622222222 | 5.008635579 | 2.670111972 | 2.586206897 | 0 |
| SR2_t5 | 0.333 | 61.2244898 | 52 | 14.0562249 | 18.13229572 | 2.702702703 | 13.92801252 |
| SR2_t9 | 0.799 | 23.54788069 | 20.78431373 | 13.41365462 | 9.883268482 | 12.40063593 | 12.05007825 |
| SR4 | 0.080 | 32.18210361 | 20 | 11.00401606 | 8.793774319 | 6.200317965 | 0.625978091 |
| SR4_c1 | 0.221 | 45.21193093 | 34.2745098 | 8.59437751 | 10.97276265 | −3.33863275 | 3.286384977 |
| SR4_f3 | 0.145 | 28.72841444 | 16.8627451 | 4.578313253 | 9.105058366 | 3.974562798 | 0 |
| SR4_t4 | 0.268 | 52.90423862 | 36.47058824 | 6.987951807 | 5.369649805 | 4.92845787 | −0.625978091 |
| SR4_t5 | 0.093 | 50.08849558 | 35.64444444 | 20.7253886 | 6.287683032 | −0.344827586 | 2.426343154 |
| SR4_t6 | 0.187 | 73.45132743 | 66.4 | 47.66839378 | 31.78294574 | 9.482758621 | 4.332755633 |
| SR4_t9 | 0.358 | 94.12389381 | 91.71555556 | 77.54749568 | 73.47114556 | 12.06896552 | 6.932409012 |
| SR4_t13 | 0.778 | 95.00784929 | 92.48627451 | 62.08835341 | 50.97276265 | 13.83147854 | 4.06885759 |
| SR6 | 0.042 | 31.86813187 | 19.37254902 | 14.53815261 | 14.24124514 | 13.19554849 | 9.546165884 |
| SR6_c3 | 0.709 | 86.27943485 | 75.52941176 | 66.74698795 | 58.44357977 | 27.82193959 | 24.25665102 |
| SR6_f3 | 0.153 | 21.41138733 | 19.33438986 | 15.54878049 | 11.90661479 | 11.48804934 | 8.647798742 |
| SR6_t4 | 0.705 | 84.18604651 | 77.81299525 | 64.78658537 | 59.53307393 | 20.1233616 | 16.98113208 |
| SR6_t5 | 1.038 | 65.03608661 | 61.33122029 | 39.48170732 | 32.45136187 | 12.10485736 | 8.805031447 |
| SR6_t6 | 0.708 | 69.20609463 | 62.12361331 | 32.62195122 | 28.87159533 | 4.240555127 | −1.257861635 |
| SR6_t9 | 0.657 | 90.26463512 | 82.2503962 | 63.87195122 | 64.82490272 | 24.59521974 | 11.16352201 |
| SR6_t12 | 0.505 | 86.35124298 | 80.34865293 | 60.97560976 | 57.3540856 | 16.5767155 | 3.93081761 |
| SR8 | 0.025 | 23.97754611 | 16.32329635 | 11.8902439 | 8.949416342 | 14.26368543 | 8.805031447 |
| SR8_c2 | 0.028 | 12.10906175 | 10.30110935 | 3.963414634 | 3.346303502 | 4.548959136 | 1.41509434 |
| SR8_t5 | 0.000 | 1.592920354 | −3.288888889 | −4.490500864 | −0.947459087 | −8.275862069 | −6.585788562 |
| SR12 | 0.935 | 8.4202085 | 4.595879556 | 2.134146341 | −0.077821012 | 1.00231303 | −0.471698113 |
| SR12_c3 | 0.547 | 51.72413793 | 36.76703645 | 13.87195122 | 9.883268482 | 0.077101002 | −2.51572327 |
| SR12_c5 | 0.462 | 12.91098637 | 5.229793978 | 10.67073171 | 3.968871595 | 8.712413261 | 3.616352201 |
| SR12_f3 | 0.465 | 14.03368083 | 8.557844691 | 11.58536585 | 5.992217899 | 12.72166538 | 3.93081761 |
| SR12_t6 | 0.784 | 44.66720128 | 35.340729 | 11.43292683 | 9.260700389 | 7.32459522 | 0.157232704 |
| SR12_t9 | 0.809 | 58.2300885 | 46.48888889 | 15.54404145 | 9.905254091 | −1.724137931 | −0.519930676 |
| VHH72 | 0.287 | 81.39534884 | 49.60380349 | 4.115853659 | 3.968871595 | 6.090979183 | 2.672955975 |

TABLE 15
High-throughput sequencing metadata. Number of sequences obtained
by high-throughput sequencing for indicated analyses.

| Initial selection for identifying | | cluster- | Unique |
|---|---|---|---|
| RBD and EGFP binders, number of | total | forming | cluster |
| sequences passing quality trimming | sequenced | sequences | sequences |
| input library | 107033 | 0 | 0 |
| RBD output after 3 rounds | 101647 | 83392 | 19223 |
| EGFP output after 3 rounds | 89754 | 71210 | 36379 |

| Affinity maturation of selected | pre-affinity | post-affinity |
|---|---|---|
| RBD binders, number of sequences | maturation | maturation |
| passing quality trimming | sequences | sequences |
| SR1 | 14596 | 6426 |
| SR2 | 255 | 48 |
| SR4 | 8624 | 85756 |
| SR6 | 330 | 3146 |
| SR8 | 10248 | 3377 |
| SR12 | 213 | 457 |

TABLE 16

| Cluster | Binding | Neutralizing |
|---|---|---|
| SR9 | non-binder | |
| SR6 | weak binder | Neutralizer |
| SR12 | strong binder | Neutralizer |
| SR8 | weak binder | Neutralizer |
| SR5 | non-binder | |
| SR14 | weak binder | |
| SR4 | weak binder | Neutralizer |
| SR10 | non-binder | |
| SR3 | non-binder | |
| SR1 | strong binder | Neutralizer |
| SR2 | strong binder | Neutralizer |
| SR11 | weak binder | |
| SR13 | weak binder | |
| SR7 | weak binder | |

### REFERENCES

[0177] 1. Gray, A. C. et al. Animal-derived-antibody generation faces strict reform in accordance with European Union policy on animal use. Nat. Methods 17, 755-756 (2020).
[0178] 2. Dübel, S., Stoevesandt, O., Taussig, M. J. & Hust, M. Generating recombinant antibodies to the complete human proteome. Trends Biotechnol. 28, 333-339 (2010).
[0179] 3. Miersch, S. & Sidhu, S. S. Synthetic antibodies: Concepts, potential and practical considerations. Methods 57, 486-498 (2012).
[0180] 4. Gray, A. et al. Animal-free alternatives and the antibody iceberg. Nat. Biotechnol. 38, 1234-1239 (2020).
[0181] 5. Bradbury, A. R. M., Sidhu, S., Dübel, S. & McCafferty, J. Beyond natural antibodies: The power of in vitro display technologies. Nat. Biotechnol. 29, 245-254 (2011).
[0182] 6. McMahon, C. et al. Yeast surface display platform for rapid discovery of conformationally selective nanobodies. Nat. Struct. Mol. Biol. 25, 289-296 (2018).
[0183] 7. Moutel, S. et al. NaLi—H1: A universal synthetic library of humanized nanobodies providing highly functional antibodies and intrabodies. Elife 5, 1-31 (2016).
[0184] 8. Zimmermann, I. et al. Synthetic single domain antibodies for the conformational trapping of membrane proteins. Elife 7, 1-32 (2018).
[0185] 9. Muyldermans, S. Nanobodies: Natural single-domain antibodies. Annu. Rev. Biochem. 82, 775-797 (2013).
[0186] 10. Turner, K. B., Zabetakis, D., Goldman, E. R. & Anderson, G. P. Enhanced stabilization of a stable single domain antibody for SEB toxin by random mutagenesis and stringent selection. Protein Eng. Des. Sel. 27, 89-95 (2014).
[0187] 11. Huo, J. et al. Neutralizing nanobodies bind SARS-CoV-2 spike RBD and block interaction with ACE2. Nat. Struct. Mol. Biol. (2020). doi:10.1038/s41594-020-0469-6
[0188] 12. Boder, E. T. & Wittrup, K. D. Yeast surface display for screening combinatorial polypeptide libraries. Nat. Biotechnol. 15, 553-557 (1997).
[0189] 13. Hanes, J. & Plückthun, A. In vitro selection and evolution of functional proteins by using ribosome display. Proc. Natl. Acad. Sci. U.S.A 94, 4937-4942 (1997).
[0190] 14. Hanes, J., Schaffitzel, C., Knappik, A. & Püickthun, A. Picomolar affinity antibodies from a fully synthetic naive library selected and evolved by ribosome display. Nat. Biotechnol. 18, 1287-1292 (2000).
[0191] 15. He, M. & Taussig, M. J. Ribosome display: Cell-free protein display technology. Briefings Funct. Genomics Proteomics 1, 204-212 (2002).
[0192] 16. Kirchhofer, A. et al. Modulation of protein properties in living cells using nanobodies. Nat. Struct. Mol. Biol. 17, 133-139 (2010).
[0193] 17. Zhou, P. et al. A pneumonia outbreak associated with a new coronavirus of probable bat origin. Nature 579, 270-273 (2020).
[0194] 18. Egloff, P. et al. Engineered peptide barcodes for in-depth analyses of binding protein libraries. Nat. Methods 16, 421-428 (2019).
[0195] 19. Wrapp, D. et al. Structural Basis for Potent Neutralization of Betacoronaviruses by Single-Domain Camelid Antibodies. Cell 1004-1015 (2020). doi:10.1016/j.cell.2020.04.031
[0196] 20. Rogers, T. F. et al. Isolation of potent SARS-CoV-2 neutralizing antibodies and protection from disease in a small animal model. Science 7520, eabc7520 (2020).
[0197] 21. Hansen, J. et al. Studies in humanized mice and convalescent humans yield a SARS-CoV-2 antibody cocktail. Science 0827, eabd0827 (2020).
[0198] 22. Scheid, J. F. et al. B cell genomics behind cross-neutralization of SARS-CoV-2 variants and SARS-CoV. Cell 184, 3205-3221.e24 (2021).
[0199] 23. Li, W. et al. High Potency of a Bivalent Human VH Domain in SARS-CoV-2 Animal Models. Cell 183, 429-441.e16 (2020).
[0200] 24. Li, Q. et al. SARS-CoV-2 501Y.V2 variants lack higher infectivity but do have immune escape. Cell (2021). doi:10.1016/j.cell.2021.02.042
[0201] 25. Hanke, L. et al. An alpaca nanobody neutralizes SARS-CoV-2 by blocking receptor interaction. Nat. Commun. 11, 1-9 (2020).
[0202] 26. Xiang, Y. et al. Versatile and multivalent nanobodies efficiently neutralize SARS-CoV-2. Science 1484, eabe4747 (2020).
[0203] 27. Moore, M. J. et al. Retroviruses Pseudotyped with the Severe Acute Respiratory Syndrome Coronavirus Spike Protein Efficiently Infect Cells Expressing Angiotensin-Converting Enzyme 2.J. Virol. 78, 10628-10635 (2004).
[0204] 28. Gentili, M. et al. Transmission of innate immune signaling by packaging of cGAMP in viral particles. Science 349, 1232-1236 (2015).
[0205] 29. Raab, M. et al. ESCRT III repairs nuclear envelope ruptures during cell migration to limit DNA damage and cell death. Science 352, 359-362 (2016).
[0206] 30. Henikoff, S. & Henikoff, J. G. Amino acid substitution matrices from protein blocks. Proc. Natl. Acad. Sci. U.S.A 89, 10915-10919 (1992).
[0207] 31. Cohen, J. (2020). Antibodies may curb pandemic before vaccines. Science 369, 752-753.
[0208] 32. Kirchhofer, A., Helma, J., Schmidthals, K., Frauer, C., Cui, S., Karcher, A., Pellis, M., Muyldermans, S., Casas-Delucchi, C. S., Cardoso, M. C., et al. (2010). Modulation of protein properties in living cells using nanobodies. Nat. Struct. Mol. Biol. 17, 133-139.

[0209] Various modifications and variations of the described methods, pharmaceutical compositions, and kits of the invention will be apparent to those skilled in the art without departing from the scope and spirit of the invention. Although the invention has been described in connection with specific embodiments, it will be understood that it is capable of further modifications and that the invention as claimed should not be unduly limited to such specific embodiments. Indeed, various modifications of the described modes for carrying out the invention that are obvious to those skilled in the art are intended to be within the scope of the invention. This application is intended to cover any variations, uses, or adaptations of the invention following, in general, the principles of the invention and including such departures from the present disclosure come within known customary practice within the art to which the invention pertains and may be applied to the essential features hereinbefore set forth.

1. An antibody or antigen binding fragment comprising one or more complementarity-determining regions (CDRs) selected or derived from any cluster or CDRs in any of Tables 1-9, preferably,
wherein the CDRs are selected or derived from the SR1, SR2, SR4, SR6, SR8, SR12, SR15, SR18, SR25, SR30 or SR38 cluster families; or
wherein the antibody or antigen binding fragment comprises CDRs from SR6v15, SR6v7, SR38, SR6c3, SR4t13, or SR2c3.

2-3. (canceled)

4. The antibody or antigen binding fragment of claim 1, wherein the antibody or antigen binding fragment is a heavy chain antibody or variable domain of the heavy chain (VHH), preferably,
wherein the heavy chain antibody or variable domain of the heavy chain (VHH) is SR38 and binds to a N501Y SARS-CoV-2 variant; or
wherein the heavy chain antibody or variable domain of the heavy chain (VHH) is SR6v15; or
wherein the heavy chain antibody or variable domain of the heavy chain (VHH) is a dimer of SR6v15; or
wherein the heavy chain antibody or variable domain of the heavy chain (VHH) is SR6v7.

5-8. (canceled)

9. The antibody or antigen binding fragment of claim 4, wherein the heavy chain antibody or VHH are derived from camelid heavy chain antibodies, preferably, wherein one or more framework residues in camelid antibodies are humanized, more preferably, wherein the humanized residues are located in one or more positions selected from the group consisting of frame 2 position 4, frame 2 position 11, frame 2 position 12, frame 2 position 14, and frame 4 position 8.

10-11. (canceled)

12. The antibody or antigen binding fragment of claim 1, wherein the antibody or antigen binding fragment is modified to alter binding affinity, stability, in vivo half-life, neutralizing activity and/or dimerization, preferably, wherein the antibody or antigen binding fragment is a fusion protein, more preferably, wherein the antibody or antigen binding fragment is fused to another antibody or antibody fragment, Fc domain, antigen binding domain, glutathione S-transferase (GST), and/or serum albumin.

13-14. (canceled)

15. A method of treating SARS-CoV-2 infection comprising administering to a subject in need thereof the antibody or antigen binding fragment of claim 1, preferably,
wherein the subject is infected with a SARS-CoV-2 variant, more preferably,
wherein SR38 is administered to the subject, more preferably, wherein the subject is infected with a SARS-CoV-2 variant containing the N501Y mutation; or
wherein SR6v15 is administered to the subject; or
wherein a dimer of SR6v15 is administered to the subject.

16-20. (canceled)

21. A method of detecting SARS-CoV-2 comprising contacting a biological sample obtained from a subject with the antibody or antigen binding fragment of claim 1, preferably,
wherein the antibody is SR38 and a variant containing the N501Y mutation is detected; or
wherein the antibody is SR38 and a variant containing the E484K mutation is detected; or
wherein the antibody is SR6v15.

22-24. (canceled)

25. A method of generating a VHH library comprising a VHH template with a randomized CDR1, CDR2 and CDR3 comprising:
a. providing a VHH template;
b. providing a first set of primers capable of amplifying the VHH template from a first CDR sequence to the end of the template, wherein the set of primers comprise:
i. a primer comprising a 5′ randomized sequence corresponding to all or part of the first CDR sequence and a 3′ sequence capable of hybridizing to a non-randomized sequence; and
ii. a hairpin primer capable of hybridizing to one end of the template;
c. providing a second set of primers capable of amplifying the VHH template from the sequence directly adjacent to where the first primer set amplified from to the other end of the template, wherein the set of primers comprise:
i. a primer capable of hybridizing to the sequence directly adjacent to where the first primer set amplified from, optionally, wherein the primer starts within the first CDR sequence and comprises a 5′ randomized sequence corresponding to the remaining first CDR sequence and a 3′ sequence capable of hybridizing to a non-randomized sequence; and
ii. a hairpin primer capable of hybridizing to the other end of the template;
d. PCR amplifying the VHH template with the first and second sets of primers to generate two single-end blocked PCR products corresponding to the entire VHH template;
e. ligating the two PCR products;
f. repeating steps (a) to (e) for the second CDR sequence, wherein the randomized VHH ligation product obtained in step (e) is used as the template, whereby a VHH template randomized for two CDRs is obtained; and
g. repeating steps (a) to (e) for the third CDR sequence, wherein the randomized VHH ligation product obtained in step (f) is used as the template, whereby a VHH template randomized for all three CDRs is obtained.

26. The method of claim 25, wherein the primer sequences are 5′ NNB randomized, where N is a mixture of A, T, G, C bases, and B is a mixture of G, C, T bases; and/or wherein the primer sequences are 5′ randomized using NNN tri-nucleotide sequence, where N is a mixture of A, T, C, G nucleotides.

27. (canceled)

28. The method of claim 25, wherein step (d) is performed using a DNA polymerase without strand displacement activity or with weak strand displacement activity; and/or
wherein step (d) is performed using an elongation temperature of 65° C.

29. (canceled)

30. The method of claim 25, wherein CDR2 is randomized first; and/or
wherein CDR1 is randomized second; and/or
wherein CDR3 is randomized last and/or
wherein CDR2 encodes for 4 or 5 amino acids; and/or
wherein CDR1 encodes for 4 to 8 amino acids; and/or
wherein CDR3 encodes for 4 to 30 amino acids.

31-35. (canceled)

36. The method of claim 25, wherein the VHH templates comprise a promoter sequence upstream of the VHH template, optionally, wherein the promoter is a T7 promoter.

37. (canceled)

38. The method of claim 25, wherein the VHH templates comprise an epitope tag sequence downstream of and in frame with the VHH template, optionally, wherein the epitope tag comprises one or more myc tags.

39. (canceled)

40. The method of claim 38, further comprising displaying the CDR1 and/or CDR2 randomized library of step (e) or (f) with ribosome display; enriching library members using the epitope tag; and using the enriched DNAs for input in step (g).

41. The method of claim 25, wherein the VHH templates do not include a stop codon.

42. A method of identifying CDRs for generating an antibody or binding fragment of an antibody specific to an antigen of interest comprising:
a. providing a linear DNA library, wherein each sequence in the library encodes for an antibody framework comprising three CDRs and operably linked to a 5′ promoter sequence, and wherein at least one CDR is randomized;
b. performing ribosome display on the linear DNA library, whereby mRNAs transcribed from the linear DNA library are translated to an antibody protein that is tethered to the ribosome ribonucleoprotein complex;
c. binding the ribonucleoprotein complexes to an immobilized antigen of interest;
d. performing reverse transcription PCR (RT-PCR) on mRNA extracted from ribonucleoprotein complexes bound to the immobilized antigen, whereby cDNA is generated;
e. optionally, repeating steps (b) to (d) using the cDNA from the bound ribonucleoprotein complexes as the linear DNA input;
f. sequencing the cDNAs to obtain antibody sequences; and
g. clustering the antibody sequences based on similarity of their CDRs to identify distinct antibody clusters containing CDRs specific to the antigen of interest.

43. The method of claim 42, wherein all three CDRs are randomized.

44. The method of claim 42, wherein the CDRs are encoded by DNA oligos with 5′ NNB or NNN randomized sequences, where N is a mixture of A, T, G, C bases, and B is a mixture of G, C, T bases; and/or
wherein step (c) is performed in solutions containing Mg²⁺ ions at concentrations of 5 mM or less; and/or
wherein step (d) is performed using a mixture of two DNA polymerases in the PCR reaction, wherein one type is a DNA polymerase without strand displacement activity or with weak strand displacement activity and the other type is a DNA polymerase with strong strand displacement activity; and/or
wherein steps (b) to (d) are performed for three rounds.

45-47. (canceled)

48. The method of claim 42, further comprising identifying amino acid substitutions that will increase antibody binding and/or viral neutralization activity, said method comprising:
h. introducing random mutations across the full length of one or more identified antibody frameworks using error prone PCR to obtain a mutated linear DNA library;
i. repeating steps (b) to (d) for 1 to 3 rounds using the linear DNA library obtained in step (h) as the linear DNA library;
j. sequencing the linear DNA library in (h) and the cDNA obtained in (i);
k. calculating the percentage of each proteinogenic amino acid found at each antibody framework amino acid position among all sequenced antibody frameworks obtained from (h) and (i);
l. identifying amino acids at each position with increased percentage in (i) as compared to in sequences from (h); and
m. replacing the amino acids at said positions in the antibody framework with the identified amino acids.

49. The method of claim 42, wherein step (c) is performed using a binding time of less than 1 minute; and/or
wherein CDRs are selected from one or more of the clusters having the largest number of members; and/or
wherein the antibody frameworks are heavy chain antibody variable domains (VHHs), optionally, wherein the VHHs are camelid VHHs.

50-52. (canceled)

53. The method of claim 42, wherein the linear DNA library in step (a) is obtained according to a method comprising:
a. providing a VHH template;
b. providing a first set of primers capable of amplifying the VHH template from a first CDR sequence to the end of the template, wherein the set of primers comprise:
i. a primer comprising a 5′ randomized sequence corresponding to all or part of the first CDR sequence and a 3′ sequence capable of hybridizing to a non-randomized sequence; and
ii. a hairpin primer capable of hybridizing to one end of the template;
c. providing a second set of primers capable of amplifying the VHH template from the sequence directly adjacent to where the first primer set amplified from to the other end of the template, wherein the set of primers comprise:
i. a primer capable of hybridizing to the sequence directly adjacent to where the first primer set amplified from, optionally, wherein the primer starts within the first CDR sequence and comprises a 5′ randomized sequence corresponding to the remaining first CDR sequence and a 3′ sequence capable of hybridizing to a non-randomized sequence; and
ii. a hairpin primer capable of hybridizing to the other end of the template;
d. PCR amplifying the VHH template with the first and second sets of primers to generate two single-end blocked PCR products corresponding to the entire VHH template;
e. ligating the two PCR products;
f. repeating steps (a) to (e) for the second CDR sequence, wherein the randomized VHH ligation product obtained in step (e) is used as the template, whereby a VHH template randomized for two CDRs is obtained; and
g. repeating steps (a) to (e) for the third CDR sequence, wherein the randomized VHH ligation product obtained in step (f) is used as the template, whereby a VHH template randomized for all three CDRs is obtained.

54. The method of claim 42, further comprising validating at least one member of a cluster or VHH sequence with amino acid substitutions by expressing the antibody framework and determining binding to the antigen of interest; and/or
wherein the antigen of interest is associated with a viral pathogen and the antibody framework is tested for neutralizing activity; and/or
further comprising transferring one or more of the CDRs to a different antibody framework; and/or
further comprising synthesizing one or more sequences from each antibody cluster for cloning of the antibody genes and testing the antibody proteins.

55-57. (canceled)

The application's sequence listing, which the Patent Office published only in electronic form, follows.

SEQUENCE LISTING (15177 sequences)

SEQ ID NO: 1 - protein, 7 aa, Artificial Sequence
  Synthetic
KTGRSVI

SEQ ID NO: 2 - protein, 5 aa, Artificial Sequence
  Synthetic
RGDDT

SEQ ID NO: 3 - protein, 9 aa, Artificial Sequence
  Synthetic
VYFVNDCIV

SEQ ID NO: 4 - protein, 120 aa, Artificial Sequence
  Synthetic
EVQLVESGGGLVQAGDSLRLSCAASGKTGRSVIMGWFRQAPGKEREFVATITRGDDTTNYADSVKGRFTISRDDARNTVYLQMNSLKPEDTAVYYCAAVYFVNDCIVDYWGQGTQVTVSS

SEQ ID NO: 5 - DNA, 405 bp, Artificial Sequence
  Synthetic
ataccatggaagttcaactggttgaatctggtggcggtttagttcaagccggtgatagccttcgtctgagctgcgccgcaagcggaaagaccggtcggagcgtcattatgggttggtttcgccaggcacctggtaaagaacgtgaatttgtggcaaccattacccgcggggatgacactaccaactatgccgattctgttaaaggtcgcttcactatttcacgcgatgatgcgcgtaataccgtgtacttacagatgaactcactgaaacctgaggataccgccgtttattattgtgcggcagtctattttgtcaacgactgcattgttgactattggggtcagggcacacaagtcacggtctcaagcggcggaagctctggtgaacagaaactgatttcagaag

SEQ ID NO: 6 - protein, 7 aa, Artificial Sequence
  Synthetic
KTGRSVI

SEQ ID NO: 7 - protein, 5 aa, Artificial Sequence
  Synthetic
RGDDT

SEQ ID NO: 8 - protein, 10 aa, Artificial Sequence
  Synthetic
IVLLTNLGLC

SEQ ID NO: 9 - protein, 121 aa, Artificial Sequence
  Synthetic
EVQLVESGGGLVQAGDSLRLSCAASGKTGRSVIMGWFRQAPGKEREFVATITRGDDTTNYADSVKGRFTISRDDARNTVYLQMNSLKPEDTAVYYCARIVLLTNLGLCDYWGQGTQVTVSS

SEQ ID NO: 10 - DNA, 412 bp, Artificial Sequence
  Synthetic
agatataccatggaagttcaactggttgaatctggtggcggtttagttcaagccggtgatagccttcgtctgagctgcgccgcaagcggaaagaccggtcggagcgtcattatgggttggtttcgccaggcacctggtaaagaacgtgaatttgtggcaaccattacccgcggggatgacactaccaactatgccgattctgttaaaggtcgcttcactatttcacgcgatgatgcgcgtaataccgtgtacttacagatgaactcactgaaacctgaggataccgccgtttattattgtgcgcgtattgtgctcctgactaaccttggcctctgcgactattggggtcagggcacacaagtcacggtctcaagcggcggaagctctggtgaacagaaactgatttcagaag

SEQ ID NO: 11 - protein, 7 aa, Artificial Sequence
  Synthetic
KTGRSVI

SEQ ID NO: 12 - protein, 5 aa, Artificial Sequence
  Synthetic
RGDDT

SEQ ID NO: 13 - protein, 9 aa, Artificial Sequence
  Synthetic
VYFVNDCIV

SEQ ID NO: 14 - protein, 120 aa, Artificial Sequence
  Synthetic
EVQLVESGGGLVQAGDSLRLSCAASGKTGRSVIMGWFRQAPDKEREFVATITRGDDTTNYADSVKGRFTISRDDARNTVYLQMNSLKPEDTAVYYCAAVYFVNDCIVDYWGQGTQVTVSS

SEQ ID NO: 15 - DNA, 403 bp, Artificial Sequence
  Synthetic
accatggaagttcaactggttgaatctggtggcggtttagttcaagccggtgatagccttcgtctgagctgcgccgcaagcggaaagaccggtcggagcgtcattatgggttggtttcgccaggcacctgataaagaacgtgaatttgtggcaaccattacccgcggggatgacactaccaactatgccgattctgttaaaggtcgcttcactatttcacgcgatgatgcgcgtaataccgtgtacttacagatgaactcactgaaacctgaggataccgccgtttattattgtgcggcagtctattttgtcaacgactgcattgttgactattggggtcagggcacacaagtcacggtctcaagcggcggaagctctggtgaacagaaactgatttcagaag

SEQ ID NO: 16 - protein, 7 aa, Artificial Sequence
  Synthetic
KTGRSVI

SEQ ID NO: 17 - protein, 5 aa, Artificial Sequence
  Synthetic
RGDDT

SEQ ID NO: 18 - protein, 9 aa, Artificial Sequence
  Synthetic
VYFVNDCIV

SEQ ID NO: 19 - protein, 120 aa, Artificial Sequence
  Synthetic
EVQLVESGGGLVQAGDSLRLSCAASGKTGRSVIMGWFRQAPGKEREFVATITRGDDTTNYADSVKGRFTISRDDARNTVYLQMNSLKPEDTAVYYCAAVYFVNDCIVAYWGQGTQVTVSS

SEQ ID NO: 20 - DNA, 407 bp, Artificial Sequence
  Synthetic
atataccatggaagttcaactggttgaatctggtggcggtttagttcaagccggtgatagccttcgtctgagctgcgccgcaagcggaaagaccggtcggagcgtcattatgggttggtttcgccaggcacctggtaaagaacgtgaatttgtggcaaccattacccgcggggatgacactaccaactatgccgattctgttaaaggtcgcttcactatttcacgcgatgatgcgcgtaataccgtgtacttacagatgaactcactgaaacctgaggataccgccgtttattattgtgcggcagtctattttgtcaacgactgcattgttgcctattggggtcagggcacacaagtcacggtctcaagcggcggaagctctggtgaacagaaactgatttcagaag

SEQ ID NO: 21 - protein, 7 aa, Artificial Sequence
  Synthetic
KTGRSVI

SEQ ID NO: 22 - protein, 5 aa, Artificial Sequence
  Synthetic
RGDDT

SEQ ID NO: 23 - protein, 9 aa, Artificial Sequence
  Synthetic
VYFVNDCIV

SEQ ID NO: 24 - protein, 120 aa, Artificial Sequence
  Synthetic
EVQLVESGGGLVQAGDSLRLSCAASGKTGRSVIMGWFRQAPGKEREFVATITRGDDTTNYADSVKGRLTISRDDARNTVYLQMNSLKPEDTAVYYCAAVYFVNDCIVDYWGQGTQVTVSS

SEQ ID NO: 25 - DNA, 409 bp, Artificial Sequence
  Synthetic
agatataccatggaagttcaactggttgaatctggtggcggtttagttcaagccggtgatagccttcgtctgagctgcgccgcaagcggaaagaccggtcggagcgtcattatgggttggtttcgccaggcacctggtaaagaacgtgaatttgtggcaaccattacccgcggggatgacactaccaactatgccgattctgttaaaggtcgcctcactatttcacgcgatgatgcgcgtaataccgtgtacttacagatgaactcactgaaacctgaggataccgccgtttattattgtgcggcagtctattttgtcaacgactgcattgttgactattggggtcagggcacacaagtcacggtctcaagcggcggaagctctggtgaacagaaactgatttcagaag

SEQ ID NO: 26 - protein, 7 aa, Artificial Sequence
  Synthetic
KTGRSVI

SEQ ID NO: 27 - protein, 5 aa, Artificial Sequence
  Synthetic
RGDDT

SEQ ID NO: 28 - protein, 9 aa, Artificial Sequence
  Synthetic
VYFVNDCIV

SEQ ID NO: 29 - protein, 120 aa, Artificial Sequence
  Synthetic
EVQLVESGGGLVQAGDSLRLSCAASGKTGRSVIMGWFRQAPGKEREFVATITRGDDTTNYVDSVKGRFTISRDDARNTVYLQMNSLKPEDTAVYYCAAVYFVNDCIVDYWGQGTQVTVSS

SEQ ID NO: 30 - DNA, 411 bp, Artificial Sequence
  Synthetic
ggagatataccatggaagttcaactggttgaatctggtggcggtttagttcaagccggtgatagccttcgtctgagctgcgccgcaagcggaaagaccggtcggagcgtcattatgggttggtttcgccaggcacctggtaaagaacgtgaatttgtggcaaccattacccgcggggatgacactaccaactatgtcgattctgttaaaggtcgcttcactatttcacgcgatgatgcgcgtaataccgtgtacttacagatgaactcactgaaacctgaggataccgccgtttattattgtgcggcagtctattttgtcaacgactgcattgttgactattggggtcagggcacacaagtcacggtctcaagcggcggaagctctggtgaacagaaactgatttcagaag

SEQ ID NO: 31 - protein, 7 aa, Artificial Sequence
  Synthetic
KTGRSVI

SEQ ID NO: 32 - protein, 5 aa, Artificial Sequence
  Synthetic
RGDDT

SEQ ID NO: 33 - protein, 9 aa, Artificial Sequence
  Synthetic
VYFVNDCIV

SEQ ID NO: 34 - protein, 120 aa, Artificial Sequence
  Synthetic
EVQLVESGGGLVQAGDSLRLSCAASGKTGRSVIMGWFRQAPGKEREFVATITRGDDTTNYADSVKGRFTISRDDARNTVYLQMNTLKPEDTAVYYCAAVYFVNDCIVDDWGQGTQVTVSS

SEQ ID NO: 35 - DNA, 405 bp, Artificial Sequence
  Synthetic
ataccatggaagttcaactggttgaatctggtggcggtttagttcaagccggtgatagccttcgtctgagctgcgccgcaagcggaaagaccggtcggagcgtcattatgggttggtttcgccaggcacctggtaaagaacgtgaatttgtggcaaccattacccgcggggatgacactaccaactatgccgattctgttaaaggtcgcttcactatttcacgcgatgatgcgcgtaataccgtgtacttacagatgaacacactgaaacctgaggataccgccgtttattattgtgcggcagtctattttgtcaacgactgcattgttgacgattggggtcagggcacacaagtcacggtctcaagcggcggaagctctgatgaacagaaacggatttcagaag

SEQ ID NO: 36 - protein, 7 aa, Artificial Sequence
  Synthetic
KTGRSVI

SEQ ID NO: 37 - protein, 5 aa, Artificial Sequence
  Synthetic
RGDDT

SEQ ID NO: 38 - protein, 9 aa, Artificial Sequence
  Synthetic
VYFVNDCIV

SEQ ID NO: 39 - protein, 120 aa, Artificial Sequence
  Synthetic
EVQLFESGGGLVQAGDSLRLSCAASGKTGRSVIMGWFRQAPGKEREFVATITRGDDTTNYADSVKGRFTISRDDARNTVYLQMNSLKPEDTAVYYCAAVYFVNDCIVDYWGQGTQVTVSS

SEQ ID NO: 40 - DNA, 407 bp, Artificial Sequence
  Synthetic
atataccatggaagttcaactgtttgaatctggtggcggtttagttcaagccggtgatagccttcgtctgagctgcgccgcaagcggaaagaccggtcggagcgtcattatgggttggtttcgccaggcacctggtaaagaacgtgaatttgtggcaaccattacccgcggggatgacactaccaactatgccgattctgttaaaggtcgcttcactatttcacgcgatgatgcgcgtaataccgtgtacttacagatgaactcactgaaacctgaggataccgccgtttattattgtgcggcagtctattttgtcaacgactgcattgttgactattggggtcagggcacacaagtcacggtctcaagcggcggaagctctggtgaacagaaactgatttcagaag

SEQ ID NO: 41 - protein, 7 aa, Artificial Sequence
  Synthetic
KTGRSVI

SEQ ID NO: 42 - protein, 5 aa, Artificial Sequence
  Synthetic
RGDDT

SEQ ID NO: 43 - protein, 9 aa, Artificial Sequence
  Synthetic
VYFVNDCIV

SEQ ID NO: 44 - protein, 120 aa, Artificial Sequence
  Synthetic
EVQLVESGGGLVQAGDSLRLSCAASGKTGRSVIMGWFRQAPGKEREFVATITRGDDTTNYADSVKGRFTISRDDARNTVYLQMNSLKPEDTAVYYCAAVYFVNDCIVEYGGQGTQVTVAS

SEQ ID NO: 45 - DNA, 405 bp, Artificial Sequence
  Synthetic
ataccatggaagttcaactggttgaatctggtggcggtttagttcaagccggtgatagccttcgtctgagctgcgccgcaagcggaaagaccggtcggagcgtcattatgggttggtttcgccaggcacctggtaaagaacgtgaatttgtggcaaccattacccgcggggatgacactaccaactatgccgattctgttaaaggtcgcttcactatttcacgcgatgatgcgcgtaataccgtgtacttacagatgaactcactgaaacctgaggataccgccgtttattattgtgcggcagtctattttgtcaacgactgcattgttgaatatgggggtcagggcacacaagtcacggtcgcaagcggcggaagctctggtgaacagaaactgatttcagaag

SEQ ID NO: 46 - protein, 7 aa, Artificial Sequence
  Synthetic
KTGRSVI

SEQ ID NO: 47 - protein, 5 aa, Artificial Sequence
  Synthetic
RGDDT

SEQ ID NO: 48 - protein, 9 aa, Artificial Sequence
  Synthetic
VYFVNDCIV

SEQ ID NO: 49 - protein, 120 aa, Artificial Sequence
  Synthetic
EVQLVEPGGGLVQAGDSLRLSCAASGKTGRSVIMGWFRQAPGKEREFAATITRGDDTTNYADSVKGRFTISRDDARNTVYLQMNSLKPEDTAVYYCAAVYFVNDCIVDYWGQGTQVTVSS

SEQ ID NO: 50 - DNA, 407 bp, Artificial Sequence
  Synthetic
atataccatggaagttcaactggttgaacctggtggcggtttagttcaagccggtgatagccttcgtctgagctgcgccgcaagcggaaagaccggtcggagcgtcattatgggttggtttcgccaggcacctggcaaagaacgtgaatttgcggcaaccattacccgcggggatgacactaccaactatgccgattctgttaaaggtcgcttcactatttcacgcgatgatgcgcgtaataccgtgtacttacagatgaactcactgaaacctgaggataccgccgtttattattgtgcggcagtctattttgtcaacgactgcattgttgactattggggtcagggcacacaagtcacggtctcaagcggcggaagctctggtgaacagaaactgatttcagaag

SEQ ID NO: 51 - protein, 7 aa, Artificial Sequence
  Synthetic
KTGRSVI

SEQ ID NO: 52 - protein, 5 aa, Artificial Sequence
  Synthetic
RGDET

SEQ ID NO: 53 - protein, 9 aa, Artificial Sequence
  Synthetic
VYFVNDCIV

SEQ ID NO: 54 - protein, 120 aa, Artificial Sequence
  Synthetic
EVQLVESGGDLIQDGDSLRLSCAASGKTGRSVIMGWFRQAPGKEREFAATITRGDETTNYADSVKGRFTISRDDARNTVYLQMNSLKPEDTAVYYCAAVYFVNDCIVDYWCQGTQVTVSR

SEQ ID NO: 55 - DNA, 407 bp, Artificial Sequence
  Synthetic
atataccatggaagttcaactggttgaatctggtggcgatttaattcaagacggtgatagccttcgtctgagctgcgccgcaagcggaaagaccggtcggagcgtcattatgggttggtttcgccaggcacctggcaaagaacgtgaatttgcggcaaccattacccgcggggatgaaactaccaactatgccgattctgttaaaggtcgcttcactatttcacgcgatgatgcgcgtaataccgtgtacttacagatgaactcactgaaacctgaggataccgccgtttattattgtgcggcagtctattttgtcaacgactgcattgttgactattggtgtcagggcacacaagtcacggtctcacgcggcggaagctcttttgaacagaaactgatttcagaag

SEQ ID NO: 56 - protein, 7 aa, Artificial Sequence
  Synthetic
KTGRSVI

SEQ ID NO: 57 - protein, 5 aa, Artificial Sequence
  Synthetic
RGDDT

SEQ ID NO: 58 - protein, 9 aa, Artificial Sequence
  Synthetic
VYFVNDCIV

SEQ ID NO: 59 - protein, 120 aa, Artificial Sequence
  Synthetic
EVQLVESGGGLVQAGDSLRLRCAASGKTGRSVIMGWFRQAPGKEREFVATITRGDDTTNYADSVKSRFTISRDDARNTVYLQMNSLKPEDTAVYYCAAVYFVNDCIVDYWCQGTQVTVSS

SEQ ID NO: 60 - DNA, 403 bp, Artificial Sequence
  Synthetic
accatggaagttcaactggttgaatctggtggcggtttagttcaagccggtgatagccttcgtctgagatgcgccgcaagcggaaagaccggtcggagcgtcattatgggttggtttcgccaggcacctggtaaagaacgtgaatttgtggcaaccattacccgcggggatgacactaccaactatgccgattctgttaaaagtcgcttcactatttcacgcgatgatgcgcgtaataccgtgtacttacagatgaactcactgaaacctgaggataccgccgtttattattgtgcggcagtctattttgtcaacgactgcattgttgactattggtgtcagggcacacaagtcacggtctcaagcggcggaagctcttttgaacagacactgatttcagaag

SEQ ID NO: 61 - protein, 7 aa, Artificial Sequence
  Synthetic
IGERCLF

SEQ ID NO: 62 - protein, 5 aa, Artificial Sequence
  Synthetic
AFSFR

SEQ ID NO: 63 - protein, 9 aa, Artificial Sequence
  Synthetic
VYFVNDCIV

SEQ ID NO: 64 - protein, 120 aa, Artificial Sequence
  Synthetic
EVQLVESGGGLVQAGDSLRLSCAASGIGERCLFMGWFRQAPGKEREFVAAITAFSFRTYYADSVKGRFTISRDDARNTVYLQMNSLKPEDTAVYYCAAVYFVNDCIVDYWGQGTQVTVSS

SEQ ID NO: 65 - DNA, 411 bp, Artificial Sequence
  Synthetic
ggagatataccatggaagttcaactggttgaatctggtggcggtttagttcaagccggtgatagccttcgtctgagctgcgccgcaagcggaatcggcgagcgttgtttgtttatgggttggtttcgccaggcacctggtaaagaacgtgaatttgtggcagccattaccgcgtttagttttcggacctactatgccgattctgttaaaggtcgcttcactatttcacgcgatgatgcgcgtaataccgtgtacttacagatgaactcactgaaacctgaggataccgccgtttattattgtgcggcagtctattttgtcaacgactgcattgttgactattggggtcagggcacacaagtcacggtctcaagcggcggaagctctggtgaacagaaactgatttcagaag

SEQ ID NO: 66 - protein, 7 aa, Artificial Sequence
  Synthetic
KTGRSVI

SEQ ID NO: 67 - protein, 5 aa, Artificial Sequence
  Synthetic
RGDDT

SEQ ID NO: 68 - protein, 10 aa, Artificial Sequence
  Synthetic
IVLLTNLGLC

SEQ ID NO: 69 - protein, 121 aa, Artificial Sequence
  Synthetic
EVQLVESGGGLVQAGDSLRLSCAASGKTGRSVIMGWFRQAPGKEREFVATITRGDDTTNYADSVKGRFTISRDDARNTVYLQMNSLKPEDTAVYYCARIVLLTNLGLCDYWGQGTQVTVSR

SEQ ID NO: 70 - DNA, 417 bp, Artificial Sequence
  Synthetic
gaaggagatataccatggaagttcaactggttgaatctggtggcggtttagttcaagccggtgatagccttcgtctgagctgtgccgcaagcggaaagaccggtcggagcgtcattatgggttggtttcgccaggcacctggtaaagaacgtgaatttgtggcaaccattacccgcggggatgacactaccaactatgccgattctgttaaaggtcgcttcactatttcacgcgatgatgcgcgtaataccgtgtacttacagatgaactcactgaaacctgaggataccgccgtttattattgtgcgcgtattgtgctcctgactaaccttggcctctgcgactattggggtcagggcacacaagtcacggtctcacgcggcggaagctctggtgaacagaaactgatttcagaag

SEQ ID NO: 71 - protein, 7 aa, Artificial Sequence
  Synthetic
KTGRSVI

SEQ ID NO: 72 - protein, 5 aa, Artificial Sequence
  Synthetic
RGDDT

SEQ ID NO: 73 - protein, 9 aa, Artificial Sequence
  Synthetic
VYFVNDCIV

SEQ ID NO: 74 - protein, 120 aa, Artificial Sequence
  Synthetic
EVQLVESGGGLVQASDSLRLSCAASGKTGRSVIMGWFRQAPGKEREFVATITRGDDTTNYADSVKGRFTISRDDARNTVYLQMNSLKPEDTAVYYCAAVYFVNDCIVDYWGQGTQVTVSS

SEQ ID NO: 75 - DNA, 407 bp, Artificial Sequence
  Synthetic
atataccatggaagttcaactggttgaatctggtggcggtttagttcaagccagtgatagccttcgtctgagctgcgccgcaagcggaaagaccggtcggagcgtcattatgggttggtttcgccaggcacctggtaaagaacgtgaatttgtggcaaccattacccgcggggatgacactaccaactatgccgattctgttaaaggtcgcttcactatttcacgcgatgatgcgcgtaataccgtgtacttacagatgaactcactgaaacctgaggataccgccgtttattattgtgcggcagtctattttgtcaacgactgcattgttgactattggggtcagggcacacaagtcacggtctcaagcggcggaagctctggtgaacagaaactgatttcagaag

SEQ ID NO: 76 - protein, 7 aa, Artificial Sequence
  Synthetic
KTGRSVI

SEQ ID NO: 77 - protein, 5 aa, Artificial Sequence
  Synthetic
RGDDT

SEQ ID NO: 78 - protein, 9 aa, Artificial Sequence
  Synthetic
VYFVNDCIV

SEQ ID NO: 79 - protein, 120 aa, Artificial Sequence
  Synthetic
EVQLVESGGGLVQAGDSLRLSCAASGKTGRSVIMGWFRQAPGKEREFVATITRGDDTTNYADSVKSRFTISRDDARNTVYLQMNSLKPEDTAVYYCAAVYFVNDCIVDYWGQGTQVTVSS

SEQ ID NO: 80 - DNA, 409 bp, Artificial Sequence
  Synthetic
agatataccatggaagttcaactggttgaatctggtggcggtttagttcaagccggtgatagccttcgtctgagctgcgccgcaagcggaaagaccggtcggagcgtcattatgggttggtttcgccaggcacctggtaaagaacgtgaatttgtggcaaccattacccgcggggatgacactaccaactatgccgattctgttaaaagtcgcttcactatttcacgcgatgatgcgcgtaataccgtgtacttacagatgaactcactgaaacctgaggataccgccgtttattattgtgcggcagtctattttgtcaacgactgcattgttgactattggggtcagggcacacaagtcacggtctcaagcggcggaagctctggtgaacagaaactgatttcagaag

SEQ ID NO: 81 - protein, 7 aa, Artificial Sequence
  Synthetic
KTGRSVI

SEQ ID NO: 82 - protein, 5 aa, Artificial Sequence
  Synthetic
RGDDT

SEQ ID NO: 83 - protein, 9 aa, Artificial Sequence
  Synthetic
VYFVNDCIV

SEQ ID NO: 84 - protein, 120 aa, Artificial Sequence
  Synthetic
KVQLVESGGGLVQAGDSLRLSCAASGKTGRSVIMGWFRQAPGKEREFVATITRGDDTTNYADSVKGRFTISRDDARNTVYLQMNSLKPEDTAVYYCAAVYFVNDCIVDYWGQGTQVTVSS

SEQ ID NO: 85 - DNA, 407 bp, Artificial Sequence
  Synthetic
atataccatgaaagttcaactggttgaatctggtggcggtttagttcaagccggtgatagccttcgtctgagctgcgccgcaagcggaaagaccggtcggagcgtcattatgggttggtttcgccaggcacctggtaaagaacgtgaatttgtggcaaccattacccgcggggatgacactaccaactatgccgattctgttaaaggtcgcttcactatttcacgcgatgatgcgcgtaataccgtgtacttacagatgaactcactgaaacctgaggataccgccgtttattattgtgcggcagtctattttgtcaacgactgcattgttgactattggggtcagggcacacaagtcacggtctcaagcggcggaagctctggtgaacagaaactgatttcagaag

SEQ ID NO: 86 - protein, 7 aa, Artificial Sequence
  Synthetic
KTGRSVI

SEQ ID NO: 87 - protein, 5 aa, Artificial Sequence
  Synthetic
RGDDT

SEQ ID NO: 88 - protein, 9 aa, Artificial Sequence
  Synthetic
VYFVNDCIV

SEQ ID NO: 89 - protein, 120 aa, Artificial Sequence
  Synthetic
EVQLVESGGGLVQAGDSLRLSCAASGKTGRSVIMGWFRQAPGKEREFVATITRGDDTTNYADSVKGRFTISRDDACNTVYLQMNSLKPEDTAVYYCAAVYFVNDCIVDYWGQGTQVTVSS

SEQ ID NO: 90 - DNA, 405 bp, Artificial Sequence
  Synthetic
ataccatggaagttcaactggttgaatctggtggcggtttagttcaagccggtgatagccttcgtctgagctgcgccgcaagcggaaagaccggtcggagcgtcattatgggttggtttcgccaggcacctggtaaagaacgtgaatttgtggcaaccattacccgcggggatgacactaccaactatgccgattctgttaaaggtcgcttcactatttcacgcgatgatgcgtgtaataccgtgtacttacagatgaactcactgaaacctgaggataccgccgtttattattgtgcggcagtctattttgtcaacgactgcattgttgactattggggtcagggcacacaagtcacggtctcaagcggcggaagctctggtgaacagaaactgatttcagaag

SEQ ID NO: 91 - protein, 7 aa, Artificial Sequence
  Synthetic
KTGRSVI

SEQ ID NO: 92 - protein, 5 aa, Artificial Sequence
  Synthetic
RGDDT

SEQ ID NO: 93 - protein, 9 aa, Artificial Sequence
  Synthetic
VYFVNDCIV

SEQ ID NO: 94 - protein, 120 aa, Artificial Sequence
  Synthetic
EVQLFESGGGLVQAGDSLRLSCAASGKTGRSVIMGWFRQAPGKEREFVAPITRGDDTTNYADSVKGRFTISRDDARNTVYLQMNSLKPEDTAVYYCAAVYFVNDCIVDYWGQGTQVTVSS

SEQ ID NO: 95 - DNA, 407 bp, Artificial Sequence
  Synthetic
atataccatggaagttcaactgtttgaatctggtggcggtttagttcaagccggtgatagccttcgtctgagctgcgccgcaagcggaaagaccggtaggagcgtcattatgggttggtttcgccaggcacctggtaaagaacgtgaatttgtggcacccattacccgcggggatgacactaccaactatgccgattctgttaaaggtcgcttcactatttcacgcgatgatgcgcgtaataccgtgtacttacagatgaactcactgaaacctgaggataccgccgtttattattgtgcggcagtctattttgtcaacgactgcattgttgactattggggtcagggcacacaagtcacggtctcaagcggcggaagctctggtgaacagaaactgatttcagaag

SEQ ID NO: 96 - protein, 7 aa, Artificial Sequence
  Synthetic
KTGRSVI

SEQ ID NO: 97 - protein, 5 aa, Artificial Sequence
  Synthetic
RGDDT

SEQ ID NO: 98 - protein, 9 aa, Artificial Sequence
  Synthetic
VYFVNDCIV

SEQ ID NO: 99 - protein, 120 aa, Artificial Sequence
  Synthetic
EVQLVESGGGLVQAGDNLRLSCVASGKTGRSVIMGWFRQAPGKEREFVATITRGDDTTNYADSVKGRFTISRDDARNTVYLQMNSLKPEDTAVYYCAAVYFVNDCIVDYWGQGTQVTVSS

SEQ ID NO: 100 - DNA, 412 bp, Artificial Sequence
  Synthetic
aggagatataccatggaagttcaactggttgaatctggtggcggtttagttcaagccggtgataaccttcgtctgagctgcgtcgcaagcggaaagaccggtcggagcgtcattatgggttggtttcgccaggcacctggtaaagaacgtgaatttgtggcaaccattacccgcggggatgacactaccaactatgccgattctgttaaaggtcgcttcactatttcacgcgatgatgcgcgtaataccgtgtacttacagatgaactcactgaaacctgaggataccgccgtttattattgtgcggcagtctattttgtcaacgactgcattgttgactattggggtcagggcacacaagtcacggtctcaagcggcggaagctctggtgaacagaaactgatttcagaag

SEQ ID NO: 101 - protein, 7 aa, Artificial Sequence
  Synthetic
KTGRSVI

SEQ ID NO: 102 - protein, 5 aa, Artificial Sequence
  Synthetic
RGDDT

SEQ ID NO: 103 - protein, 9 aa, Artificial Sequence
  Synthetic
VYFVNDCIV

SEQ ID NO: 104 - protein, 120 aa, Artificial Sequence
  Synthetic
EVQLVESGGGLVQAGDSLRLSCAASGKTGRSVIMGWFRQAPGKEREFVATLTRGDDTTNYADSVKGRFTISRDDARNTVYLQMNSLKPEDTAVYYCAAVYFVNDCIVDYWGQGTQVTVSS

SEQ ID NO: 105 - DNA, 403 bp, Artificial Sequence
  Synthetic
accatggaagttcaactggttgaatctggtggcggtttagttcaagccggtgatagccttcgtctgagctgcgccgcaagcggaaagaccggtcggagcgtcattatgggttggtttcgccaggcacctggtaaagaacgtgaatttgtggcaacccttacccgcggggatgacactaccaactatgccgattctgttaaaggtcgcttcactatttcacgcgatgatgcgcgtaataccgtgtacttacagatgaactcactgaaacctgaggataccgccgtttattattgtgcggcagtctattttgtcaacgactgcattgttgactattggggtcagggcacacaagtcacggtctcaagcggcggaagctctggtgaacagaaactgatttcagaag

SEQ ID NO: 106 - protein, 7 aa, Artificial Sequence
  Synthetic
KTGRSVI

SEQ ID NO: 107 - protein, 5 aa, Artificial Sequence
  Synthetic
RGDDT

SEQ ID NO: 108 - protein, 9 aa, Artificial Sequence
  Synthetic
VYFVNDCIV

SEQ ID NO: 109 - protein, 120 aa, Artificial Sequence
  Synthetic
EVQLVESGGGLVQAGDSLRLSCAARGKTGRSVIMGWFRQAPGKERELVATITRGDDTTNYADSVKGRFTISRDEARNTVYLQMNSLKPEDTAVYYCAAVYFVNDCIVAYWGQGTQVTVSS

SEQ ID NO: 110 - DNA, 403 bp, Artificial Sequence
  Synthetic
accatggaagttcaactggttgaatctggtggcggtttagttcaagccggtgatagccttcgtctgagctgcgccgcaagaggaaagaccggtcgaagcgtcattatgggttggtttcgccaggcacctggtaaagaacgtgaattggtggcaaccattacccgcggggatgacactaccaactatgccgattctgttaaaggtcgcttcactatttcacgcgatgaggcgcgtaataccgtgtacttacagatgaactcactgaaacctgaggataccgccgtttattattgtgcggcagtctattttgtcaacgactgcattgttgcctattggggccagggcacacaagtcacggtctcaagcggcggaagctctggtgaacagaaactgatttcagaag

SEQ ID NO: 111 - protein, 7 aa, Artificial Sequence
  Synthetic
KTGRSVI

SEQ ID NO: 112 - protein, 5 aa, Artificial Sequence
  Synthetic
RGDDT

SEQ ID NO: 113 - protein, 9 aa, Artificial Sequence
  Synthetic
VYFVNDCIV

SEQ ID NO: 114 - protein, 120 aa, Artificial Sequence
  Synthetic
EVQLVESGGGLVQAGDRLRLSCAASGKTGRSVIMGWFRQAPGKEREFVATITRGDDTTNYADSVKGRFTISRDDARNTVYLQMNSLKPEDTAVYYCAAVYFVNDCIVDYWGQGTQVTVSS

SEQ ID NO: 115 - DNA, 414 bp, Artificial Sequence
  Synthetic
gaaggagatataccatggaagttcaactggttgaatctggtggcggtttagttcaagccggtgatcgccttcgtctgagctgcgccgcaagcggaaagaccggtcggagcgtcattatgggttggtttcgccaggcacctggtaaagaacgtgaatttgtggcaaccattacccgcggggatgacactaccaactatgccgattctgttaaaggtcgcttcactatttcacgcgatgatgcgcgtaataccgtgtacttacagatgaactcactgaaacctgaggataccgccgtttattattgtgcggcagtctattttgtcaacgactgcattgttgactattggggtcagggcacacaagtcacggtctcaagcggcggaagctctggtgaacagaaactgatttcagaag

SEQ ID NO: 116 - protein, 7 aa, Artificial Sequence
  Synthetic
KTGRSVI

SEQ ID NO: 117 - protein, 5 aa, Artificial Sequence
  Synthetic
RGDDT

SEQ ID NO: 118 - protein, 9 aa, Artificial Sequence
  Synthetic
VYFVNDCIV

SEQ ID NO: 119 - protein, 120 aa, Artificial Sequence
  Synthetic
EVQLVESGGGLVHAGDSLRLSCAASGKTGRSVIMGWFRQAPGKEREFVATITRGDDTTNYADSVKGRFTISRDDARNTVYLQMNSLKPEDTAVYYCAAVYFVNDCIVDYWGQGTQVTVSR

SEQ ID NO: 120 - DNA, 414 bp, Artificial Sequence
  Synthetic
gaaggagatataccatggaagttcaactggttgaatctggtggcggtttagttcacgccggtgatagccttcgtctgagctgcgccgcaagcggaaagaccggtcggagcgtcattatgggttggtttcgccaggcacctggtaaagaacgtgaatttgtggcaaccattacccgcggggatgacactaccaactatgccgattctgttaaaggtcgcttcactatttcacgcgatgatgcgcgtaataccgtgtacttacagatgaactcactgaaacctgaggataccgccgtttattattgtgcggcagtctattttgtcaacgactgcattgttgactattggggtcagggcacacaagtcacggtctcacgcggcggaagctcttgtgaacagaaactgatttcagaag

SEQ ID NO: 121 - protein, 7 aa, Artificial Sequence
  Synthetic
KTGRSVI

SEQ ID NO: 122 - protein, 5 aa, Artificial Sequence
  Synthetic
RGDDT

SEQ ID NO: 123 - protein, 10 aa, Artificial Sequence
  Synthetic
IVLLTNLGLC

SEQ ID NO: 124 - protein, 121 aa, Artificial Sequence
  Synthetic
EVQLVESGGGLVQAGDRLRLSCAASGKTGRSVIMGWFRQAPGKEREFVATITRGDDTTNYADSVKGRFTISRDDARNTVYLQMNSLKPEDTAVYYCVRIVLLTNLGLCDYWGQGTQVTVSS

SEQ ID NO: 125 - DNA, 421 bp, Artificial Sequence
  Synthetic
gaaggagatataccatggaagttcaactggttgaatctggtggcggtttagttcaagccggtgatcgccttcgtctgagctgcgccgcaagcggaaagaccggtcggagcgtcattatgggttggtttcgccaggcacctggtaaagaacgtgaatttgtggcaaccattacccgcggggatgacactaccaactatgccgattctgttaaaggtcgcttcactatttcacgcgatgatgcgcgtaataccgtgtacttacagatgaactcactgaaacctgaggataccgccgtttattattgtgtgcgtattgtgctcctgactaaccttggcctttgcgactattggggtcagggcacacaagtcacggtctcaagcggcggaagctctggtgaaaagaaactgatttcagaagccaa

SEQ ID NO: 126 - protein, 7 aa, Artificial Sequence
  Synthetic
KTGRSVI

SEQ ID NO: 127 - protein, 5 aa, Artificial Sequence
  Synthetic
RGDDT

SEQ ID NO: 128 - protein, 9 aa, Artificial Sequence
  Synthetic
VYFVNDCIV

SEQ ID NO: 129 - protein, 120 aa, Artificial Sequence
  Synthetic
EVQLVESGGGLVQAGDSLRLSCAASGKTGRSVIMGWFRQAPGKEREFVATITRGDDTTNYADSVKGRFTISRDDARNTVYLQMNSLKPEDTAVYYCAAVYFVNDCIVDYWGQGTHVTVSS

SEQ ID NO: 130 - DNA, 409 bp, Artificial Sequence
  Synthetic
ataccatggaagttcaactggttgaatctggtggcggtttagttcaagccggtgatagccttcgtctgagctgcgccgcaagcggaaagaccggtcggagcgtcattatgggttggtttcgccaggcacctggtaaagaacgtgaatttgtggcaaccattacccgcggggatgacactaccaactatgccgattctgttaaaggtcgcttcactatttcacgcgatgatgcgcgtaataccgtgtacttacagatgaactcactgaaacctgaggataccgccgtttattattgtgcggcagtctattttgtcaacgactgcattgttgactattggggtcagggcacacatgtcacggtctcaagcggcggaagctctggtgaacagaaactgatttcagaagccaa

SEQ ID NO: 131 - protein, 7 aa, Artificial Sequence
  Synthetic
KTGRSVI

SEQ ID NO: 132 - protein, 5 aa, Artificial Sequence
  Synthetic
RGDDT

SEQ ID NO: 133 - protein, 9 aa, Artificial Sequence
  Synthetic
VYFVNDCIV

SEQ ID NO: 134 - protein, 120 aa, Artificial Sequence
  Synthetic
EVQLVESGGGLVQAGDSLRLSCAASGKTGRSVIMGWFRQAPGKEREFVATITRGDDTTNYADSVKGRFTISREDARNTVYLQMNSLKPEDTAVYYCAAVYFVNDCIVDYWGQGTQVTVSS

SEQ ID NO: 135 - DNA, 413 bp, Artificial Sequence
  Synthetic
agatataccatggaagttcaactggttgaatctggtggcggtttagttcaagccggtgatagccttcgtctgagctgcgccgcaagcggaaagaccggtcggagcgtcattatgggttggtttcgccaggcacctggtaaagaacgtgaatttgtggcaaccattacccgcggggatgacactaccaactatgccgattctgttaaaggtcgcttcactatttcacgcgaagatgcgcgtaataccgtgtacttacagatgaactcactgaaacctgaggataccgccgtttattattgtgcggcagtctattttgtcaacgactgcattgttgactattggggtcagggcacacaagtcacggtctcaagcggcggaagctctggtgaaaagaaactgatttcagaagccaa

SEQ ID NO: 136 - protein, 7 aa, Artificial Sequence
  Synthetic
KTGRSVI

SEQ ID NO: 137 - protein, 5 aa, Artificial Sequence
  Synthetic
RGDDT

SEQ ID NO: 138 - protein, 9 aa, Artificial Sequence
  Synthetic
VYFVNDCIV

SEQ ID NO: 139 - protein, 120 aa, Artificial Sequence
  Synthetic
EVQLVESGGGLVQAGDSLRLSCAASGKTGRSVIMGWFRQAPGKEREFVATITRGDDTTNYADSVKGRFTISRDDARNTVYLQMNSLKPEDTAVYYCAAVYFVNDCIVDYWGQGTQGTVSS

SEQ ID NO: 140 - DNA, 413 bp, Artificial Sequence
  Synthetic
agatataccatggaagttcaactggttgaatctggtggcggtttagttcaagccggtgatagccttcgtctgagctgcgccgcaagcggaaagaccggtcggagcgtcattatgggttggtttcgccaggcacctggtaaagaacgtgaatttgtggcaaccattacccgcggggatgacactaccaactatgccgattctgttaaaggtcgcttcactatttcacgcgatgatgcgcgtaataccgtgtacttacagatgaactcactgaaacctgaggataccgccgtttattattgtgcggcagtctattttgtcaacgactgcattgttgactattggggtcagggcacacaaggcacggtctcaagcggcggaagctctggtgaacagaaactgatttcagaagccaa

SEQ ID NO: 141 - protein, 7 aa, Artificial Sequence
  Synthetic
KTGRSVI

SEQ ID NO: 142 - protein, 5 aa, Artificial Sequence
  Synthetic
RGDDT

SEQ ID NO: 143 - protein, 9 aa, Artificial Sequence
  Synthetic
VYFVNDCIV

SEQ ID NO: 144 - protein, 120 aa, Artificial Sequence
  Synthetic
EVQLVESGGGLVQAGDSLRLSCAASGKTGRSVIMGWFRQAPGKEREFVATITRGDDTTNYADSVKGRFTISRDDARDTVYLQMNSLKPEDTAVYYCAAVYFVNDCIVDYWGQGTQVTVSS

SEQ ID NO: 145 - DNA, 415 bp, Artificial Sequence
  Synthetic
ggagatataccatggaagttcaactggttgaatctggtggcggtttagttcaagccggtgatagccttcgtctgagctgcgccgcaagcggaaagaccggtcggagcgtcattatgggttggtttcgccaggcacctggtaaagaacgtgaatttgtggcaaccattacccgcggggatgacactaccaactatgccgattctgttaaaggtcgcttcactatttcacgcgatgatgcgcgtgataccgtgtacttacagatgaactcactgaaacctgaggataccgccgtttattattgtgcggcagtctattttgtcaacgactgcattgttgactattggggtcagggcacacaagtcacggtctcaagcggcggaagctctggtgaacagaaactgatttcagaagccaa

SEQ ID NO: 146 - protein, 7 aa, Artificial Sequence
  Synthetic
KTGRSVI

SEQ ID NO: 147 - protein, 5 aa, Artificial Sequence
  Synthetic
RGDDT

SEQ ID NO: 148 - protein, 10 aa, Artificial Sequence
  Synthetic
IVLLTNLGLC

SEQ ID NO: 149 - protein, 121 aa, Artificial Sequence
  Synthetic
EVQLVESGGGLVQAGDSLRLSCAASGKTGRSVIMGWFRQAPGKEREFVATITRGDDTTNYADSVKGRFTISRDDARNTVYLQMNSLKPEDTAVYYCARIVLLTNLGLCDYWGQGTQGTVSS

SEQ ID NO: 150 - DNA, 416 bp, Artificial Sequence
  Synthetic
agatataccatggaagttcaactggttgaatctggtggcggtttagttcaagccggtgatagccttcgtctgagctgcgccgcaagcggaaagaccggtcggagcgtcattatgggttggtttcgccaggcacctggtaaagaacgtgaatttgtggcaaccattacccgcggggatgacactaccaactatgccgattctgttaaaggtcgcttcactatttcacgcgatgatgcgcgtaataccgtgtacttacagatgaactcactgaaacctgaggataccgccgtttattattgtgcgcgtattgtgctcctgactaaccttggcctctgcgactattggggtcagggcacacaaggcacggtctcaagcggcggaagctctggtgaacagaaactgatttcagaagccaa

SEQ ID NO: 151 - protein, 7 aa, Artificial Sequence
  Synthetic
QSGKGCR

SEQ ID NO: 152 - protein, 5 aa, Artificial Sequence
  Synthetic
RGDDT

SEQ ID NO: 153 - protein, 9 aa, Artificial Sequence
  Synthetic
VYFVNDCIV

SEQ ID NO: 154 - protein, 120 aa, Artificial Sequence
  Synthetic
EVQLVESGGGLVQAGDSLRLSCAASGQSGKGCRMGWFRQAPGKEREFVATITRGDDTTNYADSVKGRFTISRDDARNTVYLQMNSLKPEDTAVYYCAAVYFVNDCIVDYWGQGTQGTVSS

SEQ ID NO: 155 - DNA, 409 bp, Artificial Sequence
  Synthetic
ataccatggaagttcaactggttgaatctggtggcggtttagttcaagccggtgatagccttcgtctgagctgcgccgcaagcggacagagtggcaagggttgccggatgggttggtttcgccaggcacctggtaaagaacgtgaatttgtggcaaccattacccgcggggatgacactaccaactatgccgattctgttaaaggtcgcttcactatttcacgcgatgatgcgcgtaataccgtgtacttacagatgaactcactgaaacctgaggataccgccgtttattattgtgcggcagtctattttgtcaacgactgcattgttgactattggggtcagggcacacaaggcacggtctcaagcggcggaagctctggtgaacagaaactgatttcagaagccaa

SEQ ID NO: 156 - protein, 7 aa, Artificial Sequence
  Synthetic
KTGRSVI

SEQ ID NO: 157 - protein, 5 aa, Artificial Sequence
  Synthetic
RGDDT

SEQ ID NO: 158 - protein, 9 aa, Artificial Sequence
  Synthetic
VYFVNDCIV

SEQ ID NO: 159 - protein, 120 aa, Artificial Sequence
  Synthetic
QVQLVESGGGLVQAGDSLRLSCAASGKTGRSVIMGWFRQAPGKEREFVATITRGDDTTNYADSVKGRFTISRDDARNTVYLQMNSLKPEDTAVYYCAAVYFVNDCIVDYWGQGTQGTVSS

SEQ ID NO: 160 - DNA, 417 bp, Artificial Sequence
  Synthetic
aaggagatataccatgcaggttcaactggttgaatctggtggcggtttagttcaagccggtgatagccttcgtctgagctgcgccgcaagcggaaagaccggtcggagcgtcattatgggttggtttcgccaggcacctggtaaagaacgtgaatttgtggcaaccattacccgcggggatgacactaccaactatgccgattctgttaaaggtcgcttcactatttcacgcgatgatgcgcgtaataccgtgtacttacagatgaactcactgaaacctgaggataccgccgtttattattgtgcggcagtctattttgtcaacgactgcattgttgactattggggtcagggcacacaaggcacggtctcaagcggcggaagctctggtgaacagaaactgatttcagaagccaa

SEQ ID NO: 161 - protein, 7 aa, Artificial Sequence
  Synthetic
KTGRSVI

SEQ ID NO: 162 - protein, 5 aa, Artificial Sequence
  Synthetic
RGDDT

SEQ ID NO: 163 - protein, 9 aa, Artificial Sequence
  Synthetic
VYFVNDCIV

SEQ ID NO: 164 - protein, 120 aa, Artificial Sequence
  Synthetic
EVQLVESGGGLVKAGDSLRLSCAASGKTGRSVIMGWFRQAPGKEREFVATITRGDDTTNYADSVKGRFTISRDDARNTVYLQMNSLKPEDTAVYYCAAVYFVNDCIVDYWGQGTQVTVSS

SEQ ID NO: 165 - DNA, 415 bp, Artificial Sequence
  Synthetic
ggagatataccatggaagttcaactggttgaatctggtggcggtttagttaaagccggtgatagccttcgtctgagctgcgccgcaagcggaaagaccggtcggagcgtcattatgggttggtttcgccaggcacctggtaaagaacgtgaatttgtggcaaccattacccgcggggatgacactaccaactatgccgattctgttaaaggtcgcttcactatttcacgcgatgatgcgcgtaataccgtgtacttacagatgaactcactgaaacctgaggataccgccgtttattattgtgcggcagtctattttgtcaacgactgcattgttgactattggggtcagggcacacaagtcacggtctcaagcggcggaagctctggtgaacagaaactgatttcagaagccaa

SEQ ID NO: 166 - protein, 7 aa, Artificial Sequence
  Synthetic
KTGRSVL

SEQ ID NO: 167 - protein, 5 aa, Artificial Sequence
  Synthetic
RGDDT

SEQ ID NO: 168 - protein, 10 aa, Artificial Sequence
  Synthetic
IVLLTNLGLC

SEQ ID NO: 169 - protein, 121 aa, Artificial Sequence
  Synthetic
EVQLVESGGGLVQAGDSLRLSCAASGKTGRSVLMGWFRQAPGKEREFVATITRGDDTTNYADSVKGRFTISRDDARNTVYLQMNSLKPEDTAVYYCARIVLLTNLGLCDYWGQGTQVTVSS

SEQ ID NO: 170 - DNA, 418 bp, Artificial Sequence
  Synthetic
ggagatataccatggaagttcaactggttgaatctggtggcggtttagttcaagccggtgatagccttcgtctgagctgcgccgcaagcggaaagaccggtcggagcgtccttatgggttggtttcgccaggcacctggtaaagaacgtgaatttgtggcaaccattacccgcggggatgacactaccaactatgccgattctgttaaaggtcgcttcactatttcacgcgatgatgcgcgtaataccgtgtacttacagatgaactcactgaaacctgaggataccgccgtttattattgtgcgcgtattgtgctcctgactaaccttggcctctgcgactattggggtcagggcacacaggtcacggtctcaagcggcggaagctctggtgaacagaaactgatttcagaagccaa

SEQ ID NO: 171 - protein, 7 aa, Artificial Sequence
  Synthetic
KTGRSVI

SEQ ID NO: 172 - protein, 5 aa, Artificial Sequence
  Synthetic
RGDDT

SEQ ID NO: 173 - protein, 9 aa, Artificial Sequence
  Synthetic
VYFVNDCIV

SEQ ID NO: 174 - protein, 120 aa, Artificial Sequence
  Synthetic
EVQLVESGGVLVQAGDSLRLSCAASGKTGRSVIMGWFRQAPGKEREFVATITRGDDTTNYADSVKGRFTISRDDARNTVYLQMNSLKPEDTAVYYCAAVYFVNDCIVDYWGQGTQVTVSS

SEQ ID NO: 175 - DNA, 417 bp, Artificial Sequence
  Synthetic
aaggagatataccatggaagttcaactggttgaatctggtggcgttttagttcaagccggtgatagccttcgtctgagctgcgccgcaagcggaaagaccggtcggagcgtcattatgggttggtttcgccaggcacctggtaaagaacgtgaatttgtggcaaccattacccgcggggatgacactaccaactatgccgattctgttaaaggtcgcttcactatttcacgcgatgatgcgcgtaataccgtgtacttacagatgaactcactgaaacctgaggataccgccgtttattattgtgcggcagtctattttgtcaacgactgcattgttgactattggggtcagggcacacaagtcacggtctcaagcggcggaagctctggtgaacagaaactgatttcagaagccaa

SEQ ID NO: 176 - protein, 7 aa, Artificial Sequence
  Synthetic
KTGRSVI

SEQ ID NO: 177 - protein, 5 aa, Artificial Sequence
  Synthetic
RGDDT

SEQ ID NO: 178 - protein, 9 aa, Artificial Sequence
  Synthetic
VYFVNDCIV

SEQ ID NO: 179 - protein, 120 aa, Artificial Sequence
  Synthetic
QVQLQESGGGLVQAGDSLRLSCAASGKTGRSVIMGWFRQAPGKEREFVATITRGDDTTNYADSVKGRFTISRDDARNTVYLQMNSLKPEDTAVYYCAAVYFVNDCIVDYWGQGTQGTVSS

SEQ ID NO: 180 - DNA, 407 bp, Artificial Sequence
  Synthetic
accatgcaggttcaactgcaagaatctggtggcggtttagttcaagccggtgatagccttcgtctgagctgcgccgcaagcggaaagaccggtcggagcgtcattatgggttggtttcgccaggcacctggtaaagaacgtgaatttgtggcaaccattacccgcggggatgacactaccaactatgccgattctgttaaaggtcgcttcactatttcacgcgatgatgcgcgtaataccgtgtacttacagatgaactcactgaaacctgaggataccgccgtttattattgtgcggcagtctattttgtcaacgactgcattgttgactattggggtcagggcacacaaggcacggtctcaagcggcggaagctctggtgaaaagaaactgatttcagaagccaa

SEQ ID NO: 181 - protein, 7 aa, Artificial Sequence
  Synthetic
KTGRSVL

SEQ ID NO: 182 - protein, 5 aa, Artificial Sequence
  Synthetic
RGDDT

SEQ ID NO: 183 - protein, 9 aa, Artificial Sequence
  Synthetic
VYFVNDCIV

SEQ ID NO: 184 - protein, 120 aa, Artificial Sequence
  Synthetic
EVQLVESGGGLVQAGDSLRLSCAASGKTGRSVLMGWFRQAPGKEREFVATITRGDDTTNYADSVKGRFTISRDDARNTVYLQMNSLKPEDTAVYYCAAVYFVNDCIVDYWGQGTQVTVSS

SEQ ID NO: 185 - DNA, 415 bp, Artificial Sequence
  Synthetic
ggagatataccatggaagttcaactggttgaatctggtggcggtttagttcaagccggtgatagccttcgtctgagctgcgccgcaagcggaaagaccggtcggagcgtccttatgggttggtttcgccaggcacctggtaaagaacgtgaatttgtggcaaccattacccgcggggatgacactaccaactatgccgattctgttaaaggtcgcttcactatttcacgcgatgatgcgcgtaataccgtgtacttacagatgaactcactgaaacctgaggataccgccgtttattattgtgcggcagtctattttgtcaacgactgcattgttgactattggggtcagggcacacaagtcacggtctcaagcggcggaagctctggtgaacagaaactgatttcagaagccaa

SEQ ID NO: 186 - protein, 7 aa, Artificial Sequence
  Synthetic
KTGRSVI

SEQ ID NO: 187 - protein, 5 aa, Artificial Sequence
  Synthetic
RGDDT

SEQ ID NO: 188 - protein, 9 aa, Artificial Sequence
  Synthetic
VYFVNDCIV

SEQ ID NO: 189 - protein, 120 aa, Artificial Sequence
  Synthetic
EVQLVESGGGLVQAGDSLRLSCAASGKTGRSVIMGWFRQAPGKEREFVATITRGDDTTNYADSVKGRFTISRDDARNTVYLQMNSLKPEDIAVYYCAAVYFVNDCIVDYWGQGTQGTVSS

SEQ ID NO: 190 - DNA, 416 bp, Artificial Sequence
  Synthetic
aggagatataccatggaagttcaactggttgaatctggtggcggtttagttcaagccggtgatagccttcgtctgagctgcgccgcaagcggaaagaccggtcggagcgtcattatgggttggtttcgccaggcacctggtaaagaacgtgaatttgtggcaaccattacccgcggggatgacactaccaactatgccgattctgttaaaggtcgcttcactatttcacgcgatgatgcgcgtaataccgtgtacttacagatgaactcactgaaacctgaggatatcgccgtttattattgtgcggcagtctattttgtcaacgactgcattgttgactattggggtcagggcacacaaggcacggtctcaagcggcggaagctctggtgaaaagaaactgatttcagaagccaa

SEQ ID NO: 191 - protein, 7 aa, Artificial Sequence
  Synthetic
KTGRSVI

SEQ ID NO: 192 - protein, 5 aa, Artificial Sequence
  Synthetic
RGDDT

SEQ ID NO: 193 - protein, 10 aa, Artificial Sequence
  Synthetic
IVLLTNLGLC

SEQ ID NO: 194 - protein, 121 aa, Artificial Sequence
  Synthetic
EVQLVESGGGLVQAGDSLRLSCAASGKTGRSVIMGWFRQAPGKEREFVATITRGDDTTNYADSVKGRFTISRDDACNTVYLQMNSLKPEDTAVYYCARIVLLTNLGLCDYWGQGTQVTVSS

SEQ ID NO: 195 - DNA, 410 bp, Artificial Sequence
  Synthetic
accatggaagttcaactggttgaatctggtggcggtttagttcaagccggtgatagccttcgtctgagctgcgccgcaagcggaaagaccggtcggagcgtcattatgggttggtttcgccaggcacctggtaaagaacgtgaatttgtggcaaccattacccgcggggatgacactaccaactatgccgattctgttaaaggtcgcttcactatttcacgcgatgatgcgtgtaataccgtgtacttacagatgaactcactgaaacctgaggataccgccgtttattattgtgcgcgtattgtgctcctgactaaccttggcctctgcgactattggggtcagggcacacaagtcacggtctcaagcggcggaagctctggtgaacagaaactgatttcagaagccaa

SEQ ID NO: 196 - protein, 7 aa, Artificial Sequence
  Synthetic
AFGSNVF

SEQ ID NO: 197 - protein, 5 aa, Artificial Sequence
  Synthetic
PHHTV

SEQ ID NO: 198 - protein, 9 aa, Artificial Sequence
  Synthetic
AIYRNASVL

SEQ ID NO: 199 - protein, 120 aa, Artificial Sequence
  Synthetic
EVQLVESGGGLVQAGDSLRLSCAASGAFGSNVFMGWFRQAPGKEREFVASITPHHTVTDYADSVRGRFSISADSAKNTVYLQMNSLKPEDTAVYYCAAAIYRNASVLDYWGQGTQVTVSS

SEQ ID NO: 200 - DNA, 405 bp, Artificial Sequence
  Synthetic
ataccatggaagttcaactggttgaatctggtggcggtttagttcaagccggtgatagccttcgtctgagctgcgccgcaagcggagctttcggttctaacgttttcatgggttggtttcgccaggcacctggtaaagaacgtgaatttgtggcatccattacccctcatcacacggtcaccgactatgccgattctgttcgtggtcgcttcagcatttcagcagattctgcgaagaataccgtgtacttacagatgaactcactgaaacctgaggataccgccgtttattattgtgcggcagccatttataggaacgcgtcggttttggactattggggtcagggcacacaagtcacggtctcaagcggcggaagctctggtgaacagaaactgatttcagaag

SEQ ID NO: 201 - protein, 7 aa, Artificial Sequence
  Synthetic
AFGSNVF

SEQ ID NO: 202 - protein, 5 aa, Artificial Sequence
  Synthetic
PHHTV

SEQ ID NO: 203 - protein, 9 aa, Artificial Sequence
  Synthetic
AIYRNASVL

SEQ ID NO: 204 - protein, 120 aa, Artificial Sequence
  Synthetic
EVQLFESGGGLVQAGDSLRLSCAASGAFGSNVFMGWFRQAPGKEREFVASITPHHTVTDYADSVRGRFSISADSAKNTVYLQMNSLKPEDTAVYYCAAAIYRNASVLDYWGQGTQVTVSS

SEQ ID NO: 205 - DNA, 409 bp, Artificial Sequence
  Synthetic
agatataccatggaagttcaactgtttgaatctggtggcggtttagttcaagccggtgatagccttcgtctgagctgcgccgcaagcggagctttcggttctaacgttttcatgggttggtttcgccaggcacctggtaaagaacgtgaatttgtggcatccattacccctcatcacacggtcaccgactatgccgattctgttcgtggtcgcttcagcatttcagcagattctgcgaagaataccgtgtacttacagatgaactcactgaaacctgaggataccgccgtttattattgtgcggcagccatttataggaacgcgtcggttttggactattggggtcagggcacacaagtcacggtctcaagcggcggaagctctggtgaacagaaactgatttcagaag

SEQ ID NO: 206 - protein, 7 aa, Artificial Sequence
  Synthetic
AFGSNVF

SEQ ID NO: 207 - protein, 5 aa, Artificial Sequence
  Synthetic
PHHTV

SEQ ID NO: 208 - protein, 9 aa, Artificial Sequence
  Synthetic
AIYRNASVL

SEQ ID NO: 209 - protein, 120 aa, Artificial Sequence
  Synthetic
EVQLVESGGGLVQAGDRLRLSCAASGAFGSNVFMGWFRQAPGKEREFVASITPHHTVTDYADSVRGRFSISADSAKNTVYLQMNSLKPEDTAVYYCAAAIYRNASVLDYWGQGTQVTVSS

SEQ ID NO: 210 - DNA, 414 bp, Artificial Sequence
  Synthetic
gaaggagatataccatggaagttcaactggttgaatctggtggcggtttagttcaagccggtgatcgccttcgtctgagctgcgccgcaagcggagctttcggttctaacgttttcatgggttggtttcgccaggcacctggtaaagaacgtgaatttgtggcatccattacccctcatcacacggtcaccgactatgccgattctgttcgtggtcgcttcagcatttcagcagattctgcgaagaataccgtgtacttacagatgaactcactgaaacctgaggataccgccgtttattattgtgcagcagccatttataggaacgcgtcggttttggactattggggtcagggcacacaagtcacggtctcaagcggcggaagctctggtgaacagaaactgatttcagaag

SEQ ID NO: 211 - protein, 7 aa, Artificial Sequence
  Synthetic
AFGSNVF

SEQ ID NO: 212 - protein, 5 aa, Artificial Sequence
  Synthetic
PHHTV

SEQ ID NO: 213 - protein, 9 aa, Artificial Sequence
  Synthetic
AIYRNASVL

SEQ ID NO: 214 - protein, 120 aa, Artificial Sequence
  Synthetic
EVQLVESGGGLVQAGDSLRLSCAASGAFGSNVFMGWFRQAPGKEREFVASITPHHTVTDYADSVRGRFSISADSAKNTVYLQMNSLKPEDTAVYYCVAAIYRNASVLDYWGQGTQVTVSS

SEQ ID NO: 215 - DNA, 405 bp, Artificial Sequence
  Synthetic
ataccatggaagttcaactggttgaatctggtggcggtttagttcaagccggtgatagccttcgtctgagctgcgccgcaagcggagctttcggttctaacgttttcatgggttggtttcgccaggcacctggtaaagaacgtgaatttgtggcatccattacccctcatcacacggtcaccgactatgccgattctgttcgtggtcgcttcagcatttcagcagattctgcgaagaataccgtgtacttacagatgaactcactgaaacctgaggataccgccgtttattattgtgtggcagccatttataggaacgcgtcggttttggactattggggtcagggcacacaagtcacggtctcaagcggcggaagctctggtgaacagaaactgatttcagaag

SEQ ID NO: 216 - protein, 7 aa, Artificial Sequence
  Synthetic
AFGSNVF

SEQ ID NO: 217 - protein, 5 aa, Artificial Sequence
  Synthetic
PHHTV

SEQ ID NO: 218 - protein, 9 aa, Artificial Sequence
  Synthetic
AIYRNASVL

SEQ ID NO: 219 - protein, 120 aa, Artificial Sequence
  Synthetic
EVQLVESGGGLVQAGDSLRLRCAASGAFGSNVFMGWFRQAPGKEREFVASITPHHTVTDYADSVRGRFSISADSAKNTVYLQMNSLKPEDTAVYYCAAAIYRNASVLDYWGQGTQVTVSS

SEQ ID NO: 220 - DNA, 412 bp, Artificial Sequence
  Synthetic
aggagatataccatggaagttcaactggttgaatctggtggcggtttagttcaagccggtgatagccttcgtctgcgctgcgccgcaagcggagctttcggttctaacgttttcatgggttggtttcgccaggcacctggtaaagaacgtgaatttgtggcatccattacccctcatcacacggtcaccgactatgccgattctgttcgtggtcgcttcagcatttcagcagattctgcgaagaataccgtgtacttacagatgaactcactgaaacctgaggataccgccgtttattattgtgcggcagccatttataggaacgcgtcggttttggactattggggtcagggcacacaagtcacggtctcaagcggcggaagctctggtgaacagaaactgatttcagaag

SEQ ID NO: 221 - protein, 7 aa, Artificial Sequence
  Synthetic
AFGSNVF

SEQ ID NO: 222 - protein, 5 aa, Artificial Sequence
  Synthetic
PHHTV

SEQ ID NO: 223 - protein, 9 aa, Artificial Sequence
  Synthetic
AIYRNASVL

SEQ ID NO: 224 - protein, 120 aa, Artificial Sequence
  Synthetic
EVQLVESGGGLVQAGDSLRLSCAASGAFGSNVFMGWFRQAPGKEREFVASITPHHTVTDYADSVRGRFSISADSAKNTVYLQMNSLKPEDTAVYYCAAAIYRNASVLAYWGQGTQVTVSS

SEQ ID NO: 225 - DNA, 407 bp, Artificial Sequence
  Synthetic
atataccatggaagttcaactggttgaatctggtggcggtttagttcaagccggtgatagccttcgtctgagctgcgccgcaagcggagctttcggttctaacgttttcatgggttggtttcgccaggcacctggtaaagaacgtgaatttgtggcatccattacccctcatcacacggtcaccgactatgccgattctgttcgtggtcgcttcagcatttcagcagattctgcgaagaataccgtgtacttacagatgaactcactgaaacctgaggataccgccgtttattattgtgcggcagccatttataggaacgcgtcggttttggcctattggggtcagggcacacaagtcacggtctcaagcggcggaagctctggtgaacagaaactgatttcagaag

SEQ ID NO: 226 - protein, 7 aa, Artificial Sequence
  Synthetic
AFGSNVF

SEQ ID NO: 227 - protein, 5 aa, Artificial Sequence
  Synthetic
PHHTV

SEQ ID NO: 228 - protein, 9 aa, Artificial Sequence
  Synthetic
AIYRNASVL

SEQ ID NO: 229 - protein, 120 aa, Artificial Sequence
  Synthetic
EVQLVESGGGLVQAGDSLRLSCAASGAFGSNVFMGWFRQAPGKEREFVASITPHHTVTDYADSVRGRFSISADSAKITVYLQMNSLKPEDTAVYYCAAAIYRNASVLDYWGQGTQVTVSS

SEQ ID NO: 230 - DNA, 403 bp, Artificial Sequence
  Synthetic
accatggaagttcaactggttgaatctggtggcggtttagttcaagccggtgatagccttcgtctgagctgcgccgcaagcggagctttcggttctaacgttttcatgggttggtttcgccaggcacctggtaaagaacgtgaatttgtggcatccattacccctcatcacacggtcaccgactatgccgattctgttcgtggtcgcttcagcatttcagcagattctgcgaagattaccgtgtacttacagatgaactcactgaaacctgaggataccgccgtttattattgtgcggcagccatttataggaacgcgtcggttttggactattggggtcagggcacacaagtcacggtctcaagcggcggaagctctggtgaacagaaactgatttcagaag

SEQ ID NO: 231 - protein, 7 aa, Artificial Sequence
  Synthetic
AFGSNVF

SEQ ID NO: 232 - protein, 5 aa, Artificial Sequence
  Synthetic
PHHTV

SEQ ID NO: 233 - protein, 9 aa, Artificial Sequence
  Synthetic
AIYRNASVL

SEQ ID NO: 234 - protein, 120 aa, Artificial Sequence
  Synthetic
EVQLVDSGGGLVQAGDRLRLSCAASGAFGSNVFMGWFRQAPGKEREFVASITPHHTVTDYADSVRGRFSISADSAKNTVYLQMNSLKPEDTAVYYCAAAIYRNASVLDYWGQGTQVTVSS

SEQ ID NO: 235 - DNA, 414 bp, Artificial Sequence
  Synthetic
gaaggagatataccatggaagttcaactggttgactctggtggcggtttagttcaagccggtgatcgccttcgtctgagctgcgccgcaagcggagcttttggttctaacgttttcatgggttggtttcgccaggcacctggtaaagaacgtgaatttgtggcatccattacccctcatcacacggtcaccgactatgccgattctgttcgtggtcgcttcagcatttcagcagattctgcgaagaataccgtgtacttacagatgaactcactgaaacctgaggataccgccgtttattattgtgcggcagccatttataggaacgcgtcggttttggactattggggtcagggcacacaagtcacggtctcaagcggcggaagctctggtgaacagaaactgatttcagaag

SEQ ID NO: 236 - protein, 7 aa, Artificial Sequence
  Synthetic
AFGSNVF

SEQ ID NO: 237 - protein, 5 aa, Artificial Sequence
  Synthetic
PHHTV

SEQ ID NO: 238 - protein, 9 aa, Artificial Sequence
  Synthetic
AIYRNASVL

SEQ ID NO: 239 - protein, 120 aa, Artificial Sequence
  Synthetic
EVQLVESGGGLVQAGDSLRLSCAASGAFGSNVFMGWFRQAPGKEREFVASITPHHTVTDYADSVRGRFSISADSAKNTVYLQMNSLKPEDTAVYYGAAAIYRNASVLDYGGQGTQVTVSS

SEQ ID NO: 240 - DNA, 411 bp, Artificial Sequence
  Synthetic
ggagatataccatggaagttcaactggttgaatctggtggcggtttagttcaagccggtgatagccttcgtctgagctgcgccgcaagcggagctttcggttctaacgttttcatgggttggtttcgccaggcacctggtaaagaacgtgaatttgtggcatccattacccctcatcacacggtcaccgactatgccgattctgttcgtggtcgcttcagcatttcagcagattctgcgaagaataccgtgtacttacagatgaactcactgaaacctgaggataccgccgtttattatggtgcggcagccatttataggaacgcgtcggttttggactatgggggtcagggcacacaagtcacggtctcaagcggcggaagctctggtgaacagaaactgatttcagaag

SEQ ID NO: 241 - protein, 7 aa, Artificial Sequence
  Synthetic
AFGSNVF

SEQ ID NO: 242 - protein, 5 aa, Artificial Sequence
  Synthetic
PHHTV

SEQ ID NO: 243 - protein, 9 aa, Artificial Sequence
  Synthetic
AIYRNASGL

SEQ ID NO: 244 - protein, 120 aa, Artificial Sequence
  Synthetic
EVQLVESGGGLVQAGDSLRLSCAASGAFGSNVFMGWFRQAPGKEREFVASITPHHTVTDYADSVRGRFSISADSAKNTVYLQMNSLKPEDTAVYYCAAAIYRNASGLDYWGQGTQVTVSS

SEQ ID NO: 245 - DNA, 405 bp, Artificial Sequence
  Synthetic
ataccatggaagttcaactggttgaatctggtggcggtttagttcaagccggtgatagccttcgtctgagctgcgccgcaagcggagctttcggttctaacgttttcatgggttggtttcgccaggcacctggtaaagaacgtgaatttgtggcatccattacccctcatcacacggtcaccgactatgccgattctgttcgtggtcgcttcagcatttcagcagattctgcgaagaataccgtgtacttacagatgaactcactgaaacctgaggataccgccgtttattattgtgcggcagccatttataggaacgcgtcgggtttggactattggggtcagggcacacaagtcacggtctcaagcggcggaagctctggtgaacagaaactgatttcagaag

SEQ ID NO: 246 - protein, 7 aa, Artificial Sequence
  Synthetic
AFGSNVF

SEQ ID NO: 247 - protein, 5 aa, Artificial Sequence
  Synthetic
PHHTV

SEQ ID NO: 248 - protein, 9 aa, Artificial Sequence
  Synthetic
AIYRNASVL

SEQ ID NO: 249 - protein, 120 aa, Artificial Sequence
  Synthetic
EVQLVESGGGLVQAGDSLRLSCAASGAFGSNVFMGWFRQAPGKEREFVASITPHHTVTDYADSVRGRFSISADSAKNTVYLQMNSLKPEDTAVYYCEAAIYRNASVLDYWGQGTQVTVSS

SEQ ID NO: 250 - DNA, 403 bp, Artificial Sequence
  Synthetic
accatggaagttcaactggttgaatctggtggcggtttagttcaagccggtgatagccttcgtctgagctgcgccgcaagcggagctttcggttctaacgttttcatgggttggtttcgccaggcacctggtaaagaacgtgaatttgtggcatccattacccctcatcacacggtcaccgactatgccgattctgttcgtggtcgcttcagcatttcagcagattctgcgaagaataccgtgtacttacagatgaactcactgaaacctgaggataccgccgtttattattgtgaggcagccatttataggaacgcgtcggttttggactattggggtcagggcacacaagtcacggtctcaagcggcggaagctctggtgaacagaaactgatttcagaag

SEQ ID NO: 251 - protein, 7 aa, Artificial Sequence
  Synthetic
AFGSNVF

SEQ ID NO: 252 - protein, 5 aa, Artificial Sequence
  Synthetic
PHHTV

SEQ ID NO: 253 - protein, 9 aa, Artificial Sequence
  Synthetic
AIYRNASVL

SEQ ID NO: 254 - protein, 120 aa, Artificial Sequence
  Synthetic
EVQLVESGGGLVQAGDSIRLSCAASGAFGSNVFMGWFRQAPGKEREFVASITPHHTVTDYADSVRGRFSISADSAKNTVYLQMNSLKPEDTAVYYCAAAIYRNASVLDYWGQGTQVTVSS

SEQ ID NO: 255 - DNA, 414 bp, Artificial Sequence
  Synthetic
gaaggagatataccatggaagttcaactggttgaatctggtggcggtttagttcaagccggtgatagcattcgtctgagctgcgccgcaagcggagctttcggttctaacgttttcatgggttggtttcgccaggcacctggtaaagaacgtgaatttgtggcatccattacccctcatcacacggtcaccgactatgccgattctgttcgtggtcgcttcagcatttcagcagattctgcgaagaataccgtgtacttacagatgaactcactgaaacctgaggataccgccgtttattattgtgcggcagccatttataggaacgcgtcggttttggactattggggtcagggcacacaagtcacggtctcaagcggcggaagctctggtgaacagaaactgatttcagaag

SEQ ID NO: 256 - protein, 7 aa, Artificial Sequence
  Synthetic
AFGSNVF

SEQ ID NO: 257 - protein, 5 aa, Artificial Sequence
  Synthetic
PHHTV

SEQ ID NO: 258 - protein, 9 aa, Artificial Sequence
  Synthetic
AIYRNASVL

SEQ ID NO: 259 - protein, 120 aa, Artificial Sequence
  Synthetic
EVQLFESGGGLVQAGDSLRLSCAASGAFGSNVFMGWFRQAPGKEREFVASITPHHTVTDYADSVRGRFSISADSAKNTVYLQMNSLKPEDTAVYYCAAAIYRNASVLGYWGQGTQVTVSS

SEQ ID NO: 260 - DNA, 409 bp, Artificial Sequence
  Synthetic
agatataccatggaagttcaactgtttgaatctggtggcggtttagttcaagccggtgatagccttcgtctgagctgcgccgcaagcggagctttcggttctaacgttttcatgggttggtttcgccaggcacctggtaaagaacgtgaatttgtggcatccattacccctcatcacacggtcaccgactatgccgattctgttcgtggtcgcttcagcatttcagcagattctgcgaagaataccgtgtacttacagatgaactcactgaaacctgaggataccgccgtttattattgtgcggcagccatttataggaacgcgtcggttttgggctattggggtcagggcacacaagtcacggtctcaagcggcggaagctctggtgaacagaaactgatttcagaag

SEQ ID NO: 261 - protein, 7 aa, Artificial Sequence
  Synthetic
AFGSNVF

SEQ ID NO: 262 - protein, 5 aa, Artificial Sequence
  Synthetic
PHHTV

SEQ ID NO: 263 - protein, 9 aa, Artificial Sequence
  Synthetic
AIYRNASVL

SEQ ID NO: 264 - protein, 120 aa, Artificial Sequence
  Synthetic
EVQLVESGGGLVKAGDSLRLSCAASGAFGSNVFMGWFRQAPGKEREFVASITPHHTVTDYADSVRGRFSISADSAKNTVYLQMNSLKPEDTAVYYCAAAIYRNASVLDYWGQGTQVTVSS

SEQ ID NO: 265 - DNA, 411 bp, Artificial Sequence
  Synthetic
ggagatataccatggaagttcaactggttgaatctggtggcggtttagttaaagccggtgatagccttcgtctgagctgcgccgcaagcggagctttcggttctaacgttttcatgggttggtttcgccaggcacctggtaaagaacgtgaatttgtggcatccattacccctcatcacacggtcaccgactatgccgattctgttcgtggtcgcttcagcatttcagcagattctgcgaagaataccgtgtacttacagatgaactcactgaaacctgaggataccgccgtttattattgtgcggcagccatttataggaacgcgtcggttttggactattggggtcagggcacacaagtcacggtctcaagcggcggaagctctggtgaacagaaactgatttcagaag

SEQ ID NO: 266 - protein, 7 aa, Artificial Sequence
  Synthetic
AFGSNVF

SEQ ID NO: 267 - protein, 5 aa, Artificial Sequence
  Synthetic
PHHTV

SEQ ID NO: 268 - protein, 9 aa, Artificial Sequence
  Synthetic
AIYRNASVL

SEQ ID NO: 269 - protein, 120 aa, Artificial Sequence
  Synthetic
EVQLVDSGGGLVHAGDRLRLSCAASGAFGSNVFMGWFRQAPGKEREFVASITPHHTVTDYADSVRGRFSISADSAKNTVYLQMNSLKPEDTAVYYCAAAIYRNASVLDYWGQGTQVTVSS

SEQ ID NO: 270 - DNA, 414 bp, Artificial Sequence
  Synthetic
gaaggagatataccatggaagttcaactggttgactctggtggcggtttagttcacgccggtgatcgccttcgtctgagctgcgccgcaagcggagctttcggttctaacgttttcatgggttggtttcgccaggcacctggtaaagaacgtgaatttgtggcatccattacccctcatcacacggtcaccgactatgccgattctgttcgtggtcgcttcagcatttcagcagattctgcgaagaataccgtgtacttacagatgaactcactgaaacctgaggataccgccgtttattattgtgcggcagccatttataggaacgcgtcggttttggactattggggtcagggcacacaagtcacggtctcaagcggcggaagctctggtgaacagaaactgatttcagaag

SEQ ID NO: 271 - protein, 7 aa, Artificial Sequence
  Synthetic
AFGSNVF

SEQ ID NO: 272 - protein, 5 aa, Artificial Sequence
  Synthetic
PHHTV

SEQ ID NO: 273 - protein, 9 aa, Artificial Sequence
  Synthetic
AIYRDASVL

SEQ ID NO: 274 - protein, 120 aa, Artificial Sequence
  Synthetic
EVQLVESGGGLVQAGDSLRLSCAASGAFGSNVFMGWFRQAPGKEREFVASITPHHTVTDYADSVRGRFSISADSAKNTVYLQMNSLKPEDTAVYYCAAAIYRDASVLDYWGQGTQVTVSS

SEQ ID NO: 275 - DNA, 412 bp, Artificial Sequence
  Synthetic
aggagatataccatggaagttcaactggttgaatctggtggcggtttagttcaagccggtgatagccttcgtctgagctgcgccgcaagcggagctttcggttctaacgttttcatgggttggtttcgccaggcacctggtaaagaacgtgaatttgtggcatccattacccctcatcacacggtcaccgactatgccgattctgttcgtggtcgcttcagcatttcagcagattctgcgaagaataccgtgtacttacagatgaactcactgaaacctgaggataccgccgtttattattgtgcggcagccatttatagggacgcgtcggttttggactattggggtcagggcacacaagtcacggtctcaagcggcggaagctctggtgaacagaaactgatttcagaag

SEQ ID NO: 276 - protein, 7 aa, Artificial Sequence
  Synthetic
AFGSNVF

SEQ ID NO: 277 - protein, 5 aa, Artificial Sequence
  Synthetic
PHHTF

SEQ ID NO: 278 - protein, 9 aa, Artificial Sequence
  Synthetic
AIYRNASVL

SEQ ID NO: 279 - protein, 120 aa, Artificial Sequence
  Synthetic
EVQLVESGGGLVQAGDSLRLSCAASGAFGSNVFMGWFRQAPGKEREFVASITPHHTFTDYADSVRGRFSISADSAKNTVYLQMNSLKPEDTAVYYCAAAIYRNASVLDYWGQGTQVTVSS

SEQ ID NO: 280 - DNA, 409 bp, Artificial Sequence
  Synthetic
agatataccatggaagttcaactggttgaatctggtggcggtttagttcaagccggtgatagccttcgtctgagctgcgccgcaagcggagctttcggttctaacgttttcatgggttggtttcgccaggcacctggtaaagaacgtgaatttgtggcatccattacccctcatcacacgttcaccgactatgccgattctgttcgtggtcgcttcagcatttcagcagattctgcgaagaataccgtgtacttacagatgaactcactgaaacctgaggataccgccgtttattattgtgcggcagccatttataggaacgcgtcggttttggactattggggtcagggcacacaagtcacggtctcaagcggcggaagctctggtgaacagaaactgatttcagaag

SEQ ID NO: 281 - protein, 7 aa, Artificial Sequence
  Synthetic
AFGSNVF

SEQ ID NO: 282 - protein, 5 aa, Artificial Sequence
  Synthetic
PHHTV

SEQ ID NO: 283 - protein, 9 aa, Artificial Sequence
  Synthetic
AIYRNASVL

SEQ ID NO: 284 - protein, 120 aa, Artificial Sequence
  Synthetic
EVQLVESGGGLVQAGDSLRLSCAASGAFGSNVFMGWFRQAPGKEREFVASITPHHTVTDYADSVRGRFSISADSAKNTVYLQMNSLKPEDTAVYYCAAAIYRNASVLAYWVQGTQVTVSS

SEQ ID NO: 285 - DNA, 409 bp, Artificial Sequence
  Synthetic
agatataccatggaagttcaactggttgaatctggtggcggtttagttcaagccggtgatagccttcgtctgagctgcgccgcaagcggagctttcggttctaacgttttcatgggttggtttcgccaggcacctggtaaagaacgtgaatttgtggcatccattacccctcatcacacggtcaccgactatgccgattctgttcgtggtcgcttcagcatttcagcagattctgcgaagaataccgtgtacttacagatgaactcactgaaacctgaggataccgccgtttattattgtgcggcagccatttataggaacgcgtcggttttggcctattgggttcagggcacacaagtcacggtctcaagcggcggaagctctgttgaacagaaactgatttcagaag

SEQ ID NO: 286 - protein, 7 aa, Artificial Sequence
  Synthetic
AFGSNVF

SEQ ID NO: 287 - protein, 5 aa, Artificial Sequence
  Synthetic
PHHTV

SEQ ID NO: 288 - protein, 9 aa, Artificial Sequence
  Synthetic
AIYRNASVL

SEQ ID NO: 289 - protein, 120 aa, Artificial Sequence
  Synthetic
EVQLVESGGGLVQAGDSLRLSCAASGAFGSNVFMGWFRQAPGKERGFVASITPHHTVTDYADSVRGRFSISADSAKNTVYLQMNSLKPEDTAVYYCAAAIYRNASVLDYWGQGTQVTVSS

SEQ ID NO: 290 - DNA, 414 bp, Artificial Sequence
  Synthetic
gaaggagatataccatggaagttcaactggttgaatctggtggcggtttagttcaagccggtgatagccttcgtctgagctgcgccgcaagcggagctttcggttctaacgttttcatgggttggtttcgccaggcacctggtaaagaacgtggatttgtggcatccattacccctcatcacacggtcaccgactatgccgattctgttcgtggtcgcttcagcatttcagcagattctgcgaagaataccgtgtacttacagatgaactcactgaaacctgaggataccgccgtttattattgtgcggcagccatttataggaacgcgtcggttttggactattggggtcagggcacacaagtcacggtctcaagcggcggaagctctggtgaacagaaactgatttcagaag

SEQ ID NO: 291 - protein, 7 aa, Artificial Sequence
  Synthetic
AFGSNVF

SEQ ID NO: 292 - protein, 5 aa, Artificial Sequence
  Synthetic
PHHTV

SEQ ID NO: 293 - protein, 9 aa, Artificial Sequence
  Synthetic
AIYRNASVL

SEQ ID NO: 294 - protein, 120 aa, Artificial Sequence
  Synthetic
EVQLVESGGGLVQAGDSLRLSCVASGAFGSNVFMGWFRQAPGKEREFVASITPHHTVTDYADSVRGRFSISADSAKNTVYLQMNSLKPEDTAVYYCAAAIYRNASVLDYWGQGTQVTVSS

SEQ ID NO: 295 - DNA, 413 bp, Artificial Sequence
  Synthetic
aaggagatataccatggaagttcaactggttgaatctggtggcggtttagttcaagccggtgatagccttcgtctgagctgcgtcgcaagcggagctttcggttctaacgttttcatgggttggtttcgccaggcacctggtaaagaacgtgaatttgtggcatccattacccctcatcacacggtcaccgactatgccgattctgttcgtggtcgcttcagcatttcagcagattctgcgaagaataccgtgtacttacagatgaactcactgaaacctgaggataccgccgtttattattgtgcggcagccatttataggaacgcgtcggttttggactattggggtcagggcacacaagtcacggtctcaagcggcggaagctctggtgaacagaaactgatttcagaag

SEQ ID NO: 296 - protein, 7 aa, Artificial Sequence
  Synthetic
AFGSNVL

SEQ ID NO: 297 - protein, 5 aa, Artificial Sequence
  Synthetic
PHHTV

SEQ ID NO: 298 - protein, 9 aa, Artificial Sequence
  Synthetic
AIYRNASVL

SEQ ID NO: 299 - protein, 120 aa, Artificial Sequence
  Synthetic
EVQLVESGGGLVQAGDSLRLSCAASGAFGSNVLMGWFRQAPGKEREFVASITPHHTVTDYADSVRGRFSISADSAKNTVYLQMNSLKPEDTAVYYCAAAIYRNASVLDYWGQGTQVTVSS

SEQ ID NO: 300 - DNA, 407 bp, Artificial Sequence
  Synthetic
atataccatggaagttcaactggttgaatctggtggcggtttagttcaagccggtgatagccttcgtctgagctgcgccgcaagcggagctttcggttctaacgttttaatgggttggtttcgccaggcacctggtaaagaacgtgaatttgtggcatccattacccctcatcacacggtcaccgactatgccgattctgttcgtggtcgcttcagcatttcagcagattctgcgaagaataccgtgtacttacagatgaactcactgaaacctgaggataccgccgtttattattgtgcggcagccatttataggaacgcgtcggttttggactattggggtcagggcacacaagtcacggtctcaagcggcggaagctcttgtgaacagaaactgatttcagaag

SEQ ID NO: 301 - protein, 7 aa, Artificial Sequence
  Synthetic
AFGSNVF

SEQ ID NO: 302 - protein, 5 aa, Artificial Sequence
  Synthetic
PHHTV

SEQ ID NO: 303 - protein, 9 aa, Artificial Sequence
  Synthetic
AIYRNASVL

SEQ ID NO: 304 - protein, 120 aa, Artificial Sequence
  Synthetic
EVQLVESGGGLVQAGDSLRLSCPASGAFGSNVFMGWFRQAPGKEREFVASITPHHTVTDYADSVRGRFSISADSAKNTVYLQMNSLKPEDTAVYYCAAAIYRNASVLDYWGQGTQVTVSS

SEQ ID NO: 305 - DNA, 407 bp, Artificial Sequence
  Synthetic
atataccatggaagttcaactggttgaatctggtggcggtttagttcaagccggtgatagccttcgtctgagctgccccgcaagcggagctttcggttctaacgttttcatgggttggtttcgccaggcacctggtaaagaacgtgaatttgtggcatccattacccctcatcacacggtcaccgactatgccgattctgttcgtggtcgcttcagcatttcagcagattctgcgaagaataccgtgtacttacagatgaactcactgaaacctgaggataccgccgtttattattgtgcggcagccatttataggaacgcgtcggttttggactattggggtcagggcacacaagtcacggtctcaagcggcggaagctctggtgaacagaaactgatttcagaag

SEQ ID NO: 306 - protein, 7 aa, Artificial Sequence
  Synthetic
AFGSNVF

SEQ ID NO: 307 - protein, 5 aa, Artificial Sequence
  Synthetic
PHHTV

SEQ ID NO: 308 - protein, 9 aa, Artificial Sequence
  Synthetic
AIYRNASVL

SEQ ID NO: 309 - protein, 120 aa, Artificial Sequence
  Synthetic
EVQLVESGGGLVQAGDSLRLSCAASGAFGSNVFMGWFRQAPGKEREFVAFITPHHTVTDYADSVRGRFSISADSAKNTVYLQMNSLKPEDTAVYYCAAAIYRNASVLDYWGQGTQVTVSS

SEQ ID NO: 310 - DNA, 403 bp, Artificial Sequence
  Synthetic
accatggaagttcaactggttgaatctggtggcggtttagttcaagccggtgatagccttcgtctgagctgcgccgcaagcggagctttcggttctaacgttttcatgggttggtttcgccaggcacctggtaaagaacgtgaatttgtggcattcattacccctcatcacacggtcaccgactatgccgattctgttcgtggtcgcttcagcatttcagcagattctgcgaagaataccgtgtacttacagatgaactcactgaaacctgaggataccgccgtttattattgtgcggcagccatttataggaacgcgtcggttttggactattggggtcagggcacacaagtcacggtctcaagcggcggaagctctggtgaacagaaactgatttcagaag

SEQ ID NO: 311 - protein, 7 aa, Artificial Sequence
  Synthetic
AFGSNVF

SEQ ID NO: 312 - protein, 5 aa, Artificial Sequence
  Synthetic
PHHTV

SEQ ID NO: 313 - protein, 9 aa, Artificial Sequence
  Synthetic
AIYRNASVL

SEQ ID NO: 314 - protein, 120 aa, Artificial Sequence
  Synthetic
EVQLVESGGGLVQAGDSLRLSCAASGAFGSNVFMGWFRQAPGKEREFVASITPHHTVTDYADSVRGRFSISEDSAKNTVYLQMNSLKPEDTAVYYCAAAIYRNASVLDYWGQGTQVTVSS

SEQ ID NO: 315 - DNA, 412 bp, Artificial Sequence
  Synthetic
aggagatataccatggaagttcaactggttgaatctggtggcggtttagttcaagccggtgatagccttcgtctgagctgcgccgcaagcggagctttcggttctaacgttttcatgggttggtttcgccaggcacctggtaaagaacgtgaatttgtggcatccattacccctcatcacacggtcaccgactatgccgattctgttcgtggtcgcttcagcatttcagaagattctgcgaagaataccgtgtacttacagatgaactcactgaaacctgaggataccgccgtttattattgtgcggcagccatttataggaacgcgtcggttttggactattggggtcagggcacacaagtcacggtctcaagcggcggaagctctggtgaacagaaactgatttcagaag

SEQ ID NO: 316 - protein, 7 aa, Artificial Sequence
  Synthetic
AFGSNVF

SEQ ID NO: 317 - protein, 5 aa, Artificial Sequence
  Synthetic
PHHTV

SEQ ID NO: 318 - protein, 9 aa, Artificial Sequence
  Synthetic
AIYRNASVL

SEQ ID NO: 319 - protein, 120 aa, Artificial Sequence
  Synthetic
EVQLVESGGGLVHAGDRLRLSCAASGAFGSNVFMGWFRQAPGKEREFVASITPHHTVTDYADSVRGRFSISADSAKNTVYLQMNSLKPEDTAVYYCAAAIYRNASVLDYWGQGTQVTVSS

SEQ ID NO: 320 - DNA, 414 bp, Artificial Sequence
  Synthetic
gaaggagatataccatggaagttcaactggttgaatctggtggcggtttagttcacgccggtgatcgccttcgtctgagctgcgccgcaagcggagctttcggttctaacgttttcatgggttggtttcgccaggcacctggtaaagaacgtgaatttgtggcatccattacccctcatcacacggtcaccgactatgccgattctgttcgtggtcgcttcagcatttcagcagattctgcgaagaataccgtgtacttacagatgaactcactgaaacctgaggataccgccgtttattattgtgcggcagccatttataggaacgcgtcggttttggactattggggtcagggcacacaagtcacggtctcaagcggcggaagctctggtgaacagaaactgatttcagaag

SEQ ID NO: 321 - protein, 7 aa, Artificial Sequence
  Synthetic
AFGSNVF

SEQ ID NO: 322 - protein, 5 aa, Artificial Sequence
  Synthetic
PHHTV

SEQ ID NO: 323 - protein, 9 aa, Artificial Sequence
  Synthetic
AIYRNASVF

SEQ ID NO: 324 - protein, 120 aa, Artificial Sequence
  Synthetic
EVQLVESGGGLVQAGDSLRLSCAASGAFGSNVFMGWFRQAPGKEREFVASITPHHTVTDYADSVRGRFSISADSAKNTVYLQMNSLKPEDTAVYYCAAAIYRNASVFAYWGQGTQVTVSS

SEQ ID NO: 325 - DNA, 405 bp, Artificial Sequence
  Synthetic
ataccatggaagttcaactggttgaatctggtggcggtttagttcaagccggtgatagccttcgtctgagctgcgccgcaagcggagctttcggttctaacgttttcatgggttggtttcgccaggcacctggtaaagaacgtgaatttgtggcatccattacccctcatcacacggtcaccgactatgccgattctgttcgtggtcgcttcagcatttcagcagattctgcgaagaataccgtgtacttacagatgaactcactgaaacctgaggataccgccgtttattattgtgcggcagccatttataggaacgcgtcggtttttgcctattggggtcagggcacacaagtcacggtctcaagcggcggaagctctggtgaacagaaactgatttcagaag

SEQ ID NO: 326 - protein, 7 aa, Artificial Sequence
  Synthetic
AFGSNVF

SEQ ID NO: 327 - protein, 5 aa, Artificial Sequence
  Synthetic
PHHTV

SEQ ID NO: 328 - protein, 9 aa, Artificial Sequence
  Synthetic
AIYRNASVL

SEQ ID NO: 329 - protein, 120 aa, Artificial Sequence
  Synthetic
EVQLVESGGGLVKVGDSLRLSCAASGAFGSNVFMGWFRQAPGKEREFVASITPHHTVTDYADSVRGRFSISADSAKNTVYLQMNSLKPEDTAVYYCAAAIYRNASVLDYWGQGTQVTVSS

SEQ ID NO: 330 - DNA, 403 bp, Artificial Sequence
  Synthetic
accatggaagttcaactggttgaatctggtggcggtttagttaaagtcggtgatagccttcgtctgagctgcgccgcaagcggagctttcggttctaacgttttcatgggttggtttcgccaggcacctggtaaagaacgtgaatttgtggcatccattacccctcatcacacggtcaccgactatgccgattctgttcgtggtcgcttcagcatttcagcagattctgcgaagaataccgtgtacttacagatgaactcactgaaacctgaggataccgccgtttattattgtgcggcagccatttataggaacgcgtcggttttggactattggggtcagggcacacaagtcacggtctcaagcggcggaagctctggtgaacagaaactgatttcagaag

SEQ ID NO: 331 - protein, 7 aa, Artificial Sequence
  Synthetic
AFGSNVF

SEQ ID NO: 332 - protein, 5 aa, Artificial Sequence
  Synthetic
PHHTV

SEQ ID NO: 333 - protein, 9 aa, Artificial Sequence
  Synthetic
AIYRNASVL

SEQ ID NO: 334 - protein, 120 aa, Artificial Sequence
  Synthetic
EIQLVESGGGLVQAGDSLRLSCAASGAFGSNVFMGWFRQAPGKEREFVASITPHHTVTDYADSVRGRFSISADSAKNTVYLQMNSLKPEDTAVYYCAAAIYRNASVLDYWGQGTQVTVSS

SEQ ID NO: 335 - DNA, 405 bp, Artificial Sequence
  Synthetic
ataccatggaaattcaactggttgaatctggtggcggtttagttcaagccggtgatagccttcgtctgagctgcgccgcaagcggagctttcggttctaacgttttcatgggttggtttcgccaggcacctggtaaagaacgtgaatttgtggcatccattacccctcatcacacggtcaccgactatgccgattctgttcgtggtcgcttcagcatttcagcagattctgcgaagaataccgtgtacttacagatgaactcactgaaacctgaggataccgccgtttattattgtgcggcagccatttataggaacgcgtcggttttggactattggggtcagggcacacaagtcacggtctcaagcggcggaagctctggtgaacagaaactgatttcagaag

SEQ ID NO: 336 - protein, 7 aa, Artificial Sequence
  Synthetic
AFGSNVF

SEQ ID NO: 337 - protein, 5 aa, Artificial Sequence
  Synthetic
PHHTV

SEQ ID NO: 338 - protein, 9 aa, Artificial Sequence
  Synthetic
AIYRNASVL

SEQ ID NO: 339 - protein, 120 aa, Artificial Sequence
  Synthetic
EVQLVESGGGLVHAGDSLRLSCAASGAFGSNVFMGWFRQAPGKEREFVASITPHHTVTDYADSVRGRFSISADSAKNTVYLQMNSLKPEDTAVYYCAAAIYRNASVLDYWGQGTQVTVSS

SEQ ID NO: 340 - DNA, 418 bp, Artificial Sequence
  Synthetic
gaaggagatataccatggaagttcaactggttgaatctggtggcggtttagttcacgccggtgatagccttcgtctgagctgcgccgcaagcggagctttcggttctaacgttttcatgggttggtttcgccaggcacctggtaaagaacgtgaatttgtggcatccattacccctcatcacacggtcaccgactatgccgattctgttcgtggtcgcttcagcatttcagcagattctgcgaagaataccgtgtacttacagatgaactcactgaaacctgaggataccgccgtttattattgtgcggcagccatttataggaacgcgtcggttttggactattggggtcagggcacacaagtcacggtctcaagcggcggaagctctggtgaacagaaactgatttcagaagccaa

SEQ ID NO: 341 - protein, 7 aa, Artificial Sequence
  Synthetic
AFGSNVF

SEQ ID NO: 342 - protein, 5 aa, Artificial Sequence
  Synthetic
PHHTV

SEQ ID NO: 343 - protein, 9 aa, Artificial Sequence
  Synthetic
AIYRNASVL

SEQ ID NO: 344 - protein, 120 aa, Artificial Sequence
  Synthetic
EVQLVESGGGLVQAGDSLRLSCAASGAFGSNVFMGWFRQAPGKEREFVASITPHHTVTDYADSVRGRFSISADSAKNTVYLQMNSLKPEDTAVYYCAAAIYRNASVLDYWGQGTQGTVSS

SEQ ID NO: 345 - DNA, 407 bp, Artificial Sequence
  Synthetic
accatggaagttcaactggttgaatctggtggcggtttagttcaagccggtgatagccttcgtctgagctgcgccgcaagcggagctttcggttctaacgttttcatgggttggtttcgccaggcacctggtaaagaacgtgaatttgtggcatccattacccctcatcacacggtcaccgactatgccgattctgttcgtggtcgcttcagcatttcagcagattctgcgaagaataccgtgtacttacagatgaactcactgaaacctgaggataccgccgtttattattgtgcggcagccatttataggaacgcgtcggttttggactattggggtcagggcacacaaggcacggtctcaagtggcggaagctctggtgaacagaaactgatttcagaagccaa

SEQ ID NO: 346 - protein, 7 aa, Artificial Sequence
  Synthetic
AFGSNVF

SEQ ID NO: 347 - protein, 5 aa, Artificial Sequence
  Synthetic
PHHTV

SEQ ID NO: 348 - protein, 9 aa, Artificial Sequence
  Synthetic
AIYRNASVL

SEQ ID NO: 349 - protein, 120 aa, Artificial Sequence
  Synthetic
EVQLVESGGSLVQAGDSLRLSCAASGAFGSNVFMGWFRQAPGKEREFVASITPHHTVTDYADSVRGRFSISADSAKNTVYLQMNSLKPEDTAVYYCAAAIYRNASVLDYWGQGTQVTVSS

SEQ ID NO: 350 - DNA, 417 bp, Artificial Sequence
  Synthetic
aaggagatataccatggaagttcaactggttgaatctggtggcagtttagttcaagccggtgatagccttcgtctgagctgcgccgcaagcggagctttcggttctaacgttttcatgggttggtttcgccaggcacctggtaaagaacgtgaatttgtggcatccattacccctcatcacacggtcaccgactatgccgattctgttcgtggtcgcttcagcatttcagcagattctgcgaagaataccgtgtacttacagatgaactcactgaaacctgaggataccgccgtttattattgtgcggcagccatttataggaacgcgtcggttttggactattggggtcagggcacacaagtcacggtctcaagcggcggaagctctggtgaacagaaactgatttcagaagccaa

SEQ ID NO: 351 - protein, 7 aa, Artificial Sequence
  Synthetic
AFGSKVF

SEQ ID NO: 352 - protein, 5 aa, Artificial Sequence
  Synthetic
PHHTV

SEQ ID NO: 353 - protein, 9 aa, Artificial Sequence
  Synthetic
AIYRNASVL

SEQ ID NO: 354 - protein, 120 aa, Artificial Sequence
  Synthetic
EVQLVESGGGLVQAGDSLRLSCAASGAFGSKVFMGWFRQAPGKEREFVASITPHHTVTDYADSVRGRFSISADSAKNTVYLQMNSLKPEDTAVYYCAAAIYRNASVLDYWGQGTQVTVSS

SEQ ID NO: 355 - DNA, 415 bp, Artificial Sequence
  Synthetic
ggagatataccatggaagttcaactggttgaatctggtggcggtttagttcaagccggtgatagccttcgtctgagctgcgccgcaagcggagctttcggttctaaagttttcatgggttggtttcgccaggcacctggtaaagaacgtgaatttgtggcatccattacccctcatcacacggtcaccgactatgccgattctgttcgtggtcgcttcagcatttcagcagattctgcgaagaataccgtgtacttacagatgaactcactgaaacctgaggataccgccgtttattattgtgcggcagccatttataggaacgcgtcggttttggactattggggtcagggcacacaagtcacggtctcaagcggcggaagctctggtgaacagaaactgatttcagaagccaa

SEQ ID NO: 356 - protein, 7 aa, Artificial Sequence
  Synthetic
AFGSNVF

SEQ ID NO: 357 - protein, 5 aa, Artificial Sequence
  Synthetic
PHHTV

SEQ ID NO: 358 - protein, 9 aa, Artificial Sequence
  Synthetic
AIYRNASVL

SEQ ID NO: 359 - protein, 120 aa, Artificial Sequence
  Synthetic
EVQLVESGGGLVQAGDSLRLSCATSGAFGSNVFMGWFRQAPGKEREFVASITPHHTVTDYADSVRGRFSISADSAKNTVYLQMKSLKPEDTAVYYCAAAIYRNASVLDYWGQGTQVTVSS

SEQ ID NO: 360 - DNA, 413 bp, Artificial Sequence
  Synthetic
agatataccatggaagttcaactggttgaatctggtggcggtttagttcaagccggtgatagccttcgtctgagctgcgccacaagcggagctttcggttctaacgttttcatgggttggtttcgccaggcacctggtaaagaacgtgaatttgtggcatccattacccctcatcacacggtcaccgactatgccgattctgttcgtggtcgcttcagcatttcagcagattctgcgaagaataccgtgtacttacagatgaaatcactgaaacctgaggataccgccgtttattattgtgcggcagccatttataggaacgcgtcggttttggactattgggggcagggcacacaagtcacggtctcaagcggcggaagctctggtgaacagaaactgatttcagaagccaa

SEQ ID NO: 361 - protein, 7 aa, Artificial Sequence
  Synthetic
AFGSNVF

SEQ ID NO: 362 - protein, 5 aa, Artificial Sequence
  Synthetic
PHHTV

SEQ ID NO: 363 - protein, 9 aa, Artificial Sequence
  Synthetic
VIYRNASVL

SEQ ID NO: 364 - protein, 120 aa, Artificial Sequence
  Synthetic
EVQLVESGGGLVQAGDSLRLSCAASGAFGSNVFMGWFRQAPGKEREFVASITPHHTVTDYADSVRGRFSISADSAKNTVYLQMNSLKPEDTAVYYCAAVIYRNASVLDYWGQGTQVTVSS

SEQ ID NO: 365 - DNA, 417 bp, Artificial Sequence
  Synthetic
aaggagatataccatggaagttcaactggttgaatctggtggcggtttagttcaagccggtgatagccttcgtctgagctgcgccgcaagcggagctttcggttctaacgttttcatgggttggtttcgccaggcacctggtaaagaacgtgaatttgtggcatccattacccctcatcacacggtcaccgactatgccgattctgttcgtggtcgcttcagcatttcagcagattctgcgaagaataccgtgtacttacagatgaactcactgaaacctgaggataccgccgtttattattgtgcggcagtcatttataggaacgcgtcggttttggactattggggtcagggcacacaagtcacggtctcaagcggcggaagctctggtgaacagaaactgatttcagaagccaa

SEQ ID NO: 366 - protein, 7 aa, Artificial Sequence
  Synthetic
AFGSNVF

SEQ ID NO: 367 - protein, 5 aa, Artificial Sequence
  Synthetic
PHHTV

SEQ ID NO: 368 - protein, 9 aa, Artificial Sequence
  Synthetic
AIYRNASVL

SEQ ID NO: 369 - protein, 120 aa, Artificial Sequence
  Synthetic
EVQLVESGGGLVQAGDSLRLSCAASGAFGSNVFMGWFRQAPGKEREFVASLTPHHTVTDYADSVRGRFSISADSAKNTVYLQMNSLKPEDTAVYYCAAAIYRNASVLDYWGQGTQVTVSS

SEQ ID NO: 370 - DNA, 416 bp, Artificial Sequence
  Synthetic
aggagatataccatggaagttcaactggttgaatctggtggcggtttagttcaagccggtgatagccttcgtctgagctgcgccgcaagcggagctttcggttctaacgttttcatgggttggtttcgccaggcacctggtaaagaacgtgaatttgtggcatcccttacccctcatcacacggtcaccgactatgccgattctgttcgtggtcgcttcagcatttcagcagattctgcgaagaataccgtgtacttacagatgaactcactgaaacctgaggataccgccgtttattattgtgcggcagccatttataggaacgcgtcggttttggactattggggtcagggcacacaagtcacggtctcaagcggcggaagctctggtgaacagaaactgatttcagaagccaa

SEQ ID NO: 371 - protein, 7 aa, Artificial Sequence
  Synthetic
AFGSNVF

SEQ ID NO: 372 - protein, 5 aa, Artificial Sequence
  Synthetic
PHHTV

SEQ ID NO: 373 - protein, 9 aa, Artificial Sequence
  Synthetic
AIYRNASVL

SEQ ID NO: 374 - protein, 120 aa, Artificial Sequence
  Synthetic
EVQLVDSGGGLVQAGDRLRLSCAASGAFGSNVFMGWFRQAPGKEREFVASITPHHTVTDYADSVRGRFSISADSAKNTVYLQMNSLKPEDTAVYYCAAAIYRNASVLDYWGQGTQGTVSS

SEQ ID NO: 375 - DNA, 418 bp, Artificial Sequence
  Synthetic
gaaggagatataccatggaagttcaactggttgactctggtggcggtttagttcaagccggtgatcgccttcgtctgagctgcgccgcaagcggagctttcggttctaacgttttcatgggttggtttcgccaggcacctggtaaagaacgtgaatttgtggcatccattacccctcatcacacggtcaccgactatgccgattctgttcgtggtcgcttcagcatttcagcagattctgcgaagaataccgtgtacttacagatgaactcactgaaacctgaggataccgccgtttattattgtgcggcagccatttataggaacgcgtcggttttggactattggggtcagggcacacaaggcacggtctcaagcggcggaagctctggtgaacagaaactgatttcagaagccaa

SEQ ID NO: 376 - protein, 7 aa, Artificial Sequence
  Synthetic
AFGSNVF

SEQ ID NO: 377 - protein, 5 aa, Artificial Sequence
  Synthetic
PHHTV

SEQ ID NO: 378 - protein, 9 aa, Artificial Sequence
  Synthetic
AIYRNASVL

SEQ ID NO: 379 - protein, 120 aa, Artificial Sequence
  Synthetic
EVQLVESGGGLVQAGDSLRLSCAASGAFGSNVFMGWFRQAPGKEREFVASITPHHTVTDYADSVRGRFSISADSAKNTVYLQMNSLKPEDTAVYYCATAIYRNASVLDYWGQGTQVTVSS

SEQ ID NO: 380 - DNA, 415 bp, Artificial Sequence
  Synthetic
ggagatataccatggaagttcaactggttgaatctggtggcggtttagttcaagccggtgatagccttcgtctgagctgcgccgcaagcggagctttcggttctaacgttttcatgggttggtttcgccaggcacctggtaaagaacgtgaatttgtggcatccattacccctcatcacacggtcaccgactatgccgattctgttcgtggtcgcttcagcatttcagcagattctgcgaagaataccgtgtacttacagatgaactcactgaaacctgaggataccgccgtttattattgtgcgacagccatttataggaacgcgtcggttttggactattggggtcagggcacacaagtcacggtctcaagcggcggaagctctggtgaacagaaactgatttcagaagccaa

SEQ ID NO: 381 - protein, 7 aa, Artificial Sequence
  Synthetic
AFGSNVF

SEQ ID NO: 382 - protein, 5 aa, Artificial Sequence
  Synthetic
PHHTV

SEQ ID NO: 383 - protein, 9 aa, Artificial Sequence
  Synthetic
AIYRNASVL

SEQ ID NO: 384 - protein, 120 aa, Artificial Sequence
  Synthetic
EVQLVESGGGLVQAGDSLRLSCAASGAFGSNVFMGCFRQAPGKEREFVASITPHHTVTDYADSVRGRFSISADSAKNTVYLQMNSLKPEDTAVYYCAAAIYRNASVLDYWGQGTQGTVSS

SEQ ID NO: 385 - DNA, 407 bp, Artificial Sequence
  Synthetic
accatggaagttcaactggttgaatctggtggcggtttagttcaagccggtgatagccttcgtctgagctgcgccgcaagcggagctttcggttctaacgttttcatgggttgttttcgccaggcacctggtaaagaacgtgaatttgtggcatccattacccctcatcacacggtcaccgactatgccgattctgttcgtggtcgcttcagcatttcagcagattctgcgaagaataccgtgtacttacagatgaactcactgaaacctgaggataccgccgtttattattgtgcggcagccatttataggaacgcgtcggttttggactattggggtcagggcacacaaggcacggtctcaagcggcggaagctctggtgaacagaaactgatttcagaagccaa

SEQ ID NO: 386 - protein, 7 aa, Artificial Sequence
  Synthetic
AFGSNVF

SEQ ID NO: 387 - protein, 5 aa, Artificial Sequence
  Synthetic
PHHTV

SEQ ID NO: 388 - protein, 9 aa, Artificial Sequence
  Synthetic
AIYGNASVL

SEQ ID NO: 389 - protein, 120 aa, Artificial Sequence
  Synthetic
EVQLVESGGGLVQAGDSLRLSCAASGAFGSNVFMGWFRQAPGKEREFVASITPHHTVTDYADSVRGRFSISADSAKNTVYLQMNSLKPEDTAVYYCAAAIYGNASVLDYWGQGTQVTVSS

SEQ ID NO: 390 - DNA, 413 bp, Artificial Sequence
  Synthetic
agatataccatggaagttcaactggttgaatctggtggcggtttagttcaagccggtgatagccttcgtctgagctgcgccgcaagcggagctttcggttctaacgttttcatgggttggtttcgccaggcacctggtaaagaacgtgaatttgtggcatccattacccctcatcacacggtcaccgactatgccgattctgttcgtggtcgcttcagcatttcagcagattctgcgaagaataccgtgtacttacagatgaactcactgaaacctgaggataccgccgtttattattgtgcggcagccatttatgggaacgcgtcggttttggactattggggtcagggcacacaagtcacggtctcaagcggcggaagctctggtgaacagaaactgatttcagaagccaa

SEQ ID NO: 391 - protein, 7 aa, Artificial Sequence
  Synthetic
DFGYNVF

SEQ ID NO: 392 - protein, 5 aa, Artificial Sequence
  Synthetic
PHHTV

SEQ ID NO: 393 - protein, 9 aa, Artificial Sequence
  Synthetic
AIYRNASVL

SEQ ID NO: 394 - protein, 120 aa, Artificial Sequence
  Synthetic
EVQLVESGGGLVQAGDSLRLSCAESGDFGYNVFMGWFRQAPGKEREFVASITPHHTVTDYADSVRGRFSISADSAKNTVYLQMNSLKPEDTAVYYCAAAIYRNASVLDYWGHGTQVTVSS

SEQ ID NO: 395 - DNA, 407 bp, Artificial Sequence
  Synthetic
accatggaagttcaactggttgaatctggtggcggtttagttcaagccggagatagccttcgtctgagctgcgccgaaagcggagatttcggttataacgttttcatgggttggtttcgccaagcacctggtaaagaacgtgaatttgtggcatccattacccctcatcacacggtcaccgactatgccgattctgttcgtggtcgcttcagcatttcagcagattctgcgaagaataccgtgtacttacagatgaactcactgaaacctgaggataccgccgtttattattgtgcggcagccatttataggaacgcgtcggttttggactattggggtcatggcacacaagtcacggtctcaagcggcggaagctctggtgaacagaaacttatttcagaagccaa

SEQ ID NO: 396 - protein, 7 aa, Artificial Sequence
  Synthetic
AFGSNVF

SEQ ID NO: 397 - protein, 5 aa, Artificial Sequence
  Synthetic
PHHTV

SEQ ID NO: 398 - protein, 9 aa, Artificial Sequence
  Synthetic
AIYRNASVL

SEQ ID NO: 399 - protein, 120 aa, Artificial Sequence
  Synthetic
EVQLFESGGGLVQAGDSLRLSCAASGAFGSNVFMGWFRQAPGKEREFVASITPHHTVTDYADSVRGRFSFSADSAKNTVYLQMNSLKPEDTAVYYCAAAIYRNASVLDYWGQGTQVTVSS

SEQ ID NO: 400 - DNA, 413 bp, Artificial Sequence
  Synthetic
agatataccatggaagttcaactgtttgaatctggtggcggtttagttcaagccggtgatagccttcgtctgagctgcgccgcaagcggagctttcggttctaacgttttcatgggttggtttcgccaggcacctggtaaagaacgtgaatttgtggcatccattacccctcatcacacggtcaccgactatgccgattctgttcgtggtcgcttcagcttttcagcagattctgcgaagaataccgtgtacttacagatgaactcactgaaacctgaggataccgccgtttattattgtgcggcagccatttataggaacgcgtcggttttggactattggggtcagggcacacaagtcacggtctcaagcggcggaagctctggtgaacagaaactgatttcagaagccaa

SEQ ID NO: 401 - protein, 7 aa, Artificial Sequence
  Synthetic
FQLSCYC

SEQ ID NO: 402 - protein, 5 aa, Artificial Sequence
  Synthetic
QHAFR

SEQ ID NO: 403 - protein, 7 aa, Artificial Sequence
  Synthetic
GEHCLAF

SEQ ID NO: 404 - protein, 118 aa, Artificial Sequence
  Synthetic
QVQLQESGGVLVQAGDSLRLSCAASGFQLSCYCMGWFRQAPGKEREFVASITQHAFRTYYADSVKGRFTISRDDARNTVYLQMNSLKPEDTAVYYCAAGEHCLAFDYWGQGTQVTVSS

SEQ ID NO: 405 - DNA, 401 bp, Artificial Sequence
  Synthetic
atataccatgcaggttcaactgcaagaatctggtggcgttttagttcaagccggtgatagccttcgtctgagctgcgccgcaagcggatttcagctctcgtgttactgtatgggttggtttcgccaggcacctggtaaagaacgtgaatttgtggcatccattacccagcacgcctttcgtacctactatgccgattctgttaaaggtcgcttcactatttcacgcgatgatgcgcgtaataccgtgtacttacagatgaactcactgaaacctgaggataccgccgtttattattgtgcggcaggcgagcactgtctcgccttcgactattggggtcagggcacacaagtcacggtctcaagcggcggaagctctggtgaacagaaactgatttcagaag

SEQ ID NO: 406 - protein, 7 aa, Artificial Sequence
  Synthetic
FQLSCYC

SEQ ID NO: 407 - protein, 5 aa, Artificial Sequence
  Synthetic
QHAFR

SEQ ID NO: 408 - protein, 10 aa, Artificial Sequence
  Synthetic
AETPNILVYE

SEQ ID NO: 409 - protein, 121 aa, Artificial Sequence
  Synthetic
EVQLVESGGGLVQAGDSLRLSCAASGFQLSCYCMGWFRQAPGKEREFVASITQHAFRTYYADSVKGRFTISRDDARNTVYLQMNSLKPEDTAVYYCAAAETPNILVYENYWGQGTQVTVSS

SEQ ID NO: 410 - DNA, 406 bp, Artificial Sequence
  Synthetic
accatggaagttcaactggttgaatctggtggcggtttagttcaagccggtgatagccttcgtctgagctgcgccgcaagcggatttcagctctcgtgttactgtatgggttggtttcgccaggcacctggtaaagaacgtgaatttgtggcatccattacccagcacgcctttcgtacctactatgccgattctgttaaaggtcgcttcactatttcacgcgatgatgcgcgtaataccgtgtacttacagatgaactcactgaaacctgaggataccgccgtttattattgtgcggcagccgagaccccgaatatcctcgtgtacgagaactattggggtcagggcacacaagtcacggtctcaagcggcggaagctctggtgaacagaaactgatttcagaag

SEQ ID NO: 411 - protein, 7 aa, Artificial Sequence
  Synthetic
FQLSCYC

SEQ ID NO: 412 - protein, 5 aa, Artificial Sequence
  Synthetic
QHAFR

SEQ ID NO: 413 - protein, 7 aa, Artificial Sequence
  Synthetic
GEHCLAF

SEQ ID NO: 414 - protein, 118 aa, Artificial Sequence
  Synthetic
QVQLQESGGVLVQAGDSLRLSCAASGFQLSCYCMGWFRQAPGKEREFVASITQHAFRTYYADSVKGRFTISRDDARNTVYLQMNSLKPKDTAVYYCAAGEHCLAFDYWGQGTQVTVSS

SEQ ID NO: 415 - DNA, 401 bp, Artificial Sequence
  Synthetic
atataccatgcaggttcaactgcaagaatctggtggcgttttagttcaagccggtgatagccttcgtctgagctgcgccgcaagcggatttcagctctcgtgttactgtatgggttggtttcgccaggcacctggtaaagaacgtgaatttgtggcatccattacccagcacgcctttcgtacctactatgccgattctgttaaaggtcgcttcactatttcacgcgatgatgcgcgtaataccgtgtacttacagatgaactcactgaaacctaaggataccgccgtttattattgtgcggcaggcgagcactgtctcgccttcgactattggggtcagggcacacaagtcacggtctcaagcggcggaagctctggtgaacagaaactgatttcagaag

SEQ ID NO: 416 - protein, 7 aa, Artificial Sequence
  Synthetic
FQLSCYC

SEQ ID NO: 417 - protein, 5 aa, Artificial Sequence
  Synthetic
QHAFR

SEQ ID NO: 418 - protein, 10 aa, Artificial Sequence
  Synthetic
DPSFSDAIAS

SEQ ID NO: 419 - protein, 121 aa, Artificial Sequence
  Synthetic
EVQLVESGGGLVQAGDSLRLSCAASGFQLSCYCMGWFRQAPGKEREFVASITQHAFRTYYADSVKGRFTISRDDARNTVYLQTNSLKPEDTAVYYCAVDPSFSDAIASDYWGQGTQVTVSS

SEQ ID NO: 420 - DNA, 416 bp, Artificial Sequence
  Synthetic
aaggagatataccatggaagttcaactggttgaatctggtggcggtttagttcaagccggtgatagccttcgtctgagctgcgccgcaagcggatttcagctctcgtgttactgtatgggttggtttcgccaggcacctggtaaagaacgtgaatttgtggcatccattacccagcacgcctttcgtacctactatgccgattctgttaaaggtcgcttcactatttcacgcgatgatgcgcgtaataccgtgtacttacagacgaactcactgaaacctgaggataccgccgtttattattgtgcggttgatccttctttctccgacgctatcgcctcggactattggggtcagggcacacaagtcacggtctcaagcggcggaagctctggtgaacagaaactgatttcagaag

SEQ ID NO: 421 - protein, 7 aa, Artificial Sequence
  Synthetic
FQLSCYC

SEQ ID NO: 422 - protein, 5 aa, Artificial Sequence
  Synthetic
QHAFR

SEQ ID NO: 423 - protein, 7 aa, Artificial Sequence
  Synthetic
GEHCLAF

SEQ ID NO: 424 - protein, 118 aa, Artificial Sequence
  Synthetic
QVQLQESGGGLVQAGDSLRLSCAASGFQLSCYCMGWFRQAPGKEREFVASITQHAFRTYYADSVKGRFTISRDDARNTVYLQMNSLKPEDTAVYYCAAGEHCLAFDYWGQGTQVTVSS

SEQ ID NO: 425 - DNA, 397 bp, Artificial Sequence
  Synthetic
accatgcaggttcaactgcaagaatctggtggcggtttagttcaagccggtgatagccttcgtctgagctgcgccgcaagcggatttcagctctcgtgttactgtatgggttggtttcgccaggcacctggtaaagaacgtgaatttgtggcatccattacccagcacgcctttcgtacctactatgccgattctgttaaaggtcgcttcactatttcacgcgatgatgcgcgtaataccgtgtacttacagatgaactcactgaaacctgaggataccgccgtttattattgtgcggcaggcgagcactgtctcgccttcgactattggggtcagggcacacaagtcacggtctcaagcggcggaagctctggtgaacagaaactgatttcagaag

SEQ ID NO: 426 - protein, 7 aa, Artificial Sequence
  Synthetic
FQLSCYC

SEQ ID NO: 427 - protein, 5 aa, Artificial Sequence
  Synthetic
QHAFR

SEQ ID NO: 428 - protein, 10 aa, Artificial Sequence
  Synthetic
AETPNILVYE

SEQ ID NO: 429 - protein, 121 aa, Artificial Sequence
  Synthetic
EVQLVESGGGLVQAGDSLRLSCAASGFQLSCYCMGWFRQAPGKEREFVASITQHAFRTYYADSVKGRFTISRDDARNTVYLQMNSLKPEDTAVYYCAAAETPNILVYETYWGQGTQVTVSS

SEQ ID NO: 430 - DNA, 416 bp, Artificial Sequence
  Synthetic
aaggagatataccatggaagttcaactggttgaatctggtggcggtttagttcaagccggtgatagccttcgtctgagctgcgccgcaagcggatttcagctctcgtgttactgtatgggttggtttcgccaggcacctggtaaagaacgtgaatttgtggcatccattacccagcacgcctttcgtacctactatgccgattctgttaaaggtcgcttcactatttcacgcgatgatgcgcgtaataccgtgtacttacagatgaactcactgaaacctgaggataccgccgtttattattgtgcggcagccgagaccccgaatatcctcgtgtacgagacctattggggtcagggcacacaagtcacggtctcaagcggcggaagctctggtgaacagaaactgatttcagaag

SEQ ID NO: 431 - protein, 7 aa, Artificial Sequence
  Synthetic
FQLSCYC

SEQ ID NO: 432 - protein, 5 aa, Artificial Sequence
  Synthetic
QHAFR

SEQ ID NO: 433 - protein, 10 aa, Artificial Sequence
  Synthetic
DPSFSDAIAS

SEQ ID NO: 434 - protein, 121 aa, Artificial Sequence
  Synthetic
EVQLVESGGGLVQAGDSLRLSCAASGFQLSCYCMGWFRQAPGKEREFVASITQHAFRTYYADSVKGRFTISRDDARNTVYLQMNSLKPEDTAVYYCAVDPSFSDAIASDYWGQGTQVTVSS

SEQ ID NO: 435 - DNA, 406 bp, Artificial Sequence
  Synthetic
accatggaagttcaactggttgaatctggtggcggtttagttcaagccggtgatagccttcgtctgagctgcgccgcaagcggatttcagctctcgtgttactgtatgggttggtttcgccaggcacctggtaaagaacgtgaatttgtggcatccattacccagcacgcctttcgtacctactatgccgattctgttaaaggtcgcttcactatttcacgcgatgatgcgcgtaataccgtgtacttacagatgaactcactgaaacctgaggatactgccgtttattattgtgcggttgatccttctttctccgacgctatcgcctcggactattggggtcagggcacacaagtcacggtctcaagcggcggaagctctggtgaacagaaactgatttcagaag

SEQ ID NO: 436 - protein, 7 aa, Artificial Sequence
  Synthetic
FQLSCYC

SEQ ID NO: 437 - protein, 5 aa, Artificial Sequence
  Synthetic
QHAFR

SEQ ID NO: 438 - protein, 10 aa, Artificial Sequence
  Synthetic
AETPNILVYE

SEQ ID NO: 439 - protein, 121 aa, Artificial Sequence
  Synthetic
EVQLVESGGVLVQAGDSLRLSCAASGFQLSCYCMGWFRQAPGKEREFVASITQHAFRTYYADSVKGRFTISRDDARNTVYLQMNSLKPEDTAVYYCAAAETPNILVYENYWGQGTQVTVSS

SEQ ID NO: 440 - DNA, 406 bp, Artificial Sequence
  Synthetic
accatggaagttcaactggttgaatctggtggcgttttagttcaagccggtgatagccttcgtctgagctgcgccgcaagcggatttcagctctcgtgttactgtatgggttggtttcgccaggcacctggtaaagaacgtgaatttgtggcatccattacccagcacgcctttcgtacctactatgccgattctgttaaaggtcgcttcactatttcacgcgatgatgcgcgtaataccgtgtacttacagatgaactcactgaaacctgaggataccgccgtttattattgtgcggcagccgagaccccgaatatcctcgtgtacgagaactattggggtcagggcacacaagtcacggtctcaagcggcggaagctctggtgaacagaaactgatttcagaag

SEQ ID NO: 441 - protein, 7 aa, Artificial Sequence
  Synthetic
FQLSCYC

SEQ ID NO: 442 - protein, 5 aa, Artificial Sequence
  Synthetic
QHAFR

SEQ ID NO: 443 - protein, 10 aa, Artificial Sequence
  Synthetic
AETPNILVYE

SEQ ID NO: 444 - protein, 121 aa, Artificial Sequence
  Synthetic
EVQLVESGGGLVQAGNSLRLSCAASGFQLSCYCMGWFRQAPGKEREFVASITQHAFRTYYADSVKGRFTISRDDARNTVYLQMNSLKPEDTAVYYCAAAETPNILVYENYWGQGTQVTVSS

SEQ ID NO: 445 - DNA, 406 bp, Artificial Sequence
  Synthetic
accatggaagttcaactggttgaatctggtggcggtttagttcaagccggtaatagccttcgtctgagctgcgccgcaagcggatttcagctctcgtgttactgtatgggttggtttcgccaggcacctggtaaagaacgtgaatttgtggcatccattacccagcacgcctttcgtacctactatgccgattctgttaaaggtcgcttcactatttcacgcgatgatgcgcgtaataccgtgtacttacagatgaactcactgaaacctgaggataccgccgtttattattgtgcggcagccgagaccccgaatatcctcgtgtacgagaactattggggtcagggcacacaagtcacggtctcaagcggcggaagctctggtgaacagaaactgatttcagaag

SEQ ID NO: 446 - protein, 7 aa, Artificial Sequence
  Synthetic
FQLSCYC

SEQ ID NO: 447 - protein, 5 aa, Artificial Sequence
  Synthetic
QHAFR

SEQ ID NO: 448 - protein, 7 aa, Artificial Sequence
  Synthetic
GEHCLAF

SEQ ID NO: 449 - protein, 118 aa, Artificial Sequence
  Synthetic
QVQLQESGGVLVQAGDSLRLSCAASGFQLSCYCMGWFRQAPGKEREFVASITQHAFRTYYADSVKGRFTISRDDVRNTVYLQMNSLKPEDTAVYYCAAGEHCLAFDYWGQGTQVTVSS

SEQ ID NO: 450 - DNA, 407 bp, Artificial Sequence
  Synthetic
aaggagatataccatgcaggttcaactgcaagaatctggtggcgttttagttcaagccggtgatagccttcgtctgagctgcgccgcaagcggatttcagctctcgtgttactgtatgggttggtttcgccaggcacctggtaaagaacgtgaatttgtggcatccattacccagcacgcctttcgtacctactatgccgattctgttaaaggtcgcttcactatttcacgcgatgatgtgcgtaataccgtgtacttacagatgaactcactgaaacctgaggataccgccgtttattattgtgcggcaggcgagcactgtctcgccttcgactattggggtcagggcacacaagtcacggtctcaagcggcggaagctctggtgaacagaaactgatttcagaag

SEQ ID NO: 451 - protein, 7 aa, Artificial Sequence
  Synthetic
FQLSCYC

SEQ ID NO: 452 - protein, 5 aa, Artificial Sequence
  Synthetic
QHAFR

SEQ ID NO: 453 - protein, 10 aa, Artificial Sequence
  Synthetic
AETPNILVYE

SEQ ID NO: 454 - protein, 121 aa, Artificial Sequence
  Synthetic
EVQLVESGGGLVQAGDSLRLSCAASGFQLSCYCMGWFRQAPGKEREFVASITQHAFRTYYADSVKGRFTISRDDARNTVYLQMNSLKPEDTAVYYCAAAETPNILVYENYRGQGTQVTVSS

SEQ ID NO: 455 - DNA, 410 bp, Artificial Sequence
  Synthetic
atataccatggaagttcaactggttgaatctggtggcggtttagttcaagccggtgatagccttcgtctgagctgcgccgcaagcggatttcagctctcgtgttactgtatgggttggtttcgccaggcacctggtaaagaacgtgaatttgtggcatccattacccagcacgcctttcgtacctactatgccgattctgttaaaggtcgcttcactatttcacgcgatgatgcgcgtaataccgtgtacttacagatgaactcactgaaacctgaggataccgccgtttattattgtgcggcagccgagaccccgaatatcctcgtgtacgagaactatcggggtcagggcacacaagtcacggtctcaagcggcggaagctctggtgaacagaaactgatttcagaag

SEQ ID NO: 456 - protein, 7 aa, Artificial Sequence
  Synthetic
FPLSCYC

SEQ ID NO: 457 - protein, 5 aa, Artificial Sequence
  Synthetic
QHAFR

SEQ ID NO: 458 - protein, 10 aa, Artificial Sequence
  Synthetic
AETPNILVYE

SEQ ID NO: 459 - protein, 121 aa, Artificial Sequence
  Synthetic
EVQLVESGGGLVQAGDSLRLSCAASGFPLSCYCMGWFRQAPGKEREFVASITQHAFRTYYADSVKGRFTISRDDARNTVYLQMNSLKPEDTAVYYCAAAETPNILVYETYWGQGTQVTVSS

SEQ ID NO: 460 - DNA, 408 bp, Artificial Sequence
  Synthetic
ataccatggaagttcaactggttgaatctggtggcggtttagttcaagccggtgatagccttcggctgagctgcgccgcaagcggatttccgctctcgtgttactgtatgggttggtttcgccaggcacctggtaaagaacgtgaatttgtggcatccattacccagcacgcctttcgtacctactatgccgattctgttaaaggtcgcttcactatttcacgcgatgatgcgcgtaataccgtgtacttacagatgaactcactgaaacctgaggataccgccgtttattattgtgcggcagccgagaccccgaatatcctcgtgtacgagacctattggggtcagggcacacaagtcacggtctcaagcggcggaagctctggtgaacagaaactgatttcagaag

SEQ ID NO: 461 - protein, 7 aa, Artificial Sequence
  Synthetic
FQLSCYC

SEQ ID NO: 462 - protein, 5 aa, Artificial Sequence
  Synthetic
QHAFR

SEQ ID NO: 463 - protein, 10 aa, Artificial Sequence
  Synthetic
AETPNILVYE

SEQ ID NO: 464 - protein, 121 aa, Artificial Sequence
  Synthetic
EVQLVESGGGLVQAGDSLRMSCAASGFQLSCYCMGWFRQAPGKEREFVASITQHAFRTYYADSVKGRFTISRDDARNTVYLQMNSLKPEDTAVYYCAAAETPNILVYENYWGQGTQVTVSS

SEQ ID NO: 465 - DNA, 414 bp, Artificial Sequence
  Synthetic
ggagatataccatggaagttcaactggttgaatctggtggcggtttagttcaagccggtgatagccttcgtatgagctgcgccgcaagcggatttcagctctcgtgttactgtatgggttggtttcgccaggcacctggtaaagaacgtgaatttgtggcatccattacccagcacgcctttcgtacctactatgccgattctgttaaaggtcgcttcactatttcacgcgatgatgcgcgtaataccgtgtacttacagatgaactcactgaaacctgaggataccgccgtttattattgtgcggcagccgagaccccgaatatcctcgtgtacgagaactattggggtcagggcacacaagtcacggtctcaagcggcggaagctctggtgaacagaaactgatttcagaag

SEQ ID NO: 466 - protein, 7 aa, Artificial Sequence
  Synthetic
FQLSCYC

SEQ ID NO: 467 - protein, 5 aa, Artificial Sequence
  Synthetic
QHAFR

SEQ ID NO: 468 - protein, 10 aa, Artificial Sequence
  Synthetic
AETPNILVYE

SEQ ID NO: 469 - protein, 121 aa, Artificial Sequence
  Synthetic
EVQLVESGGGLVQAGDSLRLSCAASGFQLSCYCMGCFRQAPGKEREFVASITQHAFRTYYADSVKGRFTISRDDVRNTVYLQMNSLKPEDTAVYYCAAAETPNILVYENYWGQGTQVTVSS

SEQ ID NO: 470 - DNA, 406 bp, Artificial Sequence
  Synthetic
accatggaagttcaactggttgaatctggtggcggtttagttcaagccggtgatagccttcgtctgagctgcgccgcaagcggatttcagctctcgtgttactgtatgggttgttttcgccaggcacctggtaaagaacgtgaatttgtggcatccattacccagcacgcctttcgtacctactatgccgattctgttaaaggtcgcttcactatttcacgcgatgatgtgcgtaataccgtgtacttacagatgaactcactgaaacctgaggataccgccgtttattattgtgcggcagccgagaccccgaatatcctcgtgtacgagaactattggggtcagggcacacaagtcacggtctcaagcggcggaagctctggtgaacagaaactgatttcagaag

SEQ ID NO: 471 - protein, 7 aa, Artificial Sequence
  Synthetic
FQLSCYC

SEQ ID NO: 472 - protein, 5 aa, Artificial Sequence
  Synthetic
QHAFR

SEQ ID NO: 473 - protein, 10 aa, Artificial Sequence
  Synthetic
DPSFSDAIAS

SEQ ID NO: 474 - protein, 121 aa, Artificial Sequence
  Synthetic
EVQLVESGGGLVQAGDSLRLSCAASGFQLSCYCMGWFRQAPGKEREFVASITQHAFRTYYADSVKGRFTISRDDARNTVYLQMNSLKPEDTAVYYCVVDPSFSDAIASDYWGQGTQVTVSS

SEQ ID NO: 475 - DNA, 408 bp, Artificial Sequence
  Synthetic
ataccatggaagttcaactggttgaatctggtggcggtttagttcaagccggtgatagccttcgtctgagctgcgccgcaagcggatttcagctctcgtgttactgtatgggttggtttcgccaggcacctggtaaagaacgtgaatttgtggcatccattacccagcacgcctttcgtacctactatgccgattctgttaaaggtcgcttcactatttcacgcgatgatgcgcgtaataccgtgtacttacagatgaactcactgaaacctgaggataccgccgtttattattgtgtggttgatccttctttctctgacgccatcgcctcggactattggggtcagggcacacaagtcacggtctcaagcggcggaagctctggtgaacagaaactgatttcagaag

SEQ ID NO: 476 - protein, 7 aa, Artificial Sequence
  Synthetic
FQLSCYC

SEQ ID NO: 477 - protein, 5 aa, Artificial Sequence
  Synthetic
QHAFR

SEQ ID NO: 478 - protein, 10 aa, Artificial Sequence
  Synthetic
AETPNILVYE

SEQ ID NO: 479 - protein, 121 aa, Artificial Sequence
  Synthetic
EVQLVESGGGLVQAGDSLRLSCAASGFQLSCYCMGWFRQAPGKEHEFVASITQHAFRTYYADSVKGRFTISRDDARNTVYLQMNSLKPEDTAVYYCAAAETPNILVYENYWGQGTQVTVSS

SEQ ID NO: 480 - DNA, 408 bp, Artificial Sequence
  Synthetic
ataccatggaagttcaactggttgaatctggtggcggtttagttcaagccggtgatagccttcgtctgagctgcgccgcaagcggatttcagctctcgtgttactgtatgggttggtttcgccaggcacctggtaaagaacatgaatttgtggcatccattacccagcacgcctttcgtacctactatgccgattctgttaaaggtcgcttcactatttcacgcgatgatgcgcgtaataccgtgtacttacagatgaactcactgaaacctgaggataccgccgtttattattgtgcggcagccgagaccccgaatatcctcgtgtacgagaactattggggtcagggcacacaagtcacggtctcaagcggcggaagctctggtgaacagaaactgatttcagaag

SEQ ID NO: 481 - protein, 7 aa, Artificial Sequence
  Synthetic
FQLSCYC

SEQ ID NO: 482 - protein, 5 aa, Artificial Sequence
  Synthetic
QHAFR

SEQ ID NO: 483 - protein, 10 aa, Artificial Sequence
  Synthetic
AETPNILVYE

SEQ ID NO: 484 - protein, 121 aa, Artificial Sequence
  Synthetic
EVQLVESGGGLVQAGDSLRLSCAASGFQLSCYCMGCFRQAPGKEREFVASITQHAFRTYYADSVKGRFTISRDDARNTVYLQMNSLKPEDTAVYYCAAAETPNILVYENYWGQGTQVTVSS

SEQ ID NO: 485 - DNA, 412 bp, Artificial Sequence
  Synthetic
agatataccatggaagttcaactggttgaatctggtggcggtttagttcaagccggtgatagccttcgtctgagctgcgccgcaagcggatttcagctctcgtgttactgtatgggttgttttcgccaggcacctggtaaagaacgtgaatttgtggcatccattacccagcacgcctttcgtacctactatgccgattctgttaaaggtcgcttcactatttcacgcgatgatgcgcgtaataccgtgtacttacagatgaactcactgaaacctgaggataccgccgtttattattgtgcggcagccgagaccccgaatatcctcgtgtacgagaactattggggtcagggcacacaagtcacggtctcaagcggcggaagctctggtgaacagaaactgatttcagaag

SEQ ID NO: 486 - protein, 7 aa, Artificial Sequence
  Synthetic
FQLSCYC

SEQ ID NO: 487 - protein, 5 aa, Artificial Sequence
  Synthetic
QHAFR

SEQ ID NO: 488 - protein, 10 aa, Artificial Sequence
  Synthetic
AETPNILVYE

SEQ ID NO: 489 - protein, 121 aa, Artificial Sequence
  Synthetic
EVQLVESGGGLVQAGDSLRLSCAASGFQLSCYCMGWFRQAPGKEREFVASITQHAFRTYYADSVKGRFTISRDDARNTVYLQMNSLKPEDTAVYYCAAAETPNILVYENYWCQGTQVTVSS

SEQ ID NO: 490 - DNA, 406 bp, Artificial Sequence
  Synthetic
accatggaagttcaactggttgaatctggtggcggtttagttcaagccggtgatagccttcgtctgagctgcgccgcaagcggatttcagctctcgtgttactgtatgggttggtttcgccaggcacctggtaaagaacgtgaatttgtggcatccattacccagcacgcctttcgtacctactatgccgattctgttaaaggtcgcttcactatttcacgcgatgatgcgcgtaataccgtgtacttacagatgaactcactgaaacctgaggataccgccgtttattattgtgcggcagccgagaccccgaatatcctcgtgtacgagaactattggtgtcagggcacacaagtcacggtctcaagcggcggaagctctggtgaacagaaactgatttcagaag

SEQ ID NO: 491 - protein, 7 aa, Artificial Sequence
  Synthetic
FQLSCYC

SEQ ID NO: 492 - protein, 5 aa, Artificial Sequence
  Synthetic
QHAFR

SEQ ID NO: 493 - protein, 10 aa, Artificial Sequence
  Synthetic
DPSFSDAIAS

SEQ ID NO: 494 - protein, 121 aa, Artificial Sequence
  Synthetic
EVQLVESGGGLVQAGDSLRLSCAASGFQLSCYCMGWFRQAPGKEREFVASITQHAFRTYYADSVKGRFTISRDDARNTVYLQMNSLKPGDTAVYYCAVDPSFSDAIASDYWGQGTQVTVSR

SEQ ID NO: 495 - DNA, 410 bp, Artificial Sequence
  Synthetic
atataccatggaagttcaactggttgaatctggtggcggtttagttcaagccggtgatagccttcgtctgagctgcgccgcaagcggatttcagctctcgtgttactgtatgggttggtttcgccaggcacctggtaaagaacgtgaatttgtggcatccattacccagcacgcctttcgtacctactatgccgattctgttaaaggtcgcttcactatttcacgcgatgatgcgcgtaataccgtgtacttacagatgaactcactgaaacctggggataccgccgtttattattgtgcggttgatccttctttctccgacgctatcgcctcggactattggggtcagggcacacaagtcacggtctcacgcggcggaagctctggtgaacagaaactgatttcagaag

SEQ ID NO: 496 - protein, 7 aa, Artificial Sequence
  Synthetic
FQLSCYC

SEQ ID NO: 497 - protein, 5 aa, Artificial Sequence
  Synthetic
QHAFR

SEQ ID NO: 498 - protein, 10 aa, Artificial Sequence
  Synthetic
DPSFSDAIAS

SEQ ID NO: 499 - protein, 121 aa, Artificial Sequence
  Synthetic
EVQLVESGGGLVQAGDRLRLSCAASGFQLSCYCMGWFRQAPGKEREFVASITQHAFRTYYADSVKGRFTISRDDARNTVYLQMNSLKPEDTAVYYCAVDPSFSDAIASDYWGQGTQVTVSS

SEQ ID NO: 500 - DNA, 414 bp, Artificial Sequence
  Synthetic
ggagatataccatggaagttcaactggttgaatctggtggcggtttagttcaagccggtgatagacttcgtctgagctgcgccgcaagcggatttcagctctcgtgttactgtatgggttggtttcgccaggcacctggtaaagaacgtgaatttgtggcatccattacccagcacgcctttcgtacctactatgccgattctgttaaaggtcgcttcactatttcacgcgatgatgcgcgtaataccgtgtacttacagatgaactcactaaaacctgaggataccgccgtttattattgtgcggttgatccttctttctccgacgctatcgcctcggactattggggtcagggcacacaagtcacggtctcaagcggcggaagctctggtgaacagaaactgatttcagaag

SEQ ID NO: 501 - protein, 7 aa, Artificial Sequence
  Synthetic
FQLSCYC

SEQ ID NO: 502 - protein, 5 aa, Artificial Sequence
  Synthetic
QHAFR

SEQ ID NO: 503 - protein, 10 aa, Artificial Sequence
  Synthetic
AETPNILVYE

SEQ ID NO: 504 - protein, 121 aa, Artificial Sequence
  Synthetic
EGQLVESGGGLVQAGDSLRLSCAASGFQLSCYCMGWFRQAPGKEREFVASITQHAFRTYYADSVKGRFTISRDDARNTVYLQMNSLKPEDTAVYYCAAAETPNILVYENYWGQGTQVTVSS

SEQ ID NO: 505 - DNA, 406 bp, Artificial Sequence
  Synthetic
accatggaaggtcaactggttgaatctggtggcggtttagttcaagccggtgatagccttcgtctgagctgcgccgcaagcggatttcagctctcgtgttactgtatgggttggtttcgccaggcacctggtaaagaacgtgaatttgtggcatccattacccagcacgcctttcgtacctactatgccgattctgttaaaggtcgcttcactatttcacgcgatgatgcgcgtaataccgtgtacttacagatgaactcactgaaacctgaggataccgccgtttattattgtgcggcagccgagaccccgaatatcctcgtgtacgagaactattggggtcagggcacacaagtcacggtctcaagcggcggaagctctggtgaacagaaactgatttcagaag

SEQ ID NO: 506 - protein, 7 aa, Artificial Sequence
  Synthetic
FQLSCYC

SEQ ID NO: 507 - protein, 5 aa, Artificial Sequence
  Synthetic
QHAFR

SEQ ID NO: 508 - protein, 10 aa, Artificial Sequence
  Synthetic
AETPNILVYE

SEQ ID NO: 509 - protein, 121 aa, Artificial Sequence
  Synthetic
EVQLVESGGGLVQAGDSLRLSCAASGFQLSCYCMGWFRQAPGKEREFVASITQHAFRTYYADSVKGRFTISRDDARNTVYLQMNSLKPEDTAVYYCAAAETPNILVYENYWGQGTQVTVSR

SEQ ID NO: 510 - DNA, 416 bp, Artificial Sequence
  Synthetic
aaggagatataccatggaagttcaactggttgaatctggtggcggtttagttcaagccggtgatagccttcgtctgagctgcgccgcaagcggatttcagctctcgtgttactgtatgggttggtttcgccaggcacctggtaaagaacgtgaatttgtggcatccattacccagcacgcctttcgtacctactatgccgattctgttaaaggtcgcttcactatttcacgcgatgatgcgcgtaataccgtgtacttacagatgaactcactgaaacctgaggataccgccgtttattattgtgcggcagccgagaccccgaatatcctcgtgtacgagaactattggggtcagggcacacaagtcacggtctcacgcggcggaagctctggtgaacagaaactgatttcagaag

SEQ ID NO: 511 - protein, 7 aa, Artificial Sequence
  Synthetic
FQLSCYC

SEQ ID NO: 512 - protein, 5 aa, Artificial Sequence
  Synthetic
QHAFR

SEQ ID NO: 513 - protein, 10 aa, Artificial Sequence
  Synthetic
AETPNILVYE

SEQ ID NO: 514 - protein, 121 aa, Artificial Sequence
  Synthetic
EVQLVESGGGLVQAGDSLRLSCAASGFQLSCYCIGWFRQAPGKEREFVASITQHAFRTYYADSVKGRFTISRDDARNTVYLQMNSLKPEDTAVYYCAAAETPNILVYENYWGQGTQVTVSS

SEQ ID NO: 515 - DNA, 408 bp, Artificial Sequence
  Synthetic
ataccatggaagttcaactggttgaatctggtggcggtttagttcaagccggtgatagccttcgtctgagctgcgccgcaagcggatttcagctctcgtgttactgtataggttggtttcgccaggcacctggtaaagaacgtgaatttgtggcatccattacccagcacgcctttcgtacctactatgccgattctgttaaaggtcgcttcactatttcacgcgatgatgcgcgtaataccgtgtacttacagatgaactcactgaaacctgaggataccgccgtttattattgtgcggcagccgagaccccgaatatcctcgtgtacgagaactattggggtcagggcacacaagtcacggtctcaagcggcggaagctctggtgaacagaaactgatttcagaag

SEQ ID NO: 516 - protein, 7 aa, Artificial Sequence
  Synthetic
FQLSCSC

SEQ ID NO: 517 - protein, 5 aa, Artificial Sequence
  Synthetic
QHAFR

SEQ ID NO: 518 - protein, 10 aa, Artificial Sequence
  Synthetic
AETPNILVYE

SEQ ID NO: 519 - protein, 121 aa, Artificial Sequence
  Synthetic
EVQLVESGGGLVQAGDSLRLSCAASGFQLSCSCMGWFRQAPGKEREFVASITQHAFRTYYADSVKGRFTISRDDARNTVYLQMNSLKPEDTAVYYCAAAETPNILVYENYWGQGTQVTVSS

SEQ ID NO: 520 - DNA, 416 bp, Artificial Sequence
  Synthetic
aaggagatataccatggaagttcaactggttgaatctggtggcggtttagttcaagccggtgatagccttcgtctgagctgcgccgcaagcggatttcagctctcgtgttcctgtatgggttggtttcgccaggcacctggtaaagaacgtgaatttgtggcatccattacccagcacgcctttcgtacctactatgccgattctgttaaaggtcgcttcactatttcacgcgatgatgcgcgtaataccgtgtacttacagatgaactcactgaaacctgaggataccgccgtttattattgtgcggcagccgagaccccgaatatcctcgtgtacgagaactattggggtcagggcacacaagtcacggtctcaagcggcggaagctctggtgaacagaaactgatttcagaag

SEQ ID NO: 521 - protein, 7 aa, Artificial Sequence
  Synthetic
FQLSCYC

SEQ ID NO: 522 - protein, 5 aa, Artificial Sequence
  Synthetic
QHAFR

SEQ ID NO: 523 - protein, 10 aa, Artificial Sequence
  Synthetic
AETPNILVYE

SEQ ID NO: 524 - protein, 121 aa, Artificial Sequence
  Synthetic
EVQLVESGGGLVQAGDSLRLSCAASGFQLSCYCMGWFRQAPGKEREFVASITQHAFRTYYADSVKGRFTNSRDDARNTVYLQMNSLKPEDTAVYYCAAAETPNILVYENYWGQGTQVTVSS

SEQ ID NO: 525 - DNA, 416 bp, Artificial Sequence
  Synthetic
aaggagatataccatggaagttcaactggttgaatctggtggcggtttagttcaagccggtgatagccttcgtctgagctgcgccgcaagcggatttcagctctcgtgttactgtatgggttggtttcgccaggcacctggtaaagaacgtgaatttgtggcatccattacccagcacgcctttcgtacctactatgccgattctgttaaaggtcgcttcactaattcacgcgatgatgcgcgtaataccgtgtacttacagatgaactcactgaaacctgaggataccgccgtttattattgtgcggcagccgagaccccgaatatcctcgtgtacgagaactattggggtcagggcacacaagtcacggtctcaagcggcggaagctctggtgaacagaaactgatttcagaag

SEQ ID NO: 526 - protein, 7 aa, Artificial Sequence
  Synthetic
FQLSCYC

SEQ ID NO: 527 - protein, 5 aa, Artificial Sequence
  Synthetic
QHAFR

SEQ ID NO: 528 - protein, 10 aa, Artificial Sequence
  Synthetic
DPSFSDAIAS

SEQ ID NO: 529 - protein, 121 aa, Artificial Sequence
  Synthetic
EVQLVDSGGGLVQAGDRLRLSCAASGFQLSCYCMGWFRQAPGKEREFVASITQHAFRTYYADSVKGRFTISRDDARNTVYLQMNSLKPEDTAVYYCAVDPSFSDAIASDYWGQGTQVTVSS

SEQ ID NO: 530 - DNA, 417 bp, Artificial Sequence
  Synthetic
gaaggagatataccatggaagttcaactggttgactctggtggcggtttagttcaagccggtgatcgccttcgtctgagctgcgccgcaagcggatttcagctctcgtgttactgtatgggttggtttcgccaggcacctggtaaagaacgtgaatttgtggcatccattacccagcacgcctttcgtacctactatgccgattctgttaaaggtcgcttcactatttcacgcgatgatgcgcgtaataccgtgtacttacagatgaactcactgaaacctgaggataccgccgtttattattgtgcggttgatccttctttctccgacgctatcgcctcggactattggggtcagggcacacaagtcacggtctcaagcggcggaagctctggtgaacagaaactgatttcagaag

SEQ ID NO: 531 - protein, 7 aa, Artificial Sequence
  Synthetic
FQLSCYC

SEQ ID NO: 532 - protein, 5 aa, Artificial Sequence
  Synthetic
QHAFR

SEQ ID NO: 533 - protein, 10 aa, Artificial Sequence
  Synthetic
AETPNILVYE

SEQ ID NO: 534 - protein, 121 aa, Artificial Sequence
  Synthetic
EVQLFESGGGLVQAGDSLRLSCAASGFQLSCYCMGWFRQAPGKEREFVASITQHAFRTYYADSVKGRFTISRDDARNTVYLQMNSLKPEDTAVYYCAAAETPNILVYENYWGQGTQVTVSS

SEQ ID NO: 535 - DNA, 412 bp, Artificial Sequence
  Synthetic
agatataccatggaagttcaactgtttgaatctggtggcggtttagttcaagccggtgatagccttcgtctgagctgtgccgcaagcggatttcagctctcgtgttactgtatgggttggtttcgccaggcacctggtaaagaacgtgaatttgtggcatccattacccagcacgcctttcgtacctactatgccgattctgttaaaggtcgcttcactatttcacgcgatgatgcgcgtaataccgtgtacttacagatgaactcactgaaacctgaggataccgccgtttattattgtgcggcagccgagaccccgaatatcctcgtgtacgagaactattggggtcagggcacacaagtcacggtctcaagcggcggaagctctggtgaacagaaactgatttcagaag

SEQ ID NO: 536 - protein, 7 aa, Artificial Sequence
  Synthetic
FQLSCYC

SEQ ID NO: 537 - protein, 5 aa, Artificial Sequence
  Synthetic
QHAFR

SEQ ID NO: 538 - protein, 10 aa, Artificial Sequence
  Synthetic
AETPNILVYE

SEQ ID NO: 539 - protein, 121 aa, Artificial Sequence
  Synthetic
EVQLVESGGGLVQAGDSLRLSCAASGFQLSCYCMGWFRQAPGKEREFVASITQHAFRTYYADSVKGRFTISRDDACNTVYLQMNSLKPEDTAVYYCAAAETPNILVYENYWGQGTQVTVSS

SEQ ID NO: 540 - DNA, 410 bp, Artificial Sequence
  Synthetic
atataccatggaagttcaactggttgaatctggtggcggtttagttcaagccggtgatagccttcgtctgagctgcgccgcaagcggatttcagctctcgtgttactgtatgggttggtttcgccaggcacctggtaaagaacgtgaatttgtggcatccattacccagcacgcctttcgtacctactatgccgattctgttaaaggtcgcttcactatttcacgcgatgatgcgtgtaataccgtgtacttacagatgaactcactgaaacctgaggataccgccgtttattattgtgcggcagccgagaccccgaatatcctcgtgtacgagaactattggggtcagggcacacaagtcacggtctcaagcggcggaagctctggtgaacagaaactgatttcagaag

SEQ ID NO: 541 - protein, 7 aa, Artificial Sequence
  Synthetic
FQLSCYC

SEQ ID NO: 542 - protein, 5 aa, Artificial Sequence
  Synthetic
QHAFR

SEQ ID NO: 543 - protein, 10 aa, Artificial Sequence
  Synthetic
AETPNILVYE

SEQ ID NO: 544 - protein, 121 aa, Artificial Sequence
  Synthetic
EVQLVDSGGGLVQAGDSLRLSCAASGFQLSCYCMGWFRQAPGKEREFVASITQHAFRTYYADSVKGRFTISRDDARNTVYLQMNSLKPEDTAVYYCAAAETPNILVYENYWGQGTQVTVSS

SEQ ID NO: 545 - DNA, 417 bp, Artificial Sequence
  Synthetic
gaaggagatataccatggaagttcaactggttgactctggtggcggtttagttcaagccggtgatagccttcgtctgagctgcgccgcaagcggatttcagctctcgtgttactgtatgggttggtttcgccaggcacctggtaaagaacgtgaatttgtggcatccattacccagcacgcctttcgtacctactatgccgattctgttaaaggtcgcttcactatttcacgcgatgatgcgcgtaataccgtgtacttacagatgaactcactgaaacctgaggataccgccgtttattattgtgcggcagccgagaccccgaatatcctcgtgtacgagaactattggggtcagggcacacaagtcacggtctcaagcggcggaagctctggtgaacagaaactgatttcagaag

SEQ ID NO: 546 - protein, 7 aa, Artificial Sequence
  Synthetic
FQLSCYC

SEQ ID NO: 547 - protein, 5 aa, Artificial Sequence
  Synthetic
QHAFR

SEQ ID NO: 548 - protein, 10 aa, Artificial Sequence
  Synthetic
AETPNILVYE

SEQ ID NO: 549 - protein, 121 aa, Artificial Sequence
  Synthetic
EVQLVESGGGLVQAGDSLRLSCVASGFQLSCYCMGWFRQAPGKEREFVASITQHAFRTYYADSVKGRFTISRDDARNTVYLQMNSLKPEDTAVYYCAAAETPNILVYENYWGQGTQVTVSS

SEQ ID NO: 550 - DNA, 417 bp, Artificial Sequence
  Synthetic
gaaggagatataccatggaagttcaactggttgaatctggtggcggtttagttcaagccggtgatagccttcgtctgagctgcgtcgcaagcggatttcagctctcgtgttactgtatgggttggtttcgccaggcacctggtaaagaacgtgaatttgtggcatccattacccagcacgcctttcgtacctactatgccgattctgttaaaggtcgcttcactatttcacgcgatgatgcgcgtaataccgtgtacttacagatgaactcactgaaacctgaggataccgccgtttattattgtgcggcagccgagaccccgaatatcctcgtgtacgagaactattggggtcagggcacacaagtcacggtctcaagcggcggaagctctggtgaacagaaactgatttcagaag

SEQ ID NO: 551 - protein, 7 aa, Artificial Sequence
  Synthetic
FQLSCYC

SEQ ID NO: 552 - protein, 5 aa, Artificial Sequence
  Synthetic
QHAFR

SEQ ID NO: 553 - protein, 10 aa, Artificial Sequence
  Synthetic
AETPNILVYE

SEQ ID NO: 554 - protein, 121 aa, Artificial Sequence
  Synthetic
EVQLVESGGGLVQAGDSLRLSRAASGFQLSCYCMGWFRQAPGKEREFVASITQHAFRTYYADSVKGRFTISRDDARNTVYLQMNSLKPEDTAVYYCAAAETPNILVYENYWGQGTQVTVSS

SEQ ID NO: 555 - DNA, 416 bp, Artificial Sequence
  Synthetic
aaggagatataccatggaagttcaactggttgaatctggtggcggtttagttcaagccggtgatagccttcgtctgagccgcgccgcaagcggatttcagctctcgtgttactgtatgggttggtttcgccaggcacctggtaaagaacgtgaatttgtggcatccattacccagcacgcctttcgtacctactatgccgattctgttaaaggtcgcttcactatttcacgcgatgatgcgcgtaataccgtgtacttacagatgaactcactgaaacctgaggataccgccgtttattattgtgcggcagccgagaccccgaatatcctcgtgtacgagaactattggggtcagggcacacaagtcacggtctcaagcggcggaagctctggtgaacagaaactgatttcagaag

SEQ ID NO: 556 - protein, 7 aa, Artificial Sequence
  Synthetic
FQLSCYC

SEQ ID NO: 557 - protein, 5 aa, Artificial Sequence
  Synthetic
QHAFR

SEQ ID NO: 558 - protein, 7 aa, Artificial Sequence
  Synthetic
GEHCLAF

SEQ ID NO: 559 - protein, 118 aa, Artificial Sequence
  Synthetic
QVQLQESGGVLVQVGDSLRLSCAASGFQLSCYCMGWFRQAPGKEREFVASITQHAFRTYYADSVKGRFTISRDDARNTVYLQMNSLKPEDTAVYYCAAGEHCLAFDYWGQGTQVTVSS

SEQ ID NO: 560 - DNA, 406 bp, Artificial Sequence
  Synthetic
aggagatataccatgcaggttcaactgcaagaatctggtggcgttttagttcaagtcggtgatagccttcgtctgagctgcgccgcaagcggatttcagctctcgtgttactgtatgggttggtttcgccaggcacctggtaaagaacgtgaatttgtggcatccattacccagcacgcctttcgtacctactatgccgattctgttaaaggtcgcttcactatttcacgcgatgatgcgcgtaataccgtgtacttacagatgaactcactgaaacctgaggataccgccgtttattattgtgcggcaggcgagcactgtctcgccttcgactattggggtcagggcacacaagtcacggtctcaagcggcggaagctctggtgaacagaaactgatttcagaag

SEQ ID NO: 561 - protein, 7 aa, Artificial Sequence
  Synthetic
FQLSCYC

SEQ ID NO: 562 - protein, 5 aa, Artificial Sequence
  Synthetic
QHAFR

SEQ ID NO: 563 - protein, 7 aa, Artificial Sequence
  Synthetic
GEHCLAF

SEQ ID NO: 564 - protein, 118 aa, Artificial Sequence
  Synthetic
QVQLQESGGVLVHAGDSLRLSCAASGFQLSCYCMGWFRQAPGKEREFVASITQHAFRTYYADSVKGRFTISRDDARNTVYLQMNSLKPEDTAVYYCAAGEHCLAFDYWVQGTQVTVSS

SEQ ID NO: 565 - DNA, 408 bp, Artificial Sequence
  Synthetic
gaaggagatataccatgcaggttcaactgcaagaatctggtggcgttttagttcacgccggtgatagccttcgtctgagctgcgccgcaagcggatttcagctctcgtgttactgtatgggttggtttcgccaggcacctggtaaagaacgtgaatttgtggcatccattacccagcacgcctttcgtacctactatgccgattctgttaaaggtcgcttcactatttcacgcgatgatgcgcgtaataccgtgtacttacagatgaactcactgaaacctgaggataccgccgtttattattgtgcggcaggcgagcactgtctcgccttcgactattgggttcagggcacacaagtcacggtctcaagcggcggaagctctggtgaacagaaactgatttcagaag

SEQ ID NO: 566 - protein, 7 aa, Artificial Sequence
  Synthetic
FQLSCYC

SEQ ID NO: 567 - protein, 5 aa, Artificial Sequence
  Synthetic
QHAFR

SEQ ID NO: 568 - protein, 10 aa, Artificial Sequence
  Synthetic
AETPNILVYE

SEQ ID NO: 569 - protein, 121 aa, Artificial Sequence
  Synthetic
EVQLVESGGGLVQAGDSLRLSCAASGFQLSCYCMGWFRQAPGKEREFVASITQHAFRTYYADSVKGRFTISRDDARNTVYLQMNSLKPEDTAVYYCAAAETPNILVYENYWVQGTQVTVSS

SEQ ID NO: 570 - DNA, 410 bp, Artificial Sequence
  Synthetic
atataccatggaagttcaactggttgaatctggtggcggtttagttcaagccggtgatagccttcgtctgagctgcgctgcaagcggatttcagctctcgtgttactgtatgggttggtttcgccaggcacctggtaaagaacgtgaatttgtggcatccattacccagcacgcctttcgtacctactatgccgattctgttaaaggtcgcttcactatttcacgcgatgatgcgcgtaataccgtgtacttacagatgaactcactgaaacctgaggataccgccgtttattattgtgcggcagccgagaccccgaatatcctcgtgtacgagaactattgggttcagggcacacaagtcacggtctcaagcggcggaagctcttgtgaacagaaactgatttcagaag

SEQ ID NO: 571 - protein, 7 aa, Artificial Sequence
  Synthetic
FQLSCYC

SEQ ID NO: 572 - protein, 5 aa, Artificial Sequence
  Synthetic
QHAFR

SEQ ID NO: 573 - protein, 7 aa, Artificial Sequence
  Synthetic
GEHCLAF

SEQ ID NO: 574 - protein, 118 aa, Artificial Sequence
  Synthetic
QVQLQESGGVLVQAGDSLRLSCAASGFQLSCYCMGWFRQAPGKEREFVASITQHAFRTYYADSVKGRFTISRDDARNTVYLQMNSLKPEDTAVYYCAAGEHCLAFAYWGQGTQVTVSS

SEQ ID NO: 575 - DNA, 403 bp, Artificial Sequence
  Synthetic
agatataccatgcaggttcaactgcaagaatctggtggcgttttagttcaagccggtgatagccttcgtctgagctgcgccgcaagcggatttcagctctcgtgttactgtatgggttggtttcgccaggcacctggtaaagaacgtgaatttgtggcatccattacccagcacgcctttcgtacctactatgccgattctgttaaaggtcgcttcactatttcacgcgatgatgcgcgtaataccgtgtacttacagatgaactcactgaaacctgaggataccgccgtttattattgtgcggcaggcgagcactgtctcgccttcgcctattggggtcagggcacacaagtcacggtctcaagcggcggaagctctggtgaacagaaactgatttcagaag

SEQ ID NO: 576 - protein, 7 aa, Artificial Sequence
  Synthetic
FQLSCYC

SEQ ID NO: 577 - protein, 5 aa, Artificial Sequence
  Synthetic
QHAFR

SEQ ID NO: 578 - protein, 10 aa, Artificial Sequence
  Synthetic
AETPNILVYE

SEQ ID NO: 579 - protein, 121 aa, Artificial Sequence
  Synthetic
EVQLVESGGGLVQAGDSLRLSCAASGFQLSCYCMGWFRQAPGKEREFVASITQHAFRTYYADSVKGRFTISRDDARNTVYLQMNSLKPEDTAVYYCAAAETPNILVYENYWGQGTQGTVSS

SEQ ID NO: 580 - DNA, 410 bp, Artificial Sequence
  Synthetic
accatggaagttcaactggttgaatctggtggcggtttagttcaagccggtgatagccttcgtctgagctgcgccgcaagcggatttcagctctcgtgttactgtatgggttggtttcgccaggcacctggtaaagaacgtgaatttgtggcatccattacccagcacgcctttcgtacctactatgccgattctgttaaaggtcgcttcactatttcacgcgatgatgcgcgtaataccgtgtacttacagatgaactcactgaaacctgaggataccgccgtttattattgtgcggcagccgagaccccgaatatcctcgtgtacgagaactattggggtcagggcacacaaggcacggtctcaagcggcggaagctctggtgcacagaaactgatttcagaagccaa

SEQ ID NO: 581 - protein, 7 aa, Artificial Sequence
  Synthetic
FQLSCYC

SEQ ID NO: 582 - protein, 5 aa, Artificial Sequence
  Synthetic
QHAFR

SEQ ID NO: 583 - protein, 7 aa, Artificial Sequence
  Synthetic
GEHCLAF

SEQ ID NO: 584 - protein, 118 aa, Artificial Sequence
  Synthetic
QVQLQESGGVLVQAGDSLRLSCAASGFQLSCYCMGWFRQAPGKEREFVASITQHAFRTYYADSVKGRFTISRDDARNTVYLQMNSLKPEDTAVYYCAAGEHCLAFDYWGQGTQGTVSS

SEQ ID NO: 585 - DNA, 405 bp, Artificial Sequence
  Synthetic
atataccatgcaggttcaactgcaagaatctggtggcgttttagttcaagccggtgatagccttcgtctgagctgcgccgcaagcggatttcagctctcgtgttactgtatgggttggtttcgccaggcacctggtaaagaacgtgaatttgtggcatccattacccagcacgcctttcgtacctactatgccgattctgttaaaggtcgcttcactatttcacgcgatgatgcgcgtaataccgtgtacttacagatgaactcactgaaacctgaggataccgccgtttattattgtgcggcaggcgagcactgtctcgccttcgactattggggtcagggcacacaaggcacggtctcaagcggcggaagctctggtgaacagaaactgatttcagaagccaa

SEQ ID NO: 586 - protein, 7 aa, Artificial Sequence
  Synthetic
FQLSCYC

SEQ ID NO: 587 - protein, 5 aa, Artificial Sequence
  Synthetic
QHAFR

SEQ ID NO: 588 - protein, 10 aa, Artificial Sequence
  Synthetic
DPSFSDAIAS

SEQ ID NO: 589 - protein, 121 aa, Artificial Sequence
  Synthetic
EVQLVESGGGLVQAGDSLRLSCAASGFQLSCYCMGWFRQAPGKEREFVASITQHAFRTYYADSVKGRFTISRDDARNTVYLQMNSLKPEDTAVYYCAVDPSFSDAIASDYWGQGTQVTFSS

SEQ ID NO: 590 - DNA, 410 bp, Artificial Sequence
  Synthetic
accatggaagttcaactggttgaatctggtggcggtttagttcaagccggtgatagccttcgtctgagctgcgccgcaagcggatttcagctctcgtgttactgtatgggttggtttcgccaggcacctggtaaagaacgtgaatttgtggcatccattacccagcacgcctttcgtacctactatgccgattctgttaaaggtcgcttcactatttcacgcgatgatgcgcgtaataccgtgtacttacagatgaactcactgaaacctgaggataccgccgtttattattgtgcggttgatccttctttctccgacgctatcgcctcggactattggggtcagggcacacaagtcacgttctcaagcggcggaagctctggtgaacagaaactgatttcagaagccaa

SEQ ID NO: 591 - protein, 7 aa, Artificial Sequence
  Synthetic
FQLSCYC

SEQ ID NO: 592 - protein, 5 aa, Artificial Sequence
  Synthetic
QHAFR

SEQ ID NO: 593 - protein, 7 aa, Artificial Sequence
  Synthetic
GEHCLAF

SEQ ID NO: 594 - protein, 118 aa, Artificial Sequence
  Synthetic
QVQLQESGGVLVQAGDSLRLSCAASGFQLSCYCMGWFRQAPGKEREFVASITQHAFRTYYADSVKGRFTISRDDARNTVYLQMSSLKPEDTAVYYCAAGEHCLAFDYWGQGTQVTVSS

SEQ ID NO: 595 - DNA, 409 bp, Artificial Sequence
  Synthetic
ggagatataccatgcaggttcaactgcaagaatctggtggcgttttagttcaagccggtgatagccttcgtctgagctgcgccgcaagcggatttcagctctcgtgttactgtatgggttggtttcgccaggcacctggtaaagaacgtgaatttgtggcatccattacccagcacgcctttcgtacctactatgccgattctgttaaaggtcgcttcactatttcacgcgatgatgcgcgtaataccgtgtacttacagatgagctcactgaaacctgaggataccgccgtttattattgtgcggcaggcgagcactgtctcgccttcgactattggggtcagggcacacaagtcacggtctcaagcggcggaagctctggtgaacagaaactgatttcagaagccaa

SEQ ID NO: 596 - protein, 7 aa, Artificial Sequence
  Synthetic
FQLSCYC

SEQ ID NO: 597 - protein, 5 aa, Artificial Sequence
  Synthetic
QHAFR

SEQ ID NO: 598 - protein, 10 aa, Artificial Sequence
  Synthetic
AETPNILVYE

SEQ ID NO: 599 - protein, 121 aa, Artificial Sequence
  Synthetic
EVQLVESGGGLVQAGDSLRLSCAASGFQLSCYCMGWFRQAPGKEREFVASITQHAFRTYYADSVKGRFTISRDDARNTVYLQMNSLKPEDTAVYYCAAAETPNILVYENYWGQDTQVTVSS

SEQ ID NO: 600 - DNA, 421 bp, Artificial Sequence
  Synthetic
gaaggagatataccatggaagttcaactggttgaatctggtggcggtttagttcaagccggtgatagccttcgtctgagctgcgccgcaagcggatttcagctctcgtgttactgtatgggttggtttcgccaggcacctggtaaagaacgtgaatttgtggcatccattacccagcacgcctttcgtacctactatgccgattctgttaaaggtcgcttcactatttcacgcgatgatgcgcgtaataccgtgtacttacagatgaactcactgaaacctgaggataccgccgtttattattgtgcggcagccgagaccccgaatatcctcgtgtacgagaactattggggtcaggacacacaagtcacggtctcaagcggcggaagctctggtgaacagaaactgatttcagaagccaa

SEQ ID NO: 601 - protein, 7 aa, Artificial Sequence
  Synthetic
FQLSCYC

SEQ ID NO: 602 - protein, 5 aa, Artificial Sequence
  Synthetic
QHAFR

SEQ ID NO: 603 - protein, 10 aa, Artificial Sequence
  Synthetic
AETPNILVYE

SEQ ID NO: 604 - protein, 121 aa, Artificial Sequence
  Synthetic
EVQLVESGGGLVQAGDSLRLSCAASGFQLSCYCMGWFRQAPGKEREFVASITQHAFRTYYADSVKGRFTISRDDARNTVYLQMNSLKPEDTAVYYCAAAETPNILVYENYWGQGTRVTVSS

SEQ ID NO: 605 - DNA, 419 bp, Artificial Sequence
  Synthetic
aggagatataccatggaagttcaactggttgaatctggtggcggtttagttcaagccggtgatagccttcgtctgagctgcgccgcaagcggatttcagctctcgtgttactgtatgggttggtttcgccaggcacctggtaaagaacgtgaatttgtggcatccattacccagcacgcctttcgtacctactatgccgattctgttaaaggtcgcttcactatttcacgcgatgatgcgcgtaataccgtgtacttacagatgaactcactgaaacctgaggataccgccgtttattattgtgcggcagccgagaccccgaatatcctcgtgtacgagaactattggggtcagggcacacgagtcacggtctcaagcggcggaagctctggtgaacagaaactgatttcagaagccaa

SEQ ID NO: 606 - protein, 7 aa, Artificial Sequence
  Synthetic
FQLSCYC

SEQ ID NO: 607 - protein, 5 aa, Artificial Sequence
  Synthetic
QHAFR

SEQ ID NO: 608 - protein, 7 aa, Artificial Sequence
  Synthetic
GEHCLAF

SEQ ID NO: 609 - protein, 118 aa, Artificial Sequence
  Synthetic
QVQLQESCGVLVQVGDSLRLSCAASGFQLSCYCMGWFRQAPGKEREFVASITQHAFRTYYADSVKGRFTISRDDARNTVYLQMNSLKPEDTAVYYCAAGEHCLAFDYWGQGTQVTVSS

SEQ ID NO: 610 - DNA, 412 bp, Artificial Sequence
  Synthetic
gaaggagatataccatgcaggttcaactgcaagaatcttgtggcgttttagttcaagtcggtgatagccttcgtctgagctgcgccgcaagcggatttcagctctcgtgttactgtatgggttggtttcgccaggcacctggtaaagaacgtgaatttgtggcatccattacccagcacgcctttcgtacctactatgccgattctgttaaaggtcgcttcactatttcacgcgatgatgcgcgtaataccgtgtacttacagatgaactcactgaaacctgaggataccgccgtttattattgtgcggcaggcgagcactgtctcgccttcgactattggggtcagggcacacaagtcacggtctcaagcggcggaagctctggtgaacagaaactgatttcagaagccaa

SEQ ID NO: 611 - protein, 7 aa, Artificial Sequence
  Synthetic
FQLSCYC

SEQ ID NO: 612 - protein, 5 aa, Artificial Sequence
  Synthetic
QHSFR

SEQ ID NO: 613 - protein, 10 aa, Artificial Sequence
  Synthetic
DPSFSDAIVS

SEQ ID NO: 614 - protein, 121 aa, Artificial Sequence
  Synthetic
EVQLVESGGGLVQAGDSLRLSCAASGFQLSCYCMGWFRQAPGKEREFVASITQHSFRTYYADSVKGRFTISRDDARNTVYLQMNSLKPEDTAVYYCAVDPSFSDAIVSDYWGQGTQVTVSS

SEQ ID NO: 615 - DNA, 412 bp, Artificial Sequence
  Synthetic
ataccatggaagttcaactggttgaatctggtggcggtttagttcaagccggtgatagccttcgtctgagctgcgccgcaagcggatttcagctctcgtgttactgtatgggttggtttcgccaggcacctggtaaagaacgtgaatttgtggcatccattacccagcactcctttcgtacctactatgccgattctgttaaaggtcgcttcactatttcacgcgatgatgcgcgtaataccgtgtacttacagatgaactcactgaaacctgaggataccgccgtttattattgtgcggttgatccttctttctccgacgctatcgtctcggactattggggtcagggcacacaagtcacggtctcaagcggcggaagctctggtgaacagaaactgatttcagaagccaa

SEQ ID NO: 616 - protein, 7 aa, Artificial Sequence
  Synthetic
FQLSCYC

SEQ ID NO: 617 - protein, 5 aa, Artificial Sequence
  Synthetic
QHAFR

SEQ ID NO: 618 - protein, 10 aa, Artificial Sequence
  Synthetic
DPSFSDAIAS

SEQ ID NO: 619 - protein, 121 aa, Artificial Sequence
  Synthetic
EVQLVESGGGLVQAGDSLRLSCAASGFQLSCYCMGWFRQAPGKEREFVASITQHAFRTYYADSVKGRFTISRDDARNTVYLHMNSLKPEDTAVYYCAVDPSFSDAIASDYWGQGTQVTVSS

SEQ ID NO: 620 - DNA, 421 bp, Artificial Sequence
  Synthetic
gaaggagatataccatggaagttcaactggttgaatctggtggcggtttagttcaagccggtgatagccttcgtctgagctgcgccgcaagcggatttcagctctcgtgttactgtatgggttggtttcgccaggcacctggtaaagaacgtgaatttgtggcatccattacccagcacgcctttcgtacctactatgccgattctgttaaaggtcgcttcactatttcacgcgatgatgcgcgtaataccgtgtacttacacatgaactcactgaaacctgaggataccgccgtttattattgtgcggttgatccttctttctccgacgctatcgcctcggactattggggtcagggcacacaagtcacggtctcaagcggcggaagctctggtgaacagaaactgatttcagaagccaa

SEQ ID NO: 621 - protein, 7 aa, Artificial Sequence
  Synthetic
FQLSCYC

SEQ ID NO: 622 - protein, 5 aa, Artificial Sequence
  Synthetic
QHAFR

SEQ ID NO: 623 - protein, 7 aa, Artificial Sequence
  Synthetic
GEHCLAF

SEQ ID NO: 624 - protein, 118 aa, Artificial Sequence
  Synthetic
QVQLQESGGVLVQAGDGLRLSCAASGFQLSCYCMGWFRQAPGKEREFVASITQHAFRTYYADSVKGRFTISRDDARNTVYLQMNSLKPEDTAVYYCAAGEHCLAFDYWGQGTQVTVSS

SEQ ID NO: 625 - DNA, 410 bp, Artificial Sequence
  Synthetic
aggagatataccatgcaggttcaactgcaagaatctggtggcgttttagttcaagccggtgatggccttcgtctgagctgcgccgcaagcggatttcagctctcgtgttactgtatgggttggtttcgccaggcacctggtaaagaacgtgaatttgtggcatccattacccagcacgcctttcgtacctactatgccgattctgttaaaggtcgcttcactatttcacgcgatgatgcgcgtaataccgtgtacttacagatgaactcactgaaacctgaggataccgccgtttattattgtgcggcaggcgagcactgtctcgccttcgactattggggtcagggcacacaagtcacggtctcaagcggcggaagctctggtgaacagaaactgatttcagaagccaa

SEQ ID NO: 626 - protein, 7 aa, Artificial Sequence
  Synthetic
FQLSCYC

SEQ ID NO: 627 - protein, 5 aa, Artificial Sequence
  Synthetic
QHAFR

SEQ ID NO: 628 - protein, 7 aa, Artificial Sequence
  Synthetic
GEHCLAF

SEQ ID NO: 629 - protein, 118 aa, Artificial Sequence
  Synthetic
QVQLQESGGVLVQAGDSLRLSCAASGFQLSCYCMGWFRQAPGKEREFVASITQHAFRTYYADSVKGRFTISRDDARNTVYLQMNSLKPEDTTVYYCAAGEHCLAFDYWGQGTQVTVSS

SEQ ID NO: 630 - DNA, 410 bp, Artificial Sequence
  Synthetic
aggagatataccatgcaggttcaactgcaagaatctggtggcgttttagttcaagccggtgatagccttcgtctgagctgcgccgcaagcggatttcagctctcgtgttactgtatgggttggtttcgccaggcacctggtaaagaacgtgaatttgtggcatccattacccagcacgcctttcgtacctactatgccgattctgttaaaggtcgcttcactatttcacgcgatgatgcgcgtaataccgtgtacttacagatgaactcactgaaacctgaggataccaccgtttattattgtgcggcaggcgagcactgtctcgccttcgactattggggtcagggcacacaagtcacggtctcaagcggcggaagctctggtgaacagaaactgatttcagaagccaa

SEQ ID NO: 631 - protein, 7 aa, Artificial Sequence
  Synthetic
FQLSCYC

SEQ ID NO: 632 - protein, 5 aa, Artificial Sequence
  Synthetic
QHAFR

SEQ ID NO: 633 - protein, 7 aa, Artificial Sequence
  Synthetic
GEHCLAF

SEQ ID NO: 634 - protein, 118 aa, Artificial Sequence
  Synthetic
QVQLQESGGVLVQAGDSLRLSCAASGFQLSCYCMGWFRQAPGKEREFVASITQHAFRTYYADSVKGRFTISRDDARNTVYLQMNSLKPEDTAVYYCAAGEHCLAFDYWGQGTQVTVTS

SEQ ID NO: 635 - DNA, 410 bp, Artificial Sequence
  Synthetic
aggagatataccatgcaggttcaactgcaagaatctggtggcgttttagttcaagccggtgatagccttcgtctgagctgcgccgcaagcggatttcagctctcgtgttactgtatgggttggtttcgccaggcacctggtaaagaacgtgaatttgtggcatccattacccagcacgcctttcgtacctactatgccgattctgttaaaggtcgcttcactatttcacgcgatgatgcgcgtaataccgtgtacttacagatgaactcactgaaacctgaggataccgccgtttattattgtgcggcaggcgagcactgtctcgccttcgactattggggtcagggcacacaagtcacggtcacaagcggcggaagctctggtgaacagaaactgatttcagaagccaa

SEQ ID NO: 636 - protein, 7 aa, Artificial Sequence
  Synthetic
FQLSCYC

SEQ ID NO: 637 - protein, 5 aa, Artificial Sequence
  Synthetic
QHAFR

SEQ ID NO: 638 - protein, 10 aa, Artificial Sequence
  Synthetic
DPSFSDAIAS

SEQ ID NO: 639 - protein, 121 aa, Artificial Sequence
  Synthetic
EVQLVESGGGLVQAGDSLRLSCAASGFQLSCYCMGWFRQAPGKEREFVASITQHAFRTYYADSVKGRFTISRDDARNTVYLQMNSLKPEDTAVYYCAVDPSFSDAIASDYWGQGTQGTVSS

SEQ ID NO: 640 - DNA, 416 bp, Artificial Sequence
  Synthetic
agatataccatggaagttcaactggttgaatctggtggcggtttagttcaagccggtgatagccttcgtctgagctgcgccgcaagcggatttcagctctcgtgttactgtatgggttggtttcgccaggcacctggtaaagaacgtgaatttgtggcatccattacccagcacgcctttcgtacctactatgccgattctgttaaaggtcgcttcactatttcacgcgatgatgcgcgtaataccgtgtacttacagatgaactcactgaaacctgaggataccgccgtttattattgtgcggttgatccttctttctccgacgctatcgcctcggactattggggtcagggcacacaaggcacggtctcaagcggcggaagctctggtgaaaagaaactgatttcagaagccaa

SEQ ID NO: 641 - protein, 7 aa, Artificial Sequence
  Synthetic
FQLSCYC

SEQ ID NO: 642 - protein, 5 aa, Artificial Sequence
  Synthetic
QHAFR

SEQ ID NO: 643 - protein, 10 aa, Artificial Sequence
  Synthetic
AETPNILVYE

SEQ ID NO: 644 - protein, 121 aa, Artificial Sequence
  Synthetic
EVRLVESGGGLVQAGDSLRLSCAASGFQLSCYCMGWFRQAPGKEREFVASITQHAFRTYYADSVKGRFTISRDDARNTVYLQMNSLKPEDTAVYYCAAAETPNILVYENYWGQGTQVTVSS

SEQ ID NO: 645 - DNA, 419 bp, Artificial Sequence
  Synthetic
aggagatataccatggaagttcgactggttgaatctggtggcggtttagttcaagccggtgatagccttcgtctgagctgcgccgcaagcggatttcagctctcgtgttactgtatgggttggtttcgccaggcacctggtaaagaacgtgaatttgtggcatccattacccagcacgcctttcgtacctactatgccgattctgttaaaggtcgcttcactatttcacgcgatgatgcgcgtaataccgtgtacttacagatgaactcactgaaacctgaggataccgccgtttattattgtgcggcagccgagaccccgaatatcctcgtgtacgagaactattggggtcagggcacacaagtcacggtctcaagcggcggaagctctggtgaacagaaactgatttcagaagccaa

SEQ ID NO: 646 - protein, 7 aa, Artificial Sequence
  Synthetic
FPLSCYC

SEQ ID NO: 647 - protein, 5 aa, Artificial Sequence
  Synthetic
QHAFR

SEQ ID NO: 648 - protein, 10 aa, Artificial Sequence
  Synthetic
AETPNILVYE

SEQ ID NO: 649 - protein, 121 aa, Artificial Sequence
  Synthetic
EVQLVESGGGLVQAGDSLRLSCAASGFPLSCYCMGWFRQAPGKEREFVASITQHAFRTYYADSVKGRFTISRDDARNTVYLQMNSLKPEDTAVYYCAAAETPNILVYENYWGQGTQVTVSS

SEQ ID NO: 650 - DNA, 412 bp, Artificial Sequence
  Synthetic
ataccatggaagttcaactggttgaatctggtggcggtttagttcaagccggtgatagccttcgtctgagctgcgccgcaagcggatttccgctctcgtgttactgtatgggttggtttcgccaggcacctggtaaagaacgtgaatttgtggcatccattacccagcacgcctttcgtacctactatgccgattctgttaaaggtcgcttcactatttcacgcgatgatgcgcgtaataccgtgtacttacagatgaactcactgaaacctgaggataccgccgtttattattgtgcggcagccgagaccccgaatatcctcgtgtacgagaactattggggtcagggcacacaagtcacggtctcaagcggcggaagctctggtgaacagaaactgatttcagaagccaa

SEQ ID NO: 651 - protein, 7 aa, Artificial Sequence
  Synthetic
FQLSCYC

SEQ ID NO: 652 - protein, 5 aa, Artificial Sequence
  Synthetic
QHAFR

SEQ ID NO: 653 - protein, 10 aa, Artificial Sequence
  Synthetic
AETPNILVHE

SEQ ID NO: 654 - protein, 121 aa, Artificial Sequence
  Synthetic
EVQLVESGGGLVQAGDSLRLNCAASGFQLSCYCMGWFRQAPGKEREFVASITQHAFRTYYADSVKGRFTISRDDARNTVYLQMNSLKPEDTAVYYCAAAETPNILVHENYWGQGTQGTVSS

SEQ ID NO: 655 - DNA, 418 bp, Artificial Sequence
  Synthetic
ggagatataccatggaagttcaactggttgaatctggtggcggtttagttcaagccggtgatagccttcgtctgaactgcgccgcaagcggatttcagctctcgtgttactgtatgggttggtttcgccaggcacctggtaaagaacgtgaatttgtggcatccattacccagcacgcctttcgtacctactatgccgattctgttaaaggtcgcttcactatttcacgcgatgatgcgcgtaataccgtgtacctacagatgaactcactgaaacctgaggataccgccgtttattattgtgcggcagccgagaccccgaatatcctcgtgcacgagaactattggggtcagggcacacaaggcacggtctcaagcggcggaagctctggtgaacagaaactgatttcagaagccaa

SEQ ID NO: 656 - protein, 7 aa, Artificial Sequence
  Synthetic
FQLSCYC

SEQ ID NO: 657 - protein, 5 aa, Artificial Sequence
  Synthetic
QHAFR

SEQ ID NO: 658 - protein, 10 aa, Artificial Sequence
  Synthetic
DPSFSDAIAS

SEQ ID NO: 659 - protein, 121 aa, Artificial Sequence
  Synthetic
EVQLVESGGGLVKAGDSLRLSCAASGFQLSCYCMGWFRQAPGKEREFVASITQHAFRTYYADSVKGRFTISRDDARNTVYLQMNSLKPEDTAVYYCAVDPSFSDAIASDYWGQGTQVTVSS

SEQ ID NO: 660 - DNA, 410 bp, Artificial Sequence
  Synthetic
accatggaagttcaactggttgaatctggtggcggtttagttaaagccggtgatagccttcgtctgagctgcgccgcaagcggatttcagctctcgtgttactgtatgggttggtttcgccaggcacctggtaaagaacgtgaatttgtggcatccattacccagcacgcctttcgtacctactatgccgattctgttaaaggtcgcttcactatttcacgcgatgatgcgcgtaataccgtgtacttacagatgaactcactgaaacctgaggataccgccgtttattattgtgcggttgatccttctttctccgacgctatcgcctcggactattggggtcagggcacacaagtcacggtctcaagcggcggaagctctggtgaacagaaactgatttcagaagccaa

SEQ ID NO: 661 - protein, 7 aa, Artificial Sequence
  Synthetic
FQLSCYC

SEQ ID NO: 662 - protein, 5 aa, Artificial Sequence
  Synthetic
QHAFR

SEQ ID NO: 663 - protein, 10 aa, Artificial Sequence
  Synthetic
AETPNILVYE

SEQ ID NO: 664 - protein, 121 aa, Artificial Sequence
  Synthetic
EVQLVDSGGGLVQAGDRLRLSCAASGFQLSCYCMGWFRQAPGKEREFVASITQHAFRTYYADSVKGRFTISRDDARNTVYLQMNSLKPEDTAVYYCAAAETPNILVYENYWGQGTQGTVSS

SEQ ID NO: 665 - DNA, 421 bp, Artificial Sequence
  Synthetic
gaaggagatataccatggaagttcaactggttgactctggtggcggtttagttcaagccggtgatcgccttcgtctgagctgcgccgcaagcggatttcagctctcgtgttactgtatgggttggtttcgccaggcacctggtaaagaacgtgaatttgtggcatccattacccagcacgcctttcgtacctactatgccgattctgttaaaggtcgcttcactatttcacgcgatgatgcgcgtaataccgtgtacttacagatgaactcactgaaacctgaggataccgccgtttattattgtgcggcagccgagaccccgaatatcctcgtgtacgagaactattggggtcagggcacacaaggcacggtctcaagcggcggaagctctggtgaacagaaactgatttcagaagccaa

SEQ ID NO: 666 - protein, 7 aa, Artificial Sequence
  Synthetic
FQLSCSC

SEQ ID NO: 667 - protein, 5 aa, Artificial Sequence
  Synthetic
QHAFR

SEQ ID NO: 668 - protein, 10 aa, Artificial Sequence
  Synthetic
DPSFSDAIAS

SEQ ID NO: 669 - protein, 121 aa, Artificial Sequence
  Synthetic
EVQLVESGGGLVQAGDRLRLSCAASGFQLSCSCMGWFRQAPGKEREFVASITQHAFRTYYADSVKGRFTISRDDARNTVYLQMNSLKPEDTAVYYCAVDPSFSDAIASDYWGQGTQGTVSS

SEQ ID NO: 670 - DNA, 420 bp, Artificial Sequence
  Synthetic
aaggagatataccatggaagttcaactggttgaatctggtggcggtttagttcaagccggtgatagacttcgtctgagctgcgccgcaagcggatttcagctctcgtgttcctgtatgggttggtttcgccaggcacctggtaaagaacgtgaatttgtggcatccattacccagcacgcctttcgtacctactatgccgattctgttaaaggtcgcttcactatttcacgcgatgatgcgcgtaataccgtgtacttacagatgaactcactgaaacctgaggataccgccgtttattattgtgcggttgatccttctttctccgacgctatcgcctcggactattggggtcagggcacacaaggcacggtctcaagcggcggaagctctggtgaacagaaactgatttcagaagccaa

SEQ ID NO: 671 - protein, 7 aa, Artificial Sequence
  Synthetic
FQLSCYC

SEQ ID NO: 672 - protein, 5 aa, Artificial Sequence
  Synthetic
QHAFR

SEQ ID NO: 673 - protein, 10 aa, Artificial Sequence
  Synthetic
AETPNILVYE

SEQ ID NO: 674 - protein, 121 aa, Artificial Sequence
  Synthetic
EVQLVESGGGLVQAGDSLRLSCAASGFQLSCYCMGWFRQAPGKEREFVATITQHAFRTYYADSVKGRFTISRDDARNTVYLQMNSLKPEDTAVYYCAAAETPNILVYENYWGQGTQVTVSS

SEQ ID NO: 675 - DNA, 412 bp, Artificial Sequence
  Synthetic
ataccatggaagttcaactggttgaatctggtggcggtttagttcaagccggtgatagccttcgtctgagctgcgccgcaagcggatttcagctctcgtgttactgtatgggttggtttcgccaggcacctggtaaagaacgtgaatttgtggcaaccattacccagcacgcctttcgtacctactatgccgattctgttaaaggtcgcttcactatttcacgcgatgatgcgcgtaataccgtgtacttacagatgaactcactgaaacctgaggataccgccgtttattattgtgcggcagccgagaccccgaatatcctcgtgtacgagaactattggggtcagggcacacaagtcacggtctcaagcggcggaagctctggtgaacagaaactgatttcagaagccaa

SEQ ID NO: 676 - protein, 7 aa, Artificial Sequence
  Synthetic
FQLSCYC

SEQ ID NO: 677 - protein, 5 aa, Artificial Sequence
  Synthetic
QHAFR

SEQ ID NO: 678 - protein, 10 aa, Artificial Sequence
  Synthetic
DPSFSDAIAS

SEQ ID NO: 679 - protein, 121 aa, Artificial Sequence
  Synthetic
EVQLVESGGGLVHAGDRLRLSCAASGFQLSCYCMGWFRQAPGKEREFVASITQHAFRTYYADSVKGRFTISRDDARNTVYLQMNSLKPEDTAVYYCAVDPSFSDAIASDYWGQGTQVTVSS

SEQ ID NO: 680 - DNA, 421 bp, Artificial Sequence
  Synthetic
gaaggagatataccatggaagttcaactggttgaatctggtggcggtttagttcacgccggtgatcgccttcgtctgagctgcgccgcaagcggatttcagctctcgtgttactgtatgggttggtttcgccaggcacctggtaaagaacgtgaatttgtggcatccattacccagcacgcctttcgtacctactatgccgattctgttaaaggtcgcttcactatttcacgcgatgatgcgcgtaataccgtgtacttacagatgaactcactgaaacctgaggataccgccgtttattattgtgcggttgatccttctttctccgacgctatcgcctcggactattggggtcagggcacacaagtcacggtctcaagcggcggaagctctggtgaacagaaactgatttcagaagccaa

SEQ ID NO: 681 - protein, 7 aa, Artificial Sequence
  Synthetic
FQLSCYC

SEQ ID NO: 682 - protein, 5 aa, Artificial Sequence
  Synthetic
QHAFR

SEQ ID NO: 683 - protein, 10 aa, Artificial Sequence
  Synthetic
AETPNILVYE

SEQ ID NO: 684 - protein, 121 aa, Artificial Sequence
  Synthetic
EVQLVESGGGLVQAGDSLRLSCAASGFQLSCYCMGWFRQAPGKEREFVASITQHAFRTYYADSVKGRFTISRDDARNTVYLQMNSPKPEDTAVYYCAAAETPNILVYENYWGQGTQVTVSS

SEQ ID NO: 685 - DNA, 410 bp, Artificial Sequence
  Synthetic
accatggaagttcaactggttgaatctggtggcggtttagttcaagccggtgatagccttcgtctgagctgcgccgcaagcggatttcagctctcgtgttactgtatgggttggtttcgccaggcacctggtaaagaacgtgaatttgtggcatccattacccagcacgcctttcgtacctactatgccgattctgttaaaggtcgcttcactatttcacgcgatgatgcgcgtaataccgtgtacttacagatgaactcaccgaaacctgaggataccgccgtttattattgtgcggcagccgagaccccgaatatcctcgtgtacgagaactattggggtcagggcacacaagtcacggtctcaagcggcggaagctctggtgaacagaaactgatttcagaagccaa

SEQ ID NO: 686 - protein, 7 aa, Artificial Sequence
  Synthetic
FQLSCYC

SEQ ID NO: 687 - protein, 5 aa, Artificial Sequence
  Synthetic
QHAFR

SEQ ID NO: 688 - protein, 7 aa, Artificial Sequence
  Synthetic
GEHCLAF

SEQ ID NO: 689 - protein, 118 aa, Artificial Sequence
  Synthetic
QVQLQESGGVLVHAGDRLRLSCAASGFQLSCYCMGWFRQAPGKEREFVASITQHAFRTYYADSVKGRFTISRDDARNTVYLQMNSLKPEDTAVYYCAAGEHCLAFDYWGQGTQVTVSS

SEQ ID NO: 690 - DNA, 412 bp, Artificial Sequence
  Synthetic
gaaggagatataccatgcaggttcaactgcaagaatctggtggcgttttagttcacgccggtgatcgccttcgtctgagctgcgccgcaagcggatttcagctctcgtgttactgtatgggttggtttcgccaggcacctggtaaagaacgtgaatttgtggcatccattacccagcacgcctttcgtacctactatgccgattctgttaaaggtcgcttcactatttcacgcgatgatgcgcgtaataccgtgtacttacagatgaactcactgaaacctgaggataccgccgtttattattgtgcggcaggcgagcactgtctcgccttcgactattggggtcagggcacacaagtcacggtctcaagcggcggaagctctggtgaacagaaactgatttcagaagccaa

SEQ ID NO: 691 - protein, 7 aa, Artificial Sequence
  Synthetic
DCHVLWR

SEQ ID NO: 692 - protein, 5 aa, Artificial Sequence
  Synthetic
LDGLF

SEQ ID NO: 693 - protein, 4 aa, Artificial Sequence
  Synthetic
MPFF

SEQ ID NO: 694 - protein, 115 aa, Artificial Sequence
  Synthetic
EVQLVESGGGLVQAGDSLRLSCAASGDCHVLWRMGWFRQAPGKEREFVAAISLDGLFTNYADSVRGRFSISADSAKNTVYLQMNSLKPEDTAVYYCAAMPFFDYWGQGTQVTVSS

SEQ ID NO: 695 - DNA, 388 bp, Artificial Sequence
  Synthetic
accatggaagttcaactggttgaatctggtggcggtttagttcaagccggtgatagccttcgtctgagctgcgccgcaagcggagattgtcacgttctctggcgtatgggttggtttcgccaggcacctggtaaagaacgtgaatttgtggcagccattagcctcgacggtttgtttaccaactatgccgattctgttcgtggtcgcttcagcatttcagcagattctgcgaagaataccgtgtacttacagatgaactcactgaaacctgaggataccgccgtttattattgtgcggcaatgcctttttttgactattggggtcagggcacacaagtcacggtctcaagcggcggaagctctggtgaacagaaactgatttcagaag

SEQ ID NO: 696 - protein, 7 aa, Artificial Sequence
  Synthetic
DCHVLWR

SEQ ID NO: 697 - protein, 5 aa, Artificial Sequence
  Synthetic
LDGLF

SEQ ID NO: 698 - protein, 6 aa, Artificial Sequence
  Synthetic
LPATSG

SEQ ID NO: 699 - protein, 117 aa, Artificial Sequence
  Synthetic
EVQLVESGGGLVQAGDSLRLSCAASGDCHVLWRMGWFRQAPGKEREFVAAISLDGLFTNYADSVRGRFSISADSAKNTVYLQMNSLKPEDTAVYYCAALPATSGDYWGQGTQVTVSS

SEQ ID NO: 700 - DNA, 404 bp, Artificial Sequence
  Synthetic
aaggagatataccatggaagttcaactggttgaatctggtggcggtttagttcaagccggtgatagccttcgtctgagctgcgccgcaagcggagattgtcacgttctctggcgtatgggttggtttcgccaggcacctggtaaagaacgtgaatttgtggcagccattagcctcgacggtttgtttaccaactatgccgattctgttcgtggtcgcttcagcatttcagcagattctgcgaagaataccgtgtacttacagatgaactcactgaaacctgaggataccgccgtttattattgtgcggcattgccggcgacttctggcgactattggggtcagggcacacaagtcacggtctcaagcggcggaagctctggtgaacagaaactgatttcagaag

SEQ ID NO: 701 - protein, 7 aa, Artificial Sequence
  Synthetic
DCHVLWR

SEQ ID NO: 702 - protein, 5 aa, Artificial Sequence
  Synthetic
LDGLF

SEQ ID NO: 703 - protein, 6 aa, Artificial Sequence
  Synthetic
FKPYES

SEQ ID NO: 704 - protein, 117 aa, Artificial Sequence
  Synthetic
EVQLVESGGGLVQAGDSLRLSCAASGDCHVLWRMGWFRQAPGKEREFVAAISLDGLFTNYADSVRGRFSISADSAKNTVYLQMNSLKPEDTAVYYCAAFKPYESAYWGQGTQVTVSS

SEQ ID NO: 705 - DNA, 396 bp, Artificial Sequence
  Synthetic
ataccatggaagttcaactggttgaatctggtggcggtttagttcaagccggtgatagccttcgtctgagctgcgccgcaagcggagattgtcacgttctctggcgtatgggttggtttcgccaggcacctggtaaagaacgtgaatttgtggcagccattagcctcgacggtttgtttaccaactatgccgattctgttcgtggtcgcttcagcatttcagcagattctgcgaagaataccgtgtacttacagatgaactcactgaaacctgaggataccgccgtttattattgtgcggcattcaagccttacgagtcggcctattggggtcagggcacacaagtcacggtctcaagcggcggaagctctggtgaacagaaactgatttcagaag

SEQ ID NO: 706 - protein, 7 aa, Artificial Sequence
  Synthetic
DCHVLWR

SEQ ID NO: 707 - protein, 5 aa, Artificial Sequence
  Synthetic
LVGLF

SEQ ID NO: 708 - protein, 4 aa, Artificial Sequence
  Synthetic
MPFF

SEQ ID NO: 709 - protein, 115 aa, Artificial Sequence
  Synthetic
EVQLVESGGGLVQAGDSLRLSCAASGDCHVLWRMGWFRQAPGKEREFVAAISLVGLFTNYADSVRGRFSISADSAKNTVYLQMNSLKPEDTAVYYCAAMPFFDYWGQGTQVTVSS

SEQ ID NO: 710 - DNA, 388 bp, Artificial Sequence
  Synthetic
accatggaagttcaactggttgaatctggtggcggtttagttcaagccggtgatagccttcgtctgagctgcgccgcaagcggagattgtcacgttctctggcgtatgggttggtttcgccaggcacctggtaaagaacgtgaatttgtggcagccattagcctcgtcggtttgtttaccaactatgccgattctgttcgtggtcgcttcagcatttcagcagattctgcgaagaataccgtgtacttacagatgaactcactgaaacctgaggataccgccgtttattattgtgcggcaatgcctttttttgactattggggtcagggcacacaagtcacggtctcaagcggcggaagctctggtgaacagaaactgatttcagaag

SEQ ID NO: 711 - protein, 7 aa, Artificial Sequence
  Synthetic
DCHVLWR

SEQ ID NO: 712 - protein, 5 aa, Artificial Sequence
  Synthetic
LDGLF

SEQ ID NO: 713 - protein, 9 aa, Artificial Sequence
  Synthetic
HHFHPGGMD

SEQ ID NO: 714 - protein, 120 aa, Artificial Sequence
  Synthetic
EVQLVESGGGLVQAGDSLRLSCAASGDCHVLWRMGWFRQAPGKEREFVAAISLDGLFTNYADSVRGRFSISADSAKNTVYLQMNSLKPEDTAVYYCNAHHFHPGGMDDYWGQGTQVTVSS

SEQ ID NO: 715 - DNA, 405 bp, Artificial Sequence
  Synthetic
ataccatggaagttcaactggttgaatctggtggcggtttagttcaagccggtgatagccttcgtctgagctgcgccgcaagcggagattgtcacgttctctggcgtatgggttggtttcgccaggcacctggtaaagaacgtgaatttgtggcagccattagcctcgacggtttgtttaccaactatgccgattctgttcgtggtcgcttcagcatttcagcagattctgcgaagaataccgtgtacttacagatgaactcactgaaacctgaggataccgccgtttattattgtaatgcacaccattttcatcctggtggtatggatgactattggggtcagggcacacaagtcacggtctcaagcggcggaagctctggtgaacagaaactgatttcagaag

SEQ ID NO: 716 - protein, 7 aa, Artificial Sequence
  Synthetic
DCHVLWR

SEQ ID NO: 717 - protein, 5 aa, Artificial Sequence
  Synthetic
LDGLF

SEQ ID NO: 718 - protein, 6 aa, Artificial Sequence
  Synthetic
LPKRTV

SEQ ID NO: 719 - protein, 117 aa, Artificial Sequence
  Synthetic
QVQLVESGGALVQAGDSLRLSCAASGDCHVLWRMGWFRQAPGKEREFVAAISLDGLFTNYADSVRGRFSISADSAKNTVYLQMNSLKPEDTAVYYCAALPKRTVDYWGQGTQVTVSS

SEQ ID NO: 720 - DNA, 404 bp, Artificial Sequence
  Synthetic
aaggagatataccatgcaggttcaactggttgaatctggtggcgcattagttcaagccggtgatagccttcgtctgagctgcgccgcaagcggagattgtcacgttctctggcgtatgggttggtttcgccaggcacctggtaaagaacgtgaatttgtggcagccattagcctcgacggtttgtttaccaactatgccgattctgttcgtggtcgcttcagcatttcagcagattctgcgaagaataccgtgtacttacagatgaactcactgaaacctgaggataccgccgtttattattgtgcggcactgcctaagcggactgtggactattggggtcagggcacacaagtcacggtctcaagcggcggaagctctggtgaacagaaactgatttcagaag

SEQ ID NO: 721 - protein, 7 aa, Artificial Sequence
  Synthetic
DCHVLWR

SEQ ID NO: 722 - protein, 5 aa, Artificial Sequence
  Synthetic
LDGLF

SEQ ID NO: 723 - protein, 6 aa, Artificial Sequence
  Synthetic
LPATSG

SEQ ID NO: 724 - protein, 117 aa, Artificial Sequence
  Synthetic
EVQLVESGGGLVHVGDRLRLSCAASGDCHVLWRMGWFRQAPGKEREFVAAISLDGLFTNYADSVRGRFSISADSAKNTVYLQMNSLKPEDTAVYYCAALPATSGDYWGQGTQVTVSS

SEQ ID NO: 725 - DNA, 405 bp, Artificial Sequence
  Synthetic
gaaggagatataccatggaagttcaactggttgaatctggtggcggtttagttcacgtcggtgatcgccttcgtctgagctgcgccgcaagcggagattgtcacgttctctggcgtatgggttggtttcgccaggcacctggtaaagaacgtgaatttgtggcagccattagcctcgacggtttgtttaccaactatgccgattctgttcgtggtcgcttcagcatttcagcagattctgcgaagaataccgtgtacttacagatgaactcactgaaacctgaggataccgccgtttattattgtgcggcattgccggcgacttctggcgactattggggtcagggcacacaagtcacggtctcaagcggcggaagctctggtgaacagaaactgatttcagaag

SEQ ID NO: 726 - protein, 7 aa, Artificial Sequence
  Synthetic
DCHVLWR

SEQ ID NO: 727 - protein, 5 aa, Artificial Sequence
  Synthetic
LDGLF

SEQ ID NO: 728 - protein, 4 aa, Artificial Sequence
  Synthetic
MPFF

SEQ ID NO: 729 - protein, 115 aa, Artificial Sequence
  Synthetic
EVQLVESGGGLVQAGDSLRLSCAASGDCHVLWRMGWFRQAPGKEREFVAAISLDGLFTNYADSVRGRFSISADSAKNTVYLQMNSLKPEDTAVYYCAAMPFFAYWGQGTQVTVSS

SEQ ID NO: 730 - DNA, 398 bp, Artificial Sequence
  Synthetic
aaggagatataccatggaagttcaactggttgaatctggtggcggtttagttcaagccggtgatagccttcgtctgagctgcgccgcaagcggagattgtcacgttctctggcgtatgggttggtttcgccaggcacctggtaaagaacgtgaatttgtggcagccattagcctcgacggtttgtttaccaactatgccgattctgttcgtggtcgcttcagcatttcagcagattctgcgaagaataccgtgtacttacagatgaactcactgaaacctgaggataccgccgtttattattgtgcggcaatgcctttttttgcctattggggtcagggcacacaagtcacggtctcaagcggcggaagctctggtgaacagaaactgatttcagaag

SEQ ID NO: 731 - protein, 7 aa, Artificial Sequence
  Synthetic
DCHVLWR

SEQ ID NO: 732 - protein, 5 aa, Artificial Sequence
  Synthetic
LDGLF

SEQ ID NO: 733 - protein, 4 aa, Artificial Sequence
  Synthetic
MPFF

SEQ ID NO: 734 - protein, 115 aa, Artificial Sequence
  Synthetic
EVQLVESGGGLVQAGDSLRLSCAASGDCHVLWRMGWFHQAPGKEREFVAAISLDGLFTNYADSVRGRFSISADSAKNTVYLQMNSLKPEDTAVYYCAAMPFFDYWGQGTQVTVSS

SEQ ID NO: 735 - DNA, 390 bp, Artificial Sequence
  Synthetic
ataccatggaagttcaactggttgaatctggtggcggtttagttcaagccggtgatagccttcgtctgagctgcgccgcaagcggagattgtcacgttctctggcgtatgggttggtttcaccaggcacctggtaaagaacgtgaatttgtggcagccattagcctcgacggtttgtttaccaactatgccgattctgttcgtggtcgcttcagcatttcagcagattctgcgaagaataccgtgtacttacagatgaactcactgaaacctgaggataccgccgtttattattgtgcggcaatgcctttttttgactattggggtcagggcacacaagtcacggtctcaagcggcggaagctctggtgaacagaaactgatttcagaag

SEQ ID NO: 736 - protein, 7 aa, Artificial Sequence
  Synthetic
DCHVLWR

SEQ ID NO: 737 - protein, 5 aa, Artificial Sequence
  Synthetic
LDGLF

SEQ ID NO: 738 - protein, 9 aa, Artificial Sequence
  Synthetic
HHFHPGGMD

SEQ ID NO: 739 - protein, 120 aa, Artificial Sequence
  Synthetic
EVQLVESGGGLVQAGDSLRLSCAASGDCHVLWRMGWFRQAPGKEREFVAAISLDGLFTNYADSVRGRFSISADSAKNTVYLQMNSLKPEDTAVYYCNAHHFHPGGMDAYWGQGTQVTVSS

SEQ ID NO: 740 - DNA, 412 bp, Artificial Sequence
  Synthetic
aggagatataccatggaagttcaactggttgaatctggtggcggtttagttcaagccggtgatagccttcgtctgagctgcgccgcaagcggagattgtcacgttctctggcgcatgggttggtttcgccaggcacctggtaaagaacgtgaatttgtggcagccattagcctcgacggtttgtttaccaactatgccgattctgttcgtggtcgcttcagcatttcagcagattctgcgaagaataccgtgtacttacagatgaactcactgaaacctgaggataccgccgtttattattgtaatgcacaccattttcatcctggtggtatggatgcctattggggtcagggcacacaagtcacggtctcaagcggcggaagctctggtgaacagaaactgatttcagaag

SEQ ID NO: 741 - protein, 7 aa, Artificial Sequence
  Synthetic
DCHVLWR

SEQ ID NO: 742 - protein, 5 aa, Artificial Sequence
  Synthetic
LDGLF

SEQ ID NO: 743 - protein, 4 aa, Artificial Sequence
  Synthetic
MPFF

SEQ ID NO: 744 - protein, 115 aa, Artificial Sequence
  Synthetic
EVQLVESGGGLVQAGDSLRLSCAASGDCHVLWRMDWFRQAPGKEREFVAAISLDGLFTNYADSVRGRFSISADSAKNTVYLQMNSLKPEDTAVYYCAAMPFFDYWGQGTQVTVSS

SEQ ID NO: 745 - DNA, 396 bp, Artificial Sequence
  Synthetic
ggagatataccatggaagttcaactggttgaatctggtggcggtttagttcaagccggtgatagccttcgtctgagctgcgccgcaagcggagattgtcacgttctctggcgtatggattggtttcgccaggcacctggtaaagaacgtgaatttgtggcagccattagcctcgacggtttgtttaccaactatgccgattctgttcgtggtcgcttcagcatttcagcagattctgcgaagaataccgtgtacttacagatgaactcactgaaacctgaggataccgccgtttattattgtgcggcaatgcctttttttgactattggggtcagggcacacaagtcacggtctcgagcggcggaagctctggtgaacagaaactgatttcagaag

SEQ ID NO: 746 - protein, 7 aa, Artificial Sequence
  Synthetic
DCHVLWR

SEQ ID NO: 747 - protein, 5 aa, Artificial Sequence
  Synthetic
LDGLF

SEQ ID NO: 748 - protein, 4 aa, Artificial Sequence
  Synthetic
MPFF

SEQ ID NO: 749 - protein, 115 aa, Artificial Sequence
  Synthetic
EVQLVESGGVLVQAGDSLRLSCAASGDCHVLWRMGWFRQAPGKEREFVAAISLDGLFTNYADSVRGRFSISADSAKNTVYLQMNSLKPEDTAVYYCAAMPFFDYWGQGTQVTVSS

SEQ ID NO: 750 - DNA, 399 bp, Artificial Sequence
  Synthetic
gaaggagatataccatggaagttcaactggttgaatctggtggcgttttagttcaagccggtgatagccttcgtctgagctgcgccgcaagcggagattgtcacgttctctggcgtatgggttggtttcgccaggcacctggtaaagaacgtgaatttgtggcagccattagcctcgacggtttgtttaccaactatgccgattctgttcgtggtcgcttcagcatttcagcagattctgcgaagaataccgtgtacttacagatgaactcactgaaacctgaggataccgccgtttattattgtgcggcaatgcctttttttgactattggggtcagggcacacaagtcacggtctcaagcggcggaagctctggtgaacagaaactgatttcagaag

SEQ ID NO: 751 - protein, 7 aa, Artificial Sequence
  Synthetic
DCHVLWR

SEQ ID NO: 752 - protein, 5 aa, Artificial Sequence
  Synthetic
LDGLF

SEQ ID NO: 753 - protein, 6 aa, Artificial Sequence
  Synthetic
LPSVCT

SEQ ID NO: 754 - protein, 117 aa, Artificial Sequence
  Synthetic
EVQLVESGGGLVQAGDSLRLSCAASGDCHVLWRMGWFRQAPGKEREFVAAISLDGLFTNYADSVRGRFSISADSAKNTVYLQMNSLKPEDTAVYYCAALPSVCTDYWGQGTQVTVSS

SEQ ID NO: 755 - DNA, 396 bp, Artificial Sequence
  Synthetic
ataccatggaagttcaactggttgaatctggtggcggtttagttcaagccggtgatagccttcgtctgagctgcgccgcaagcggagattgtcacgttctctggcgtatgggttggtttcgccaggcacctggtaaagaacgtgaatttgtggcagccattagcctcgacggtttgtttaccaactatgccgattctgttcgtggtcgcttcagcatttcagcagattctgcgaagaataccgtgtacttacagatgaactcactgaaacctgaggataccgccgtttattattgtgcggcactgcctagtgtgtgtaccgactattggggtcagggcacacaagtcacggtctcaagcggcggaagctctggtgaacagaaactgatttcagaag

SEQ ID NO: 756 - protein, 7 aa, Artificial Sequence
  Synthetic
DCHVLWR

SEQ ID NO: 757 - protein, 5 aa, Artificial Sequence
  Synthetic
LDGLF

SEQ ID NO: 758 - protein, 6 aa, Artificial Sequence
  Synthetic
LPATSG

SEQ ID NO: 759 - protein, 117 aa, Artificial Sequence
  Synthetic
EVQLVESGGGLVQAGDSLRLSCAASGDCHVLWRMGWFSQAPGKEREFVAAISLDGLFTNYADSVRGRFSISADSAKNTVDVQMNSLKPEDTAVYYCAALPATSGDYWGQGTQVTVSS

SEQ ID NO: 760 - DNA, 404 bp, Artificial Sequence
  Synthetic
aaggagatataccatggaagttcaactggttgaatctggtggcggtttagttcaagccggtgatagccttcgtctgagctgcgccgcaagcggagattgtcacgttctctggcgtatgggttggtttagccaggcacctggtaaagaacgtgaatttgtggcagccattagcctcgacggtttgtttaccaactatgccgattctgttcgtggtcgcttcagcatttcagcagattctgcgaagaataccgtggacgtacagatgaactcactgaaacctgaggataccgccgtttattattgtgcggcattgccggcgacttctggcgactattggggtcagggcacacaagtcacggtctcaagcggcggaagctctggtgaacagaaactaatttcagaag

SEQ ID NO: 761 - protein, 7 aa, Artificial Sequence
  Synthetic
DCHVLWR

SEQ ID NO: 762 - protein, 5 aa, Artificial Sequence
  Synthetic
LDGLF

SEQ ID NO: 763 - protein, 4 aa, Artificial Sequence
  Synthetic
MPFF

SEQ ID NO: 764 - protein, 115 aa, Artificial Sequence
  Synthetic
EVQLVESGGGLVQAGDSLRLSCAASGDCHVLWRMGWFRQAPGKEREFVAAISLDGLFTNYADSVRGRFSISADSAKNTMYLQMNSLKPEDTAVYYCAAMPFFDYWGQGTQVTVSS

SEQ ID NO: 765 - DNA, 392 bp, Artificial Sequence
  Synthetic
atataccatggaagttcaactggttgaatctggtggcggtttagttcaagccggtgatagccttcgtctgagctgcgccgcaagcggagattgtcacgttctctggcgtatgggttggtttcgccaggcacctggtaaagaacgtgaatttgtggcagccattagcctcgacggtttgtttaccaactatgccgattctgttcgtggtcgcttcagcatttcagcagattctgcgaagaataccatgtacttacagatgaactcactgaaacctgaggataccgccgtttattattgtgcggcaatgcctttttttgactattggggtcagggcacacaagtcacggtctcaagcggcggaagctctggtgaacagaaactgatttcagaag

SEQ ID NO: 766 - protein, 7 aa, Artificial Sequence
  Synthetic
DCHVLWR

SEQ ID NO: 767 - protein, 5 aa, Artificial Sequence
  Synthetic
LDGLF

SEQ ID NO: 768 - protein, 6 aa, Artificial Sequence
  Synthetic
LPATSG

SEQ ID NO: 769 - protein, 117 aa, Artificial Sequence
  Synthetic
EVQLVESGGGLVQAGDSLRLSCAASGDCHVLWRMGWFRQAPGKEREFVAAISLDGLFTNYADSVRGRFSISADSAKNTVYLQMNSLKPEDTAVYYCATLPATSGDYWGQGTQVTVSS

SEQ ID NO: 770 - DNA, 394 bp, Artificial Sequence
  Synthetic
accatggaagttcaactggttgaatctggtggcggtttagttcaagccggtgatagccttcgtctgagctgcgccgcaagcggagattgtcacgttctctggcgtatgggttggtttcgccaggcacctggtaaagaacgtgaatttgtggcagccattagcctcgacggtttgtttaccaactatgccgattctgttcgtggtcgcttcagcatttcagcagattctgcgaagaataccgtgtacttacagatgaactcactgaaacctgaggataccgccgtttattattgtgcgacattgccggcgacttctggcgactattggggtcagggcacacaagtcacggtctcaagcggcggaagctctggtgaacagaaactgatttcagaag

SEQ ID NO: 771 - protein, 7 aa, Artificial Sequence
  Synthetic
DCHVLWR

SEQ ID NO: 772 - protein, 5 aa, Artificial Sequence
  Synthetic
LDGLF

SEQ ID NO: 773 - protein, 4 aa, Artificial Sequence
  Synthetic
MPFF

SEQ ID NO: 774 - protein, 115 aa, Artificial Sequence
  Synthetic
EVQLFESGGGLVQAGDSLRLSCAASGDCHVLWRMGWFRQAPGKEREFVAAISLDGLFTNYADSVRGRFSISADSAKNTVYLQMNSLKPEDTAVYYCAAMPFFDYWGQGTQVTVSS

SEQ ID NO: 775 - DNA, 392 bp, Artificial Sequence
  Synthetic
atataccatggaagttcaactgtttgaatctggtggcggtttagttcaagccggtgatagccttcgtctgagctgcgccgcaagcggagattgtcacgttctctggcgtatgggttggtttcgccaggcacctggtaaagaacgtgaatttgtggcagccattagcctcgacggtttgtttaccaactatgccgattctgttcgtggtcgcttcagcatttcagcagattctgcgaagaataccgtgtacttacagatgaactcactgaaacctgaggataccgccgtttattattgtgcggcaatgcctttttttgactattggggtcagggcacacaagtcacggtctcaagcggcggaagctctggtgaacagaaactgatttcagaag

SEQ ID NO: 776 - protein, 7 aa, Artificial Sequence
  Synthetic
DCHVLWR

SEQ ID NO: 777 - protein, 5 aa, Artificial Sequence
  Synthetic
LDGLF

SEQ ID NO: 778 - protein, 6 aa, Artificial Sequence
  Synthetic
LPSVCT

SEQ ID NO: 779 - protein, 117 aa, Artificial Sequence
  Synthetic
EVQLVESGGGLVQAGDSLRLSCAASGDCHVLWRMGCFRQAPGKEREFVAAISLDGLFTNYADSVRGRFSISADSAKNTVYLQMNSLKPEDTAVYYCAALPSVCTDYWGQGTQVTVSS

SEQ ID NO: 780 - DNA, 404 bp, Artificial Sequence
  Synthetic
aaggagatataccatggaagttcaactggttgaatctggtggcggtttagttcaagccggtgatagccttcgtctgagctgcgccgcaagcggagattgtcacgttctctggcgtatgggttgttttcgccaggcacctggtaaagaacgtgaatttgtggcagccattagcctcgacggtttgtttaccaactatgccgattctgttcgtggtcgcttcagcatttcagcagattctgcgaagaataccgtgtacttacagatgaactcactgaaacctgaggataccgccgtttattattgtgcggcactgcctagtgtgtgtaccgactattggggtcagggcacacaagtcacggtctcaagcggcggaagctctggtgaacagaaactgatttcagaag

SEQ ID NO: 781 - protein, 7 aa, Artificial Sequence
  Synthetic
DCHVLWR

SEQ ID NO: 782 - protein, 5 aa, Artificial Sequence
  Synthetic
LDGLF

SEQ ID NO: 783 - protein, 6 aa, Artificial Sequence
  Synthetic
LPSVCT

SEQ ID NO: 784 - protein, 117 aa, Artificial Sequence
  Synthetic
EVQLVESGGGLVQAGDSLRLSCAASGDCHVLWRMGWFRQAPGKEREFVAAISLDGLFTNYADSVRGRFSISADSAKNTVYLQMNSLKPEDTAVYYCAALPSVCTAYWGQGTQVTVSS

SEQ ID NO: 785 - DNA, 403 bp, Artificial Sequence
  Synthetic
aggagatataccatggaagttcaactggttgaatctggtggcggtttagttcaagccggtgatagccttcgtctgagctgcgccgcaagcggagattgtcacgttctctggcgtatgggttggtttcgccaggcacctggtaaagaacgtgaatttgtggcagccattagcctcgacggtttgtttaccaactatgccgattctgttcgtggtcgcttcagcatttcagcagattctgcgaagaataccgtgtacttacagatgaactcactgaaacctgaggataccgccgtttattattgtgcggcactgcctagtgtgtgtaccgcctattggggtcagggcacacaagtcacggtctcaagcggcggaagctctggtgaacagaaactgatttcagaag

SEQ ID NO: 786 - protein, 7 aa, Artificial Sequence
  Synthetic
DCHVLWR

SEQ ID NO: 787 - protein, 5 aa, Artificial Sequence
  Synthetic
LDGLF

SEQ ID NO: 788 - protein, 6 aa, Artificial Sequence
  Synthetic
LPSVCT

SEQ ID NO: 789 - protein, 117 aa, Artificial Sequence
  Synthetic
EVQLVESGGGLVQAGDSLRLSCAASGDCHVLWRMGWFRQAPGKERESVAAISLDGLFTNYADSVRGRFSISADSAKNTVYLQMNSLKPEDTAVYYCAALPSVCTAYWGQGTQVTVSS

SEQ ID NO: 790 - DNA, 402 bp, Artificial Sequence
  Synthetic
ggagatataccatggaagttcaactggttgaatctggtggcggtttagttcaagccggtgatagccttcgtctgagctgcgccgcaagcggagattgtcacgttctctggcgtatgggttggtttcgccaggcacctggtaaagaacgtgaatctgtggcagccattagcctcgacggtttgtttaccaactatgccgattctgttcgtggtcgcttcagcatttcagcagattctgcgaagaataccgtgtacttacagatgaactcactgaaacctgaggataccgccgtttattattgtgcggcactgcctagtgtgtgtaccgcctattggggtcagggcacacaagtcacggtctcaagcggcggaagctctggtgaacagaaactgatttcagaag

SEQ ID NO: 791 - protein, 7 aa, Artificial Sequence
  Synthetic
DCHVLWR

SEQ ID NO: 792 - protein, 5 aa, Artificial Sequence
  Synthetic
LDGLF

SEQ ID NO: 793 - protein, 4 aa, Artificial Sequence
  Synthetic
MPFF

SEQ ID NO: 794 - protein, 115 aa, Artificial Sequence
  Synthetic
EVQLVESGGGLVQAGDSLRLSCAASGDCHVLWRMGWFRQAPGKEREFLAAISLDGLFTNYADSVRGRFSISADSAKNTVYLQMNSLKPEDTAVYYCAAMPFFDYWGQGTQVTVSS

SEQ ID NO: 795 - DNA, 390 bp, Artificial Sequence
  Synthetic
ataccatggaagttcaactggttgaatctggtggcggtttagttcaagccggtgatagccttcgtctgagctgcgccgcaagcggagattgtcacgttctctggcgtatgggttggtttcgccaggcacctggtaaagaacgtgaatttttggcagccattagcctcgacggtttgtttaccaactatgccgattctgttcgtggtcgcttcagcatttcagcagattctgcgaagaataccgtgtacttacagatgaactcactgaaacctgaggataccgccgtttattattgtgcggcaatgcctttttttgactattggggtcagggcacacaagtcacggtctcaagcggcggaagctctggtgaacagaaactgatttcagaag

SEQ ID NO: 796 - protein, 7 aa, Artificial Sequence
  Synthetic
DCHVLWR

SEQ ID NO: 797 - protein, 5 aa, Artificial Sequence
  Synthetic
LDGLF

SEQ ID NO: 798 - protein, 9 aa, Artificial Sequence
  Synthetic
HHFHPGGMD

SEQ ID NO: 799 - protein, 120 aa, Artificial Sequence
  Synthetic
EVQLVESGGGLVQAGDSLRLSCAASGDCHVLWRMGWFRQAPGKEREFVAAISLDGLFTNYADSVRGRFSISADSAKNTVYLQMNSLKPEDTAVYYCNAHHFHPGGMDDYWGQGTQVTVSI

SEQ ID NO: 800 - DNA, 407 bp, Artificial Sequence
  Synthetic
atataccatggaagttcaactggttgaatctggtggcggtttagttcaagccggtgatagccttcgtctgagctgcgccgcaagcggagattgtcacgttctctggcgtatgggttggtttcgccaggcacctggtaaagaacgtgaatttgtggcagccattagcctcgacggtttgtttaccaactatgccgattctgttcgtggtcgcttcagcatttcagcagattctgcgaagaataccgtgtacttacagatgaactcactgaaacctgaggataccgccgtttattattgtaatgcacaccattttcatcctggtggtatggatgactattggggtcagggcacacaagtcacggtctcaatcggcggaagctctggtgaacagaaactgatttcagaag

SEQ ID NO: 801 - protein, 7 aa, Artificial Sequence
  Synthetic
DCHVLWR

SEQ ID NO: 802 - protein, 5 aa, Artificial Sequence
  Synthetic
LDGLF

SEQ ID NO: 803 - protein, 4 aa, Artificial Sequence
  Synthetic
MPFF

SEQ ID NO: 804 - protein, 115 aa, Artificial Sequence
  Synthetic
QVQLVESGGALVQPGGSLRLSCAASGDCHVLWRMGWFRQAPGKEREFVAAISLDGLFTNYADSVRGRFSISADSAKNTVYLQMNSLKPEDTAVYYCAAMPFFAYWGQGTQVTVSS

SEQ ID NO: 805 - DNA, 390 bp, Artificial Sequence
  Synthetic
ataccatgcaggttcaactggttgaatctggtggcgcattagttcaaccgggtggtagccttcgtctgagctgcgccgcaagcggagattgtcacgttctctggcgtatgggttggtttcgccaggcacctggtaaagaacgtgaatttgtggcagccattagcctcgacggtttgtttaccaactatgccgattctgttcgtggtcgcttcagcatttcagcagattctgcgaagaataccgtgtacttacagatgaactcactgaaacctgaggataccgccgtttattattgtgcggcaatgcctttttttgcctattggggtcagggcacacaagtcacggtctcaagcggcggaagctctggtgaacagaaactgatttcagaag

SEQ ID NO: 806 - protein, 7 aa, Artificial Sequence
  Synthetic
DCHVLWR

SEQ ID NO: 807 - protein, 5 aa, Artificial Sequence
  Synthetic
LDGLF

SEQ ID NO: 808 - protein, 4 aa, Artificial Sequence
  Synthetic
MPFF

SEQ ID NO: 809 - protein, 115 aa, Artificial Sequence
  Synthetic
EVQLVESGGGLVQAGDSLRLSCAASGDCHVLWRMGWFRQAPGKEREFVAAISLDGLFTNYADSVRGRFSISADSAKNTVYLQMNSQKPEDTAVYYCAAMPFFDYWGQGTQVTVSS

SEQ ID NO: 810 - DNA, 390 bp, Artificial Sequence
  Synthetic
ataccatggaagttcaactggttgaatctggtggcggtttagttcaagccggtgatagccttcgtctgagctgcgccgcaagcggagattgtcacgttctctggcgtatgggttggtttcgccaggcacctggtaaagaacgtgaatttgtggcagccattagcctcgacggtttgtttaccaactatgccgattctgttcgtggtcgcttcagcatttcagcagattctgcgaagaataccgtgtacttacagatgaactcacagaaacctgaggataccgccgtttattattgtgcggcaatgcctttttttgactattggggtcagggcacacaagtcacggtctcaagcggcggaagctctggtgaacagaaactgatttcagaag

SEQ ID NO: 811 - protein, 7 aa, Artificial Sequence
  Synthetic
DCHVLWR

SEQ ID NO: 812 - protein, 5 aa, Artificial Sequence
  Synthetic
LDGLF

SEQ ID NO: 813 - protein, 6 aa, Artificial Sequence
  Synthetic
LPVTSG

SEQ ID NO: 814 - protein, 117 aa, Artificial Sequence
  Synthetic
EVQLVESGGGLVQAGDSLRLSCAASGDCHVLWRMGWFRQAPGKEREFVAAISLDGLFTNYADSVRGRFSISADSAKNTVYLQMNSLKPEDTAVYYCAALPVTSGDYWGQGTQVTVSS

SEQ ID NO: 815 - DNA, 394 bp, Artificial Sequence
  Synthetic
accatggaagttcaactggttgaatctggtggcggtttagttcaagccggtgatagccttcgtctgagctgcgccgcaagcggagattgtcacgttctctggcgtatgggttggtttcgccaggcacctggtaaagaacgtgaatttgtggcagccattagcctcgacggtttgtttaccaactatgccgattctgttcgtggtcgcttcagcatttcagcagattctgcgaagaataccgtgtacttacagatgaactcactgaaacctgaggataccgccgtttattattgtgcggcattgccggtgacttctggcgactattggggtcagggcacacaagtcacggtctcaagcggcggaagctctggtgaacagaaactgatgtcagaag

SEQ ID NO: 816 - protein, 7 aa, Artificial Sequence
  Synthetic
DCHVLWR

SEQ ID NO: 817 - protein, 5 aa, Artificial Sequence
  Synthetic
LDGLF

SEQ ID NO: 818 - protein, 4 aa, Artificial Sequence
  Synthetic
MPFF

SEQ ID NO: 819 - protein, 115 aa, Artificial Sequence
  Synthetic
EVQLVESGGGLVQAGDSLRLSCAASGDCHVLWRMGWFRQAPGKEREFVAAISLDGLFTNYADFVRGRFSISADSAKNTVYLQMNSLKPEDTAVYYCAAMPFFDYWGQGTQVTVSS

SEQ ID NO: 820 - DNA, 398 bp, Artificial Sequence
  Synthetic
aaggagatataccatggaagttcaactggttgaatctggtggcggtttagttcaagccggtgatagccttcgtctgagctgcgccgcaagcggagattgtcacgttctctggcgtatgggttggtttcgccaggcacctggtaaagaacgtgaatttgtggcagccattagcctcgacggtttgtttaccaactatgccgattttgttcgtggtcgcttcagcatttcagcagattctgcgaagaataccgtgtacttacagatgaactcactgaaacctgaggataccgccgtttattattgtgcggcaatgcctttttttgactattggggtcagggcacacaagtcacggtctcaagcggcggaagctctggtgaacagaaactgatttcagaag

SEQ ID NO: 821 - protein, 7 aa, Artificial Sequence
  Synthetic
DCHVLWR

SEQ ID NO: 822 - protein, 5 aa, Artificial Sequence
  Synthetic
LDGLF

SEQ ID NO: 823 - protein, 4 aa, Artificial Sequence
  Synthetic
MPFF

SEQ ID NO: 824 - protein, 115 aa, Artificial Sequence
  Synthetic
EVQLVESGGGLVQAGDSLRLSCAASGDCHVLWRMGWFRQAPGKEREFVAAIRLDGLFTNYADSVRGRFSISADSAKNTVYLQMNSLKPEDTAVYYCAAMPFFDYWGQGTQVTVSS

SEQ ID NO: 825 - DNA, 388 bp, Artificial Sequence
  Synthetic
accatggaagttcaactggttgaatctggtggcggtttagttcaagccggtgatagccttcgtctgagctgcgccgcaagcggagattgtcacgttctctggcgtatgggttggtttcgccaggcacctggtaaagaacgtgaatttgtggcagccattaggctcgacggtttgtttaccaactatgccgattctgttcgtggtcgcttcagcatttcagcagattctgcgaagaataccgtgtacttacagatgaactcactgaaacctgaggataccgccgtttattattgtgcggcaatgcctttttttgactattggggtcagggcacacaagtcacggtctcaagcggcggaagctctggtgaacagaaactgatttcagaag

SEQ ID NO: 826 - protein, 7 aa, Artificial Sequence
  Synthetic
DCHVLWR

SEQ ID NO: 827 - protein, 5 aa, Artificial Sequence
  Synthetic
LDGLF

SEQ ID NO: 828 - protein, 4 aa, Artificial Sequence
  Synthetic
MPFF

SEQ ID NO: 829 - protein, 115 aa, Artificial Sequence
  Synthetic
EVQLVESGGGLVQAGDSLRLSCAASGDCHVLWRMGWFRQAPGKEREFVAAISLDGLFTNYADSVRGRCSISADSAKNTVYLQMNSLKPEDTAVYYCAAMPFFDYWGQGTQVTVSS

SEQ ID NO: 830 - DNA, 396 bp, Artificial Sequence
  Synthetic
ggagatataccatggaagttcaactggttgaatctggtggcggtttagttcaagccggtgatagccttcgtctgagctgcgccgcaagcggagattgtcacgttctctggcgtatgggttggtttcgccaggcacctggtaaagaacgtgaatttgtggcagccattagcctcgacggtttgtttaccaactatgccgattctgttcgtggtcgctgcagcatttcagcagattctgcgaagaataccgtgtacttacagatgaactcactgaaacctgaggataccgccgtttattattgtgcggcaatgcctttttttgactattggggtcagggcacacaagtcacggtctcaagcggcggaagctctggtgaacagaaactgatttcagaag

SEQ ID NO: 831 - protein, 7 aa, Artificial Sequence
  Synthetic
DCHVLWR

SEQ ID NO: 832 - protein, 5 aa, Artificial Sequence
  Synthetic
LDGLF

SEQ ID NO: 833 - protein, 10 aa, Artificial Sequence
  Synthetic
LPSTPECYAL

SEQ ID NO: 834 - protein, 121 aa, Artificial Sequence
  Synthetic
EVQLVESGGGLVQAGDSLRLSCAASGDCHVLWRMGWFRQAPGKEREFVAAISLDGLFTNYADSVRGRFSISADSAKNTVYLQMNSLKPEDTAVYYCATLPSTPECYALGYWGQDTQVTVSS

SEQ ID NO: 835 - DNA, 408 bp, Artificial Sequence
  Synthetic
ataccatggaagttcaactggttgaatctggtggcggtttagttcaagccggtgatagccttcgtctgagctgcgccgcaagcggagattgtcacgttctctggcgtatgggttggtttcgccaggcacctggtaaagaacgtgaatttgtggcagccattagcctcgacggtttgtttaccaactatgccgattctgttcgtggtcgcttcagcatttcagcagattctgcgaagaataccgtgtacttacagatgaactcactgaaacctgaggataccgccgtttattattgtgcgacactgcctagcacccctgagtgttatgccttgggctattggggtcaggacacacaagtcacggtctcaagcggcggaagctctggtgaacagaaactgatttcagaag

SEQ ID NO: 836 - protein, 7 aa, Artificial Sequence
  Synthetic
DCHVLWR

SEQ ID NO: 837 - protein, 5 aa, Artificial Sequence
  Synthetic
LDGLF

SEQ ID NO: 838 - protein, 4 aa, Artificial Sequence
  Synthetic
MPFF

SEQ ID NO: 839 - protein, 115 aa, Artificial Sequence
  Synthetic
EVQLVESGGGLVHAGDRLRLSCAASGDCHVLWRMGWFRQAPGKEREFVAAISLDGLFTNYADSVRGRFSISADSAKNTVYLQMNSLKPEDTAVYYCAAMPFFDYWGQGTQVTVSS

SEQ ID NO: 840 - DNA, 399 bp, Artificial Sequence
  Synthetic
gaaggagatataccatggaagttcaactggttgaatctggtggcggtttagttcacgccggtgatcgccttcgtctgagctgcgccgcaagcggagattgtcacgttctctggcgtatgggttggtttcgccaggcacctggtaaagaacgtgaatttgtggcagccattagcctcgacggtttgtttaccaactatgccgattctgttcgtggtcgcttcagcatttcagcagattctgcgaagaataccgtgtacttacagatgaactcactgaaacctgaggataccgccgtttattattgtgcggcaatgcctttttttgactattggggtcagggcacacaagtcacggtctcaagcggcggaagctctggtgaacagaaactgatttcagaag

SEQ ID NO: 841 - protein, 7 aa, Artificial Sequence
  Synthetic
DCHVLWR

SEQ ID NO: 842 - protein, 5 aa, Artificial Sequence
  Synthetic
LDGLF

SEQ ID NO: 843 - protein, 9 aa, Artificial Sequence
  Synthetic
HHFHPGGMD

SEQ ID NO: 844 - protein, 120 aa, Artificial Sequence
  Synthetic
EVQLVESGGGLVQAGDSLRLSCDASGDCHVLWRMGWFRQAPGKEREFVAAISLDGLFTNYADSVRGRFSISADSAKNTVYLQMNSLKPEDTAVYYCNAHHFHPGGMDDYWGQGTQVTVSS

SEQ ID NO: 845 - DNA, 411 bp, Artificial Sequence
  Synthetic
ggagatataccatggaagttcaactggttgaatctggtggcggtttagttcaagccggtgatagccttcgtctgagctgcgacgcaagcggagattgtcacgttctctggcgtatgggttggtttcgccaggcacctggtaaagaacgtgaatttgtggcagccattagcctcgacggtttgtttaccaactatgccgattctgttcgtggtcgcttcagcatttcagcagattctgcgaagaataccgtgtacttacagatgaactcactgaaacctgaggataccgccgtttattattgtaatgcacaccattttcatcctggtggtatggatgactactggggtcagggcacacaagtcacggtctcaagcggcggaagctctggtgaacagaaactgatttcagaag

SEQ ID NO: 846 - protein, 7 aa, Artificial Sequence
  Synthetic
DCHVLWR

SEQ ID NO: 847 - protein, 5 aa, Artificial Sequence
  Synthetic
LDGLF

SEQ ID NO: 848 - protein, 6 aa, Artificial Sequence
  Synthetic
LPATSG

SEQ ID NO: 849 - protein, 117 aa, Artificial Sequence
  Synthetic
EVQLVDSGGGLVHAGDRLRLSCAASGDCHVLWRMGWFRQAPGKEREFVAAISLDGLFTNYADSVRGRFSISADSAKNTVYLQMNSLKPEDTAVYYCAALPATSGDYWGQGTQVTVSS

SEQ ID NO: 850 - DNA, 405 bp, Artificial Sequence
  Synthetic
gaaggagatataccatggaagttcaactggttgactctggtggcggtttagttcacgccggtgatcgccttcgtctgagctgcgccgcaagcggagattgtcacgttctctggcgtatgggttggtttcgccaggcacctggtaaagaacgtgaatttgtggcagccattagcctcgacggtttgtttaccaactatgccgattctgttcgtggtcgcttcagcatttcagcagattctgcgaagaataccgtgtacttacagatgaactcactgaaacctgaggataccgccgtttattattgtgcggcattgccggcgacttctggcgactattggggtcagggcacacaagtcacggtctcaagcggcggaagctctggtgaacagaaactgatttcagaag

SEQ ID NO: 851 - protein, 7 aa, Artificial Sequence
  Synthetic
DCHVLWR

SEQ ID NO: 852 - protein, 5 aa, Artificial Sequence
  Synthetic
LDGLF

SEQ ID NO: 853 - protein, 6 aa, Artificial Sequence
  Synthetic
LPATSG

SEQ ID NO: 854 - protein, 117 aa, Artificial Sequence
  Synthetic
EVQLVESGGGLVQAGDSLRLSCAANGDCHVLWRMGWFRQAPGKEREFVAAISLDGLFTNYADSVRGRFSISADSAKNTVYLQINSLKPEDTAVYYCAALPATSGDYWVQGTQVTVSS

SEQ ID NO: 855 - DNA, 396 bp, Artificial Sequence
  Synthetic
ataccatggaagttcaactggttgaatctggtggcggtttagttcaagccggtgatagccttcgtctgagctgcgccgcaaacggagattgtcacgttctctggcgtatgggttggtttcgccaggcacctggtaaagaacgtgaatttgtggcagccattagcctcgacggtttgtttaccaactatgccgattctgttcgtggtcgcttcagcatttcagcagattctgcgaagaataccgtgtacttacagattaactcactgaaacctgaggataccgccgtttattattgtgcggcattgccggcgacttctggcgactattgggttcagggcacacaagtcacggtctcaagcggcggaagctctggtgaacagaaactgctttcagaag

SEQ ID NO: 856 - protein, 7 aa, Artificial Sequence
  Synthetic
DCHVLWR

SEQ ID NO: 857 - protein, 5 aa, Artificial Sequence
  Synthetic
LDGLF

SEQ ID NO: 858 - protein, 4 aa, Artificial Sequence
  Synthetic
MPFF

SEQ ID NO: 859 - protein, 115 aa, Artificial Sequence
  Synthetic
EVQLVESGGGLVQAGDSLRLSCAANGDCHVLWRMGWFRQAPGKEREFVAAISLDGLFTNYADSVRGRFSISADSAKNTVYLQMNSLKPEDTAVYYCAAMPFFDYWGQGTQVTVSS

SEQ ID NO: 860 - DNA, 399 bp, Artificial Sequence
  Synthetic
gaaggagatataccatggaagttcaactggttgaatctggtggcggtttagttcaagccggtgatagccttcgtctgagctgcgccgcaaacggagattgtcacgttctctggcgtatgggttggtttcgccaggcacctggtaaagaacgtgaatttgtggcagccattagcctcgacggtttgtttaccaactatgccgattctgttcgtggtcgcttcagcatttcagcagattctgcgaagaataccgtgtacttacagatgaactcactgaaacctgaggataccgccgtttattattgtgcggcaatgcctttttttgactattggggtcagggcacacaagtcacggtctcaagcggcggaagctctggtgaacagaaactgatttcagaag

SEQ ID NO: 861 - protein, 7 aa, Artificial Sequence
  Synthetic
DCHVLWR

SEQ ID NO: 862 - protein, 5 aa, Artificial Sequence
  Synthetic
LDGLF

SEQ ID NO: 863 - protein, 9 aa, Artificial Sequence
  Synthetic
HHFHPGGMD

SEQ ID NO: 864 - protein, 120 aa, Artificial Sequence
  Synthetic
EVQLVESGGGLVQVGDSLRLSCAASGDCHVLWRMGWFRQAPGKEREFVAAISLDGLFTNYADSVRGRFSISADSAKNTVYLQMNSLKPEDTAVYYCNAHHFHPGGMDDYWGQGTQVTVSS

SEQ ID NO: 865 - DNA, 413 bp, Artificial Sequence
  Synthetic
aaggagatataccatggaagttcaactggttgaatctggtggcggtttagttcaagtcggtgatagccttcgtctgagctgcgccgcaagcggagattgtcacgttctctggcgtatgggttggtttcgccaggcacctggtaaagaacgtgaatttgtggcagccattagcctcgacggtttgtttaccaactatgccgattctgttcgtggtcgcttcagcatttcagcagattctgcgaagaataccgtgtacttacagatgaactcactgaaacctgaggataccgccgtttattattgtaatgcacaccattttcatcctggtggtatggatgactattggggtcagggcacacaagtcacggtctcaagcggcggaagctctggtgaacagaaactgatttcagaag

SEQ ID NO: 866 - protein, 7 aa, Artificial Sequence
  Synthetic
DCHVLWR

SEQ ID NO: 867 - protein, 5 aa, Artificial Sequence
  Synthetic
LDGLF

SEQ ID NO: 868 - protein, 9 aa, Artificial Sequence
  Synthetic
HHFHPGGMD

SEQ ID NO: 869 - protein, 120 aa, Artificial Sequence
  Synthetic
EVQLVESGGGLVQAGDSLRLSCAASGDCHVLWRMGWFRQAPGKEREFVAAISLDGLFTNYADSVRGRFSISADSAKNTVYLQMNSLKPEDTAVYYCNAHHFHPGGMDDYGGQGTQVTVSS

SEQ ID NO: 870 - DNA, 409 bp, Artificial Sequence
  Synthetic
agatataccatggaagttcaactggttgaatctggtggcggtttagttcaagccggtgatagccttcgtctgagctgcgccgcaagcggagattgtcacgttctctggcgtatgggttggtttcgccaggcacctggtaaagaacgtgaatttgtggcagccattagcctcgacggtttgtttaccaactatgccgattctgttcgtggtcgcttcagcatttcagcagattctgcgaagaataccgtgtacttacagatgaactcactgaaacctgaggataccgccgtttattattgtaatgcacaccattttcatcctggtggtatggatgactatggggggcagggcacacaagtcacggtctcaagcggcggaagctctggtgaacagaaactgatttcagaag

SEQ ID NO: 871 - protein, 7 aa, Artificial Sequence
  Synthetic
DCHVLWR

SEQ ID NO: 872 - protein, 5 aa, Artificial Sequence
  Synthetic
LDGLF

SEQ ID NO: 873 - protein, 4 aa, Artificial Sequence
  Synthetic
MPFF

SEQ ID NO: 874 - protein, 115 aa, Artificial Sequence
  Synthetic
EVQLVESGGGLVQAGDSLRLSCAASGDCHVLWRMGWFRQAPGKEREFVAAISLDGLFTNYADSVRGRFSISADSAKNTVYLQMNSLKPEDTAVYYCAAMPFFDYGGQGTQVTVAS

SEQ ID NO: 875 - DNA, 390 bp, Artificial Sequence
  Synthetic
ataccatggaagttcaactggttgaatctggtggcggtttagttcaagccggtgatagccttcgtctgagctgcgccgcaagcggagattgtcacgttctctggcgtatgggttggtttcgccaggcacctggtaaagaacgtgaatttgtggcagccattagcctcgacggtttgtttaccaactatgccgattctgttcgtggtcgcttcagcatttcagcagattctgcgaagaataccgtgtacttacagatgaactcactgaaacctgaggataccgccgtttattattgtgcggcaatgcctttttttgactatgggggtcagggcacacaagtcacggtcgcaagcggcggaagctctggggaacagaaactgatttcagaag

SEQ ID NO: 876 - protein, 7 aa, Artificial Sequence
  Synthetic
DCHVLWR

SEQ ID NO: 877 - protein, 5 aa, Artificial Sequence
  Synthetic
LDGLF

SEQ ID NO: 878 - protein, 6 aa, Artificial Sequence
  Synthetic
LPSVCT

SEQ ID NO: 879 - protein, 117 aa, Artificial Sequence
  Synthetic
EVQLVESGGDLVQAGDSLRLSCAASGDCHVLWRMGWFRQAPGKEREFVAAISLDGLFTNYADSVRGRFSISADSAKNTVYLQMNSLKPEDTAVYYCAALPSVCTDYWGQGTQVTVSS

SEQ ID NO: 880 - DNA, 402 bp, Artificial Sequence
  Synthetic
ggagatataccatggaagttcaactggttgaatctggtggcgatttagttcaagccggtgatagccttcgtctgagctgcgccgcaagcggagattgtcacgttctctggcgtatgggttggtttcgccaggcacctggtaaagaacgtgaatttgtggcagccattagcctcgacggtttgtttaccaactatgccgattctgttcgtggtcgcttcagcatttcagcagattctgcgaagaataccgtgtacttacagatgaactcactgaaacctgaggataccgccgtttattattgtgcggcactgcctagtgtgtgtaccgactattggggtcagggcacacaagtcacggtctcaagcggcggaagctctggtgaacagaaactgatttcagaag

SEQ ID NO: 881 - protein, 7 aa, Artificial Sequence
  Synthetic
DCHVLWR

SEQ ID NO: 882 - protein, 5 aa, Artificial Sequence
  Synthetic
LDGLF

SEQ ID NO: 883 - protein, 6 aa, Artificial Sequence
  Synthetic
LPATSG

SEQ ID NO: 884 - protein, 117 aa, Artificial Sequence
  Synthetic
EVQLVESGGGLVQAGDSLRLSCAASGDCHVLWRMGWFRQAPGKEREFVAAISLDGLFTNYADSVRGRFSISADSAKNTVYLQMNSLKPEDTAVYYCAALPATSGDYGGQGTQVTVAS

SEQ ID NO: 885 - DNA, 394 bp, Artificial Sequence
  Synthetic
accatggaagttcaactggttgaatctggtggcggtttagttcaagccggtgatagccttcgtttgagctgcgccgcaagcggagattgtcacgttctctggcgtatgggttggtttcgccaggcacctggtaaagaacgtgaatttgtggcagccattagcctcgacggtttgtttaccaactatgccgattctgttcgtggtcgcttcagcatttcagcagattctgcgaagaataccgtgtacttacagatgaactcactgaaacctgaggataccgccgtttattattgtgcggcattgccggcgacttctggcgactatgggggtcagggcacacaagtcacggtcgcaagcggcggaagctctggggaacagaaactgatttcagaag

SEQ ID NO: 886 - protein, 7 aa, Artificial Sequence
  Synthetic
DCHVLWR

SEQ ID NO: 887 - protein, 5 aa, Artificial Sequence
  Synthetic
LDGFF

SEQ ID NO: 888 - protein, 6 aa, Artificial Sequence
  Synthetic
LPSVCT

SEQ ID NO: 889 - protein, 117 aa, Artificial Sequence
  Synthetic
EVQLVESGGGLVQAGDSLRLSCAASGDCHVLWRMGWFRQAPGKEREFVAAISLDGFFTNYADSVRGRFSISADSAKNTVYLQMNSLKPEDTAVYYCAALPSVCTDYWGQGTQVTVSS

SEQ ID NO: 890 - DNA, 403 bp, Artificial Sequence
  Synthetic
aggagatataccatggaagttcaactggttgaatctggtggcggtttagttcaagccggtgatagccttcgtctgagctgcgccgcaagcggagattgtcacgttctctggcgtatgggttggtttcgccaggcacctggtaaagaacgtgaatttgtggcagccattagcctcgacggtttttttaccaactatgccgattctgttcgtggtcgcttcagcatttcagcagattctgcgaagaataccgtgtacttacagatgaactcactgaaacctgaggataccgccgtttattattgtgcggcactgcctagtgtgtgtaccgactattggggtcagggcacacaagtcacggtctcaagcggcggaagctctggtgaacagaaactgatttcagaag

SEQ ID NO: 891 - protein, 7 aa, Artificial Sequence
  Synthetic
DCHVLWR

SEQ ID NO: 892 - protein, 5 aa, Artificial Sequence
  Synthetic
LDGLF

SEQ ID NO: 893 - protein, 10 aa, Artificial Sequence
  Synthetic
LPSTPECYAL

SEQ ID NO: 894 - protein, 121 aa, Artificial Sequence
  Synthetic
EVQLVESGGGLVQAGDSLRLSCAASGDCHVLWRMGWFRQAPGKEREFVAAISLDGLFTNYADSVRGRFSISADSAKNTVYLQMNSLKPEDTAVYYCATLPSTPECYALGYWGQGTQVTVSS

SEQ ID NO: 895 - DNA, 415 bp, Artificial Sequence
  Synthetic
aggagatataccatggaagttcaactggttgaatctggtggcggtttagttcaagccggtgatagccttcgtctgagctgcgccgcaagcggagattgtcacgttctctggcgtatgggttggtttcgccaggcacctggtaaagaacgtgaatttgtggcagccattagcctcgacggtttgtttaccaactatgccgattctgttcgtggtcgcttcagcatttcagcagattctgcgaagaataccgtgtacttacagatgaactcactgaaacctgaggataccgccgtttattattgtgcgacactgcctagcacccctgagtgttatgccttgggctattggggtcagggcacacaagtcacggtctcaagcggcggaagctctggtgaacagaaactgatttcagaag

SEQ ID NO: 896 - protein, 7 aa, Artificial Sequence
  Synthetic
DCHVLWR

SEQ ID NO: 897 - protein, 5 aa, Artificial Sequence
  Synthetic
LDGLF

SEQ ID NO: 898 - protein, 4 aa, Artificial Sequence
  Synthetic
MPFF

SEQ ID NO: 899 - protein, 115 aa, Artificial Sequence
  Synthetic
EVQLVESGGGLVQAGDSLRLSCAASGDCHVLWRMGWFRQAPGKEREFVAAISLDGLFTNYADSVRGRFSISADSAKNTVCLQMNSLKPEDTAVYYCAAMPFFDYWGQGTQVTVSS

SEQ ID NO: 900 - DNA, 398 bp, Artificial Sequence
  Synthetic
aaggagatataccatggaagttcaactggttgaatctggtggcggtttagttcaagccggtgatagccttcgtctgagctgcgccgcaagcggagattgtcacgttctctggcgtatgggttggtttcgccaggcacctggtaaagaacgtgaatttgtggcagccattagcctcgacggtttgtttaccaactatgccgattctgttcgtggtcgcttcagcatttcagcagattctgcgaagaataccgtgtgcttacagatgaactcactgaaacctgaggataccgccgtttattattgtgcggcaatgcctttttttgactattggggtcagggcacacaagtcacggtctcaagcggcggaagctctggtgaacagaaactgatttcagaag

SEQ ID NO: 901 - protein, 7 aa, Artificial Sequence
  Synthetic
DCHVLWR

SEQ ID NO: 902 - protein, 5 aa, Artificial Sequence
  Synthetic
LDGLF

SEQ ID NO: 903 - protein, 6 aa, Artificial Sequence
  Synthetic
MSQPTL

SEQ ID NO: 904 - protein, 117 aa, Artificial Sequence
  Synthetic
EVQLVESGGGLVQAGDSLRLSCAASGDCHVLWRMGWFRQAPGKEREFVAAISLDGLFTNYADSVRGRFSISADSAKNTVYLQMNSLKPEDTAVYYCAAMSQPTLDYWGQGTQVTVSS

SEQ ID NO: 905 - DNA, 398 bp, Artificial Sequence
  Synthetic
atataccatggaagttcaactggttgaatctggtggcggtttagttcaagccggtgatagccttcgtctgagctgcgccgcaagcggagattgtcacgttctctggcgtatgggttggtttcgccaggcacctggtaaagaacgtgaatttgtggcagccattagcctcgacggtttgtttaccaactatgccgattctgttcgtggtcgcttcagcatttcagcagattctgcgaagaataccgtgtacttacagatgaactcactgaaacctgaggataccgccgtttattattgtgcggcaatgagtcagcctaccttggactattggggtcagggcacacaagtcacggtctcaagcggcggaagctctggtgaacagaaactgatttcagaag

SEQ ID NO: 906 - protein, 7 aa, Artificial Sequence
  Synthetic
DCHVLWR

SEQ ID NO: 907 - protein, 5 aa, Artificial Sequence
  Synthetic
LDGLF

SEQ ID NO: 908 - protein, 4 aa, Artificial Sequence
  Synthetic
MPFF

SEQ ID NO: 909 - protein, 115 aa, Artificial Sequence
  Synthetic
EVQLVESGGGLVQAGDSLRLNCAASGDCHVLWRMGWFRQAPGKEREFVAAISLDGLFTNYADSVRGRFSISADSAKNTVYLQMNSLKPEDTAVYYCAAMPFFDYWGQGTQVTVSS

SEQ ID NO: 910 - DNA, 399 bp, Artificial Sequence
  Synthetic
gaaggagatataccatggaagttcaactggttgaatctggtggcggtttagttcaagccggtgatagccttcgtctgaactgcgccgcaagcggagattgtcacgttctctggcgtatgggttggtttcgccaggcacctggtaaagaacgtgaatttgtggcagccattagcctcgacggtttgtttaccaactatgccgattctgttcgtggtcgcttcagcatttcagcagattctgcgaagaataccgtgtacttacagatgaactcactgaaacctgaggataccgccgtttattattgtgcggcaatgcctttttttgactattggggtcagggcacacaagtcacggtctcaagcggcggaagctctggtgaacagaaactgatttcagaag

SEQ ID NO: 911 - protein, 7 aa, Artificial Sequence
  Synthetic
DCHVLWR

SEQ ID NO: 912 - protein, 5 aa, Artificial Sequence
  Synthetic
LDGLF

SEQ ID NO: 913 - protein, 4 aa, Artificial Sequence
  Synthetic
MPFF

SEQ ID NO: 914 - protein, 115 aa, Artificial Sequence
  Synthetic
EVQLVESGGGLVQAGDSLRLSCAASGDCHVLWRMGWFRQAPGKEREFVAAISLDGLFTNYADSVRGRFSISADSAKNTVYLQMNSLNPEDTAVYYCAAMPFFDYWGQGTQVTVSS

SEQ ID NO: 915 - DNA, 394 bp, Artificial Sequence
  Synthetic
agatataccatggaagttcaactggttgaatctggtggcggtttagttcaagccggtgatagccttcgtctgagctgcgccgcaagcggagattgtcacgttctctggcgtatgggttggtttcgccaggcacctggtaaagaacgtgaatttgtggcagccattagcctcgacggtttgtttaccaactatgccgattctgttcgtggtcgcttcagcatttcagcagattctgcgaagaataccgtgtacttacagatgaactcactgaaccctgaggataccgccgtttattattgtgcggcaatgcctttttttgactattggggtcagggcacacaagtcacggtctcaagcggcggaagctctggtgaacagaaactgatttcagaag

SEQ ID NO: 916 - protein, 7 aa, Artificial Sequence
  Synthetic
DCQVLWR

SEQ ID NO: 917 - protein, 5 aa, Artificial Sequence
  Synthetic
LDGLF

SEQ ID NO: 918 - protein, 4 aa, Artificial Sequence
  Synthetic
MPFF

SEQ ID NO: 919 - protein, 115 aa, Artificial Sequence
  Synthetic
EVQLVESGGGLVQAGDSLRLSCAASGDCQVLWRMGWFRQAPGKEREFVAAISLDGLFTNYADSVRGRFSISADSAKNTVYLQMNSLKPEDTAVYYCAAMPFFDYWGQGTQVTVSS

SEQ ID NO: 920 - DNA, 397 bp, Artificial Sequence
  Synthetic
aggagatataccatggaagttcaactggttgaatctggtggcggtttagttcaagccggtgatagccttcgtctgagctgcgccgcaagcggagattgtcaagttctctggcgtatgggttggtttcgccaggcacctggtaaagaacgtgaatttgtggcagccattagcctcgacggtttgtttaccaactatgccgattctgttcgtggtcgcttcagcatttcagcagattctgcgaagaataccgtgtacttacagatgaactcactgaaacctgaggataccgccgtttattattgtgcggcaatgcctttttttgactattggggtcagggcacacaagtcacggtctcaagcggcggaagctctggtgaacagaaactgatttcagaag

SEQ ID NO: 921 - protein, 7 aa, Artificial Sequence
  Synthetic
DCHVLWR

SEQ ID NO: 922 - protein, 5 aa, Artificial Sequence
  Synthetic
LDGLF

SEQ ID NO: 923 - protein, 4 aa, Artificial Sequence
  Synthetic
MPFF

SEQ ID NO: 924 - protein, 115 aa, Artificial Sequence
  Synthetic
EVQLVESGGGLVQAGDSLRLSCAASGDCHVLWRMGWFRQAPGKEREFVAAISLDGLFTNYADSVRGRFSISADSAKNTVYLQMNSLKPEDTAVYYCAAMPFFDYWCQGTQVTVSS

SEQ ID NO: 925 - DNA, 399 bp, Artificial Sequence
  Synthetic
gaaggagatataccatggaagttcaactggttgaatctggtggcggtttagttcaagccggtgatagccttcgtctgagctgcgccgcaagcggagattgtcacgttctctggcgtatgggttggtttcgccaggcacctggtaaagaacgtgaatttgtggcagccattagcctcgacggtttgtttaccaactatgccgattctgttcgtggtcgcttcagcatttcagcagattctgcgaagaataccgtgtacttacagatgaactcactgaaacctgaggataccgccgtttattattgtgcggcaatgcctttttttgactattggtgtcagggcacacaagtcacggtctcaagcggcggaagctctggtgaacagaaactgatttcagaag

SEQ ID NO: 926 - protein, 7 aa, Artificial Sequence
  Synthetic
DCRVLWR

SEQ ID NO: 927 - protein, 5 aa, Artificial Sequence
  Synthetic
LDGLF

SEQ ID NO: 928 - protein, 6 aa, Artificial Sequence
  Synthetic
LPATSG

SEQ ID NO: 929 - protein, 117 aa, Artificial Sequence
  Synthetic
EVQLVESGGGLVQAGDSLRLSCAASGDCRVLWRMGWFRQAPGKEREFVAAISLDGLFTNYADSVRGRFSISADSAKNTVYLQMNSLKPEDTAVYYCAALPATSGDYWGQGTQVTVSS

SEQ ID NO: 930 - DNA, 400 bp, Artificial Sequence
  Synthetic
agatataccatggaagttcaactggttgaatctggtggcggtttagttcaagccggtgatagccttcgtctgagctgcgccgcaagcggagattgtcgcgttctctggcgtatgggttggtttcgccaggcacctggtaaagaacgtgaatttgtggcagccattagcctcgacggtttgtttaccaactatgccgattctgttcgtggtcgcttcagcatttcagcagattctgcgaagaataccgtgtacttacagatgaactcactgaaacctgaggataccgccgtttattattgtgcggcattgccggcgacttctggcgactattggggtcagggcacacaagtcacggtctcaagcggcggaagctctggtgaacagaaactgatttcagaag

SEQ ID NO: 931 - protein, 7 aa, Artificial Sequence
  Synthetic
DCHVLWR

SEQ ID NO: 932 - protein, 5 aa, Artificial Sequence
  Synthetic
LDGLF

SEQ ID NO: 933 - protein, 9 aa, Artificial Sequence
  Synthetic
HHFHPGGMD

SEQ ID NO: 934 - protein, 120 aa, Artificial Sequence
  Synthetic
EVQLFESGGGLVQAGDSLRLSCAASGDCHVLWRMGWFRQAPGKEREFVAAISLDGLFTNYADSVRGRFSISADSAKNTVYLQMNSLKPEDTAVYYCNAHHFHPGGMDDYWGQGTQVTVSS

SEQ ID NO: 935 - DNA, 409 bp, Artificial Sequence
  Synthetic
agatataccatggaagttcaactgtttgaatctggtggcggtttagttcaagccggtgatagccttcgtctgagctgcgccgcaagcggagattgtcacgttctctggcgtatgggttggtttcgccaggcacctggtaaagaacgtgaatttgtggcagccattagcctcgacggtttgtttaccaactatgccgattctgttcgtggtcgcttcagcatttcagcagattctgcgaagaataccgtgtacttacagatgaactcactgaaacctgaggataccgccgtttattattgtaatgcacaccattttcatcctggtggtatggatgactattggggtcagggcacacaagtcacggtctcaagcggcggaagctcttgtgaacagaaactgatttcagaag

SEQ ID NO: 936 - protein, 7 aa, Artificial Sequence
  Synthetic
DCHVLWR

SEQ ID NO: 937 - protein, 5 aa, Artificial Sequence
  Synthetic
LDGLF

SEQ ID NO: 938 - protein, 4 aa, Artificial Sequence
  Synthetic
MPFF

SEQ ID NO: 939 - protein, 115 aa, Artificial Sequence
  Synthetic
EVQLVESGGGLVQAGDSLRLSCAASGDCHVLWRMGWFRQAPGKEREFVAAISLDGLFTNYADSVRGRFSISADSAKNTVYLQMNSRKPEDTAVYYCAAMPFFDYWGQGTQVTVSS

SEQ ID NO: 940 - DNA, 390 bp, Artificial Sequence
  Synthetic
ataccatggaagttcaactggttgaatctggtggcggtttagttcaagccggtgatagccttcgtctgagctgcgccgcaagcggagattgtcacgttctctggcgtatgggttggtttcgccaggcacctggtaaagaacgtgaatttgtggcagccattagcctcgacggtttgtttaccaactatgccgattctgttcgtggtcgcttcagcatttcagcagattctgcgaagaataccgtgtacttacagatgaactcacggaaacctgaggataccgccgtttattattgtgcggcaatgcctttttttgactattggggtcagggcacacaagtcacggtctcaagcggcggaagctctggtgaacagaaactgatttcagaag

SEQ ID NO: 941 - protein, 7 aa, Artificial Sequence
  Synthetic
DCHVLWR

SEQ ID NO: 942 - protein, 5 aa, Artificial Sequence
  Synthetic
LDGLF

SEQ ID NO: 943 - protein, 6 aa, Artificial Sequence
  Synthetic
LPATSG

SEQ ID NO: 944 - protein, 117 aa, Artificial Sequence
  Synthetic
EVRLVESGGGLVQAGDSLRLSCAASGDCHVLWRMGWFRQAPGKEREFVAAISLDGLFTNYADSVRGRFSISADSAKNTVYLQMNSLKPEDTAVYYCATLPATSGDYWGQGTQVTVSS

SEQ ID NO: 945 - DNA, 403 bp, Artificial Sequence
  Synthetic
aggagatataccatggaagttcgactggttgaatctggtggcggtttagttcaagccggtgatagccttcgtctgagctgcgccgcaagcggagattgtcacgttctctggcgtatgggttggtttcgccaggcacctggtaaagaacgtgaatttgtggcagccattagcctcgacggtttgtttaccaactatgccgattctgttcgtggtcgcttcagcatttcagcagattctgcgaagaataccgtgtacttacagatgaactcactgaaacctgaggataccgccgtttattattgtgcgacattgccggcgacttctggcgactattggggtcagggcacacaagtcacggtctcaagcggcggaagctctggtgaacagaaactgatttcagaag

SEQ ID NO: 946 - protein, 7 aa, Artificial Sequence
  Synthetic
DCHVLWR

SEQ ID NO: 947 - protein, 5 aa, Artificial Sequence
  Synthetic
LDGLF

SEQ ID NO: 948 - protein, 4 aa, Artificial Sequence
  Synthetic
MPFF

SEQ ID NO: 949 - protein, 115 aa, Artificial Sequence
  Synthetic
EVQLVESGGGLVQDGDSLRLSCAASGDCHVLWRMGWFRQAPGKEREFVAAISLDGLFTNYADSVRGRFSISADSAKNTVYLQMNSLKPEDTAVYYCAAMPFFDYWGQGTQVTVSS

SEQ ID NO: 950 - DNA, 392 bp, Artificial Sequence
  Synthetic
atataccatggaagttcaactggttgaatctggtggtggtttagttcaagacggtgatagccttcgtctgagctgcgccgcaagcggagattgtcacgttctctggcgtatgggttggtttcgccaggcacctggtaaagaacgtgaatttgtggcagccattagcctcgacggtttgtttaccaactatgccgattctgttcgtggtcgcttcagcatttcagcagattctgcgaagaataccgtgtacttacagatgaactcactgaaacctgaggataccgccgtttattattgtgcggcaatgcctttttttgactattggggtcagggcacacaagtcacggtctcaagcggcggaagctctggtgaacagaaactgatttcagaag

SEQ ID NO: 951 - protein, 7 aa, Artificial Sequence
  Synthetic
DCHVLWR

SEQ ID NO: 952 - protein, 5 aa, Artificial Sequence
  Synthetic
LDGLF

SEQ ID NO: 953 - protein, 4 aa, Artificial Sequence
  Synthetic
MPFF

SEQ ID NO: 954 - protein, 115 aa, Artificial Sequence
  Synthetic
EVQLVESGGGLVQAGDSLRLSCAASGDCHVLWRMGWFRQAPGKEREFVAAISLDGLFTNYADSVRGRFSISADSAKNTVYLQMNSLKPEDTAVYYCAAMPFFDYWGQGTQVTASS

SEQ ID NO: 955 - DNA, 390 bp, Artificial Sequence
  Synthetic
ataccatggaagttcaactggttgaatctggtggcggtttagttcaagccggtgatagccttcgtctgagctgcgccgcaagcggagattgtcacgttctctggcgtatgggttggtttcgccaggcacctggtaaagaacgtgaatttgtggcagccattagcctcgacggtttgtttaccaactatgccgattctgttcgtggtcgcttcagcatttcagcagattctgcgaagaataccgtgtacttacagatgaactcactgaaacctgaggataccgccgtttattattgtgcggcaatgcctttttttgactattggggtcagggcacacaagtcacggcctcaagcggcggaagctttggtgaacagaaactgatttcagaag

SEQ ID NO: 956 - protein, 7 aa, Artificial Sequence
  Synthetic
DCHVLWR

SEQ ID NO: 957 - protein, 5 aa, Artificial Sequence
  Synthetic
LDGLF

SEQ ID NO: 958 - protein, 4 aa, Artificial Sequence
  Synthetic
MPFF

SEQ ID NO: 959 - protein, 115 aa, Artificial Sequence
  Synthetic
EVQLVESGGGLVQAGDSLRLSCATSGDCHVLWRMGWFRQAPGKEREFVAAISLDGLFTNYADSVRGRFSISADSAKNTVYLQMNSLKPEDTAVYYCAAMPFFDYWGQGTQVTVSS

SEQ ID NO: 960 - DNA, 394 bp, Artificial Sequence
  Synthetic
agatataccatggaagttcaactggttgaatctggtggcggtttagttcaagccggtgatagccttcgtctgagctgcgccacaagcggagattgtcacgttctctggcgtatgggttggtttcgccaggcacctggtaaagaacgtgaatttgtggcagccattagcctcgacggtttgtttaccaactatgccgattctgttcgtggtcgcttcagcatttcagcagattctgcgaagaataccgtgtacttacagatgaactcactgaaacctgaggataccgccgtttattattgtgcggcaatgcctttttttgactattggggtcagggcacacaagtcacggtctcaagcggcggaagctctggtgaacagaaactgatttcagaag

SEQ ID NO: 961 - protein, 7 aa, Artificial Sequence
  Synthetic
DCHVLWR

SEQ ID NO: 962 - protein, 5 aa, Artificial Sequence
  Synthetic
LDGLF

SEQ ID NO: 963 - protein, 4 aa, Artificial Sequence
  Synthetic
MPFF

SEQ ID NO: 964 - protein, 115 aa, Artificial Sequence
  Synthetic
EVQLVDSGGGLVHAGDRLRLSCAASGDCHVLWRMGWFRQAPGKEREFVAAISLDGLFTNYADSVRGRFSISADSAKNTVYLEMNSLKPEDTAVYYCAAMPFFDYWGQGTQVTVSS

SEQ ID NO: 965 - DNA, 399 bp, Artificial Sequence
  Synthetic
gaaggagatataccatggaagttcaactggttgactctggtggcggtttagttcacgccggtgatcgccttcgtctgagctgcgccgcaagcggagattgtcacgttctctggcgtatgggttggtttcgccaggcacctggtaaagaacgtgaatttgtggcagccattagcctcgacggtttgtttaccaactatgccgattctgttcgtggtcgcttcagcatttcagcagattctgcgaagaataccgtgtacttagagatgaactcactgaaacctgaggataccgccgtttattattgtgcggcaatgcctttttttgactattggggtcagggcacacaagtcacggtctcaagcggcggaagctctggtgaacagaaactgatttcagaag

SEQ ID NO: 966 - protein, 7 aa, Artificial Sequence
  Synthetic
DCHVLWR

SEQ ID NO: 967 - protein, 5 aa, Artificial Sequence
  Synthetic
LDGLF

SEQ ID NO: 968 - protein, 6 aa, Artificial Sequence
  Synthetic
LPATSG

SEQ ID NO: 969 - protein, 117 aa, Artificial Sequence
  Synthetic
EVQLVESGGGLVQAGDSLRLSCAASGDCHVLWRMGWFRQAPGKEREFVAAISLDGLFTNYADSVRGRFSISADSAKNTVYLQMNSLKPEDTAVYYCAALPATSGDYWGQDTQVTVSS

SEQ ID NO: 970 - DNA, 396 bp, Artificial Sequence
  Synthetic
ataccatggaagttcaactggttgaatctggtggcggtttagttcaagccggtgatagccttcgtctgagctgcgccgcaagcggagattgtcacgttctctggcgtatgggttggtttcgccaggcacctggtaaagaacgtgaatttgtggcagccattagcctcgacggtttgtttaccaactatgccgattctgttcgtggtcgcttcagcatttcagcagattctgcgaagaataccgtgtacttacagatgaactcactgaaacctgaggataccgccgtttattattgtgcggcattgccggcgacttctggcgactattggggtcaggacacacaagtcacggtctcaagcggcggaagctctggtgaacagaaactgatttcagaag

SEQ ID NO: 971 - protein, 7 aa, Artificial Sequence
  Synthetic
DCNVLWR

SEQ ID NO: 972 - protein, 5 aa, Artificial Sequence
  Synthetic
LDVLF

SEQ ID NO: 973 - protein, 4 aa, Artificial Sequence
  Synthetic
MPFF

SEQ ID NO: 974 - protein, 115 aa, Artificial Sequence
  Synthetic
EVQLVESGGGLVQAGDSLRLSCAASGDCNVLWRMGWFRQAPGKEREFVAAISLDVLFTNYADSVRGRFSISADSAKNTVYLQMNSLKPEDTAVYYCAAMPFFDYWGQGTQVTVSS

SEQ ID NO: 975 - DNA, 394 bp, Artificial Sequence
  Synthetic
agatataccatggaagttcaactggttgaatctggtggcggtttagttcaagccggtgatagccttcgtctgagctgcgccgcaagcggagattgtaacgttctctggcgtatgggttggtttcgccaggcacctggtaaagaacgtgaatttgtggcagccattagcctcgacgttttgtttaccaactatgccgattctgttcgtggtcgcttcagcatttcagcagattctgcgaagaataccgtgtacttacagatgaactcactgaaacctgaggataccgccgtttattattgtgcggcaatgcctttttttgactattggggtcagggcacacaagtcacggtctcaagcggcggaagctctggtgaacagaaactgatttcagaag

SEQ ID NO: 976 - protein, 7 aa, Artificial Sequence
  Synthetic
DCHVLWR

SEQ ID NO: 977 - protein, 5 aa, Artificial Sequence
  Synthetic
LDGLF

SEQ ID NO: 978 - protein, 4 aa, Artificial Sequence
  Synthetic
MPFF

SEQ ID NO: 979 - protein, 115 aa, Artificial Sequence
  Synthetic
EVQLVESGGGLVQAGDSLRLSCAASGDCHVLWRMGWFRQAPGKEREFVAAISLDGLFTNYADSVRGRFSISADSAKNTVYLQMNSLKPEGTAVYYCAAMPFFDYWGQGTQVTVSS

SEQ ID NO: 980 - DNA, 388 bp, Artificial Sequence
  Synthetic
accatggaagttcaactggttgaatctggtggcggtttagttcaagccggtgatagccttcgtctgagctgcgccgcaagcggagattgtcacgttctctggcgtatgggttggtttcgccaggcacctggtaaagaacgtgaatttgtggcagccattagcctcgacggtttgtttaccaactatgccgattctgttcgtggtcgcttcagcatttcagcagattctgcgaagaataccgtgtacttacagatgaactcactgaaacctgagggtaccgccgtttattattgtgcggcaatgcctttttttgactattggggtcagggcacacaagtcacggtctcaagcggcggaagctctggtgaacagaaactgatttcagaag

SEQ ID NO: 981 - protein, 7 aa, Artificial Sequence
  Synthetic
DCHVLWR

SEQ ID NO: 982 - protein, 5 aa, Artificial Sequence
  Synthetic
LDGLF

SEQ ID NO: 983 - protein, 13 aa, Artificial Sequence
  Synthetic
TVPSHNVGGAHVL

SEQ ID NO: 984 - protein, 124 aa, Artificial Sequence
  Synthetic
EVQLVESGGGLVQAGDSLRLSCAASGDCHVLWRMGWFRQAPGKEREFVAAISLDGLFTNYADSVRGRFSISADSAKNTVYLQMNSLKPEDTAVYYCNATVPSHNVGGAHVLEYWGQGTQVTVSS

SEQ ID NO: 985 - DNA, 417 bp, Artificial Sequence
  Synthetic
ataccatggaagttcaactggttgaatctggtggcggtttagttcaagccggtgatagccttcgtctgagctgcgccgcaagcggagattgtcacgttctctggcgtatgggttggtttcgccaggcacctggtaaagaacgtgaatttgtggcagccattagcctcgacggtttgtttaccaactatgccgattctgttcgtggtcgcttcagcatttcagcagattctgcgaagaataccgtgtacttacagatgaactcactgaaacctgaggataccgccgtttattattgtaatgcaactgttccttctcataacgtcgggggtgcgcatgttctcgagtattggggtcagggcacacaagtcacggtctcaagcggcggaagctctggtgaacagaaactgctttcagaag

SEQ ID NO: 986 - protein, 7 aa, Artificial Sequence
  Synthetic
DCHVLWR

SEQ ID NO: 987 - protein, 5 aa, Artificial Sequence
  Synthetic
LDGLF

SEQ ID NO: 988 - protein, 6 aa, Artificial Sequence
  Synthetic
LPATSG

SEQ ID NO: 989 - protein, 117 aa, Artificial Sequence
  Synthetic
EVQLVESGGGLVQAGDSLRLSCAASGDCHVLWRMDWFRQAPGKEREFVAAISLDGLFTNYADSVRGRFSISADSAKNTVYLQMNSLKPEDTAVYYCAALPATSGDYWGQGTQVTVSS

SEQ ID NO: 990 - DNA, 398 bp, Artificial Sequence
  Synthetic
atataccatggaagttcaactggttgaatctggtggcggtttagttcaagccggtgatagccttcgtctgagctgcgccgcaagcggagattgtcacgttctctggcgtatggattggtttcgccaggcacctggtaaagaacgtgaatttgtggcagccattagcctcgacggtttgtttaccaactatgccgattctgttcgtggtcgcttcagcatttcagcagattctgcgaagaataccgtgtacttacagatgaactcactgaaacctgaggataccgccgtttattattgtgcggcattgccggcgacttctggcgactattggggtcagggcacacaagtcacggtctcaagcggcggaagctctggtgaacagaaactgatttcagaag

SEQ ID NO: 991 - protein, 7 aa, Artificial Sequence
  Synthetic
DCHVLWR

SEQ ID NO: 992 - protein, 5 aa, Artificial Sequence
  Synthetic
LDGLF

SEQ ID NO: 993 - protein, 4 aa, Artificial Sequence
  Synthetic
MPFF

SEQ ID NO: 994 - protein, 115 aa, Artificial Sequence
  Synthetic
EVQLVESGGGLVQAGDSLRLSCAASGDCHVLWRMGWFRQAPGKEREFVAAISLDGLFTNYADSVRGRFSISADSAKNTVYLQMNSLKPEDTAVYYCVAMPFFDYWGQGTQVTVSS

SEQ ID NO: 995 - DNA, 392 bp, Artificial Sequence
  Synthetic
atataccatggaagttcaactggttgaatctggtggcggtttagttcaagccggtgatagccttcgtctgagctgcgccgcaagcggagattgtcacgttctctggcgtatgggttggtttcgccaggcacctggtaaagaacgtgaatttgtggcagccattagcctcgacggtttgtttaccaactatgccgattctgttcgtggtcgcttcagcatttcagcagattctgcgaagaataccgtgtacttacagatgaactcactgaaacctgaggataccgccgtttattattgtgtggcaatgcctttttttgactattggggtcagggcacacaagtcacggtctcaagcggcggaagctctggtgaacagaaactgatttcagaag

SEQ ID NO: 996 - protein, 7 aa, Artificial Sequence
  Synthetic
DCHVLWR

SEQ ID NO: 997 - protein, 5 aa, Artificial Sequence
  Synthetic
LDGLF

SEQ ID NO: 998 - protein, 4 aa, Artificial Sequence
  Synthetic
MPFF

SEQ ID NO: 999 - protein, 115 aa, Artificial Sequence
  Synthetic
EVQLVESGGGLVQAGDSLRLSCAASGDCHVLWRMGWFRQAPGKEREFVAAISLDGLFTNYADSVRGRFSISADSAKNTVYLQMNSLKPEDTAVYYCAAMPFFDYWGQGTQVTGSS

SEQ ID NO: 1000 - DNA, 396 bp, Artificial Sequence
  Synthetic
ggagatataccatggaagttcaactggttgaatctggtggcggtttagttcaagccggtgatagccttcgtctgagctgcgccgcaagcggagattgtcacgttctctggcgtatgggttggtttcgccaggcacctggtaaagaacgtgaatttgtggcagccattagcctcgacggtttgtttaccaactatgccgattctgttcgtggtcgcttcagcatttcagcagattctgcgaagaataccgtgtacttacagatgaactcactgaaacctgaggataccgccgtttattattgtgcggcaatgcctttttttgactattggggtcagggcacacaagtcacgggctcaagcggcggaagctctggtgaacagaaactgatttcagaag

SEQ ID NO: 1001 - protein, 7 aa, Artificial Sequence
  Synthetic
DGHVLWR

SEQ ID NO: 1002 - protein, 5 aa, Artificial Sequence
  Synthetic
LDGLF

SEQ ID NO: 1003 - protein, 4 aa, Artificial Sequence
  Synthetic
MPFF

SEQ ID NO: 1004 - protein, 115 aa, Artificial Sequence
  Synthetic
EVQLVESGGGLVQAGDSLRLSCAASGDGHVLWRMGWFRQAPGKEREFVAAISLDGLFTNYADSVRGRFSISADSAKNTVYLQMNSLKPEDTAVYYCAAMPFFDYWGQGTQVTVSS

SEQ ID NO: 1005 - DNA, 398 bp, Artificial Sequence
  Synthetic
aaggagatataccatggaagttcaactggttgaatctggtggcggtttagttcaagccggtgatagccttcgtctgagctgcgccgcaagcggagatggtcacgttctctggcgtatgggttggtttcgccaggcacctggtaaagaacgtgaatttgtggcagccattagcctcgacggtttgtttaccaactatgccgattctgttcgtggtcgcttcagcatttcagcagattctgcgaagaataccgtgtacttacagatgaactcactgaaacctgaggataccgccgtttattattgtgcggcaatgcctttttttgactattggggtcagggcacacaagtcacggtctcaagcggcggaagctctggtgaacagaaactgatttcagaag

SEQ ID NO: 1006 - protein, 7 aa, Artificial Sequence
  Synthetic
DRHVLWR

SEQ ID NO: 1007 - protein, 5 aa, Artificial Sequence
  Synthetic
LDGLF

SEQ ID NO: 1008 - protein, 6 aa, Artificial Sequence
  Synthetic
LPSVCT

SEQ ID NO: 1009 - protein, 117 aa, Artificial Sequence
  Synthetic
EVQLVESGGGLVQAGDSLRLSCATSGDRHVLWRMGWFRQAPGKEREFVAAISLDGLFTNYADSVRGRFSISADSAKNTVYLQMNSLKPEDTAVYYCAALPSVCTDYWGQGTQVTVSS

SEQ ID NO: 1010 - DNA, 402 bp, Artificial Sequence
  Synthetic
ggagatataccatggaagttcaactggttgaatctggtggcggtttagttcaagccggtgatagccttcgtctgagctgcgccacaagcggagatcgtcacgttctctggcgtatgggttggtttcgccaggcacctggtaaagaacgtgaatttgtggcagccattagcctcgacggtttgtttaccaactatgccgattctgttcgtggtcgcttcagcatttcagcagattctgcgaagaataccgtgtacttacagatgaactcactgaaacctgaggataccgccgtttattattgtgcggcactgcctagtgtgtgtaccgactattggggtcagggcacacaagtcacggtctcaagcggcggaagctctggtgaacagaaactgatttcagaag

SEQ ID NO: 1011 - protein, 7 aa, Artificial Sequence
  Synthetic
DCHVLWR

SEQ ID NO: 1012 - protein, 5 aa, Artificial Sequence
  Synthetic
LDGLF

SEQ ID NO: 1013 - protein, 9 aa, Artificial Sequence
  Synthetic
HHFHPGGMD

SEQ ID NO: 1014 - protein, 120 aa, Artificial Sequence
  Synthetic
EVQLVESGGGLVQAGDSLRLSCAASGDCHVLWRMGWFRQAPGKEREFVAAISLDGLFTNYADSVRGRFSISADSAKNTMYLQMNSLKPEDTAVYYCNAHHFHPGGMDDYWGQGTQVTVSS

SEQ ID NO: 1015 - DNA, 407 bp, Artificial Sequence
  Synthetic
atataccatggaagttcaactggttgaatctggtggcggtttagttcaagccggtgatagccttcgtctgagctgcgccgcaagcggagattgtcacgttctctggcgtatgggttggtttcgccaggcacctggtaaagaacgtgaatttgtggcagccattagcctcgacggtttgtttaccaactatgccgattctgttcgtggtcgcttcagcatttcagcagattctgcgaagaataccatgtacttacagatgaactcactgaaacctgaggataccgccgtttattattgtaatgcacaccattttcatcctggtggtatggatgactattggggtcagggcacacaagtcacggtctcaagcggcggaagctctggtgaacagaaactgatttcagaag

SEQ ID NO: 1016 - protein, 7 aa, Artificial Sequence
  Synthetic
DCHVLWR

SEQ ID NO: 1017 - protein, 5 aa, Artificial Sequence
  Synthetic
LDGLF

SEQ ID NO: 1018 - protein, 6 aa, Artificial Sequence
  Synthetic
LPATSG

SEQ ID NO: 1019 - protein, 117 aa, Artificial Sequence
  Synthetic
EVQLVESGGGLVQAGDSLRLSCAASGDCHVLWRMGWFRQAPGKEREFVAAISLDGLFTNYADSVRGRFSISADSAKNTVYLQMNSLKPEDTAVYYCAALPATSGDYWVQGTQVTVSS

SEQ ID NO: 1020 - DNA, 403 bp, Artificial Sequence
  Synthetic
aggagatataccatggaagttcaactggttgaatctggtggcggtttagttcaagccggtgatagccttcgtctgagctgcgccgcaagcggagattgtcacgttctctggcgtatgggttggtttcgccaggcacctggtaaagaacgtgaatttgtggcagccattagcctcgacggtttgtttaccaactatgccgattctgttcgtggtcgcttcagcatttcagcagattctgcgaagaataccgtgtacttacagatgaactcactgaaacctgaggataccgccgtttattattgtgcggcattgccggcgacttctggcgactattgggttcagggcacacaagtcacggtctcaagcggcggaagctctggtgaacagaaactgatttcagaag

SEQ ID NO: 1021 - protein, 7 aa, Artificial Sequence
  Synthetic
DCHVLWS

SEQ ID NO: 1022 - protein, 5 aa, Artificial Sequence
  Synthetic
LDGLF

SEQ ID NO: 1023 - protein, 4 aa, Artificial Sequence
  Synthetic
MPFF

SEQ ID NO: 1024 - protein, 115 aa, Artificial Sequence
  Synthetic
EVQLVESGGGLVQAGDSLRLSCAASGDCHVLWSMGWFRQAPGKEREFVAAISLDGLFTNYADSVRGRFSISADSAKNTVYLQMNSLKPEDTAVYYCAAMPFFDYWGQGTQVTVSS

SEQ ID NO: 1025 - DNA, 396 bp, Artificial Sequence
  Synthetic
ggagatataccatggaagttcaactggttgaatctggtggcggtttagttcaagccggtgatagccttcgtctgagctgcgccgcaagcggagattgtcacgttctctggagtatgggttggtttcgccaggcacctggtaaagaacgtgaatttgtggcagccattagcctcgacggtttgtttaccaactatgccgattctgttcgtggtcgcttcagcatttcagcagattctgcgaagaataccgtgtacttacagatgaactcactgaaacctgaggataccgccgtttattattgtgcggcaatgcctttttttgactattggggtcagggcacacaagtcacggtctcaagcggcggaagctctggtgaacagaaactgatttcagaag

SEQ ID NO: 1026 - protein, 7 aa, Artificial Sequence
  Synthetic
DCHVLWR

SEQ ID NO: 1027 - protein, 5 aa, Artificial Sequence
  Synthetic
LDGLF

SEQ ID NO: 1028 - protein, 4 aa, Artificial Sequence
  Synthetic
MPFF

SEQ ID NO: 1029 - protein, 115 aa, Artificial Sequence
  Synthetic
EVQLVESGGGLVQAGDSLRLSCAASGDCHVLWRMGWFRQAPGKEREFVAAISLDGLFTNYADSVRGRFSISADSAKNTVYLQMNSLKPEDTAVYYCAAMPFFDYWGQGTQVTVSR

SEQ ID NO: 1030 - DNA, 395 bp, Artificial Sequence
  Synthetic
gagatataccatggaagttcaactggttgaatctggtggcggtttagttcaagccggtgatagccttcgtctgagctgcgccgcaagcggagattgtcacgttctctggcgtatgggttggtttcgccaggcacctggtaaagaacgtgaatttgtggcagccattagcctcgacggtttgtttaccaactatgccgattctgttcgtggtcgcttcagcatttcagcagattctgcgaagaataccgtgtacttacagatgaactcactgaaacctgaggataccgccgtttattattgcgcggcaatgcctttttttgactattggggtcagggcacacaagtcacggtctcacgcggcggaagctctggtgaacagaaactgatttcagaag

SEQ ID NO: 1031 - protein, 7 aa, Artificial Sequence
  Synthetic
DCHVLWR

SEQ ID NO: 1032 - protein, 5 aa, Artificial Sequence
  Synthetic
LDGLF

SEQ ID NO: 1033 - protein, 4 aa, Artificial Sequence
  Synthetic
MPFF

SEQ ID NO: 1034 - protein, 115 aa, Artificial Sequence
  Synthetic
EVQLVESGGGLVQAGDSLRLSCAASGDCHVLWRMGWFRQAPGKEREFVAAISLDGLFTNYADSVRGRFSISADSAKNTVYLQMNSLKPEDTAVYYCAAMPFFDYWGQGTQVTFSS

SEQ ID NO: 1035 - DNA, 388 bp, Artificial Sequence
  Synthetic
accatggaagttcaactggttgaatctggtggcggtttagttcaagccggtgatagccttcgtctgagctgcgccgcaagcggagattgtcacgttctctggcgtatgggttggtttcgccaggcacctggtaaagaacgtgaatttgtggcagccattagcctcgacggtttgtttaccaactatgccgattctgttcgtggtcgcttcagcatttcagcagattctgcgaagaataccgtgtacttacagatgaactcactaaaacctgaggataccgccgtttattattgtgcggcaatgcctttttttgactattggggtcagggcacacaagtcacgttctcaagcggcggaagctctgatgaacagaaactgatttcagaag

SEQ ID NO: 1036 - protein, 7 aa, Artificial Sequence
  Synthetic
DCHVLWR

SEQ ID NO: 1037 - protein, 5 aa, Artificial Sequence
  Synthetic
LDGLF

SEQ ID NO: 1038 - protein, 4 aa, Artificial Sequence
  Synthetic
MPFF

SEQ ID NO: 1039 - protein, 115 aa, Artificial Sequence
  Synthetic
EVQLVESGGGLVQAGDSLRLSCAASGDCHVLWRMGWFRQAPGKEREFVAAISLDGLFTNYADSVRGRFSISADSAKNTVYLQMNSLKPEDTAVYYCAAMPFFDHWGQGTQVTVSS

SEQ ID NO: 1040 - DNA, 398 bp, Artificial Sequence
  Synthetic
aaggagatataccatggaagttcaactggttgaatctggtggcggtttagttcaagccggtgatagccttcgtctgagctgcgccgcaagcggagattgtcacgttctctggcgtatgggttggtttcgccaggcacctggtaaagaacgtgaatttgtggcagccattagcctcgacggtttgtttaccaactatgccgattctgttcgtggtcgcttcagcatttcagcagattctgcgaagaataccgtgtacttacagatgaactcactgaaacctgaggataccgccgtttattattgtgcggcaatgcctttttttgaccattggggtcagggcacacaagtcacggtctcaagcggcggaagctctggtgaacagaaactgatttcagaag

SEQ ID NO: 1041 - protein, 7 aa, Artificial Sequence
  Synthetic
DCHVLWR

SEQ ID NO: 1042 - protein, 5 aa, Artificial Sequence
  Synthetic
LDGLF

SEQ ID NO: 1043 - protein, 9 aa, Artificial Sequence
  Synthetic
HHFHPGGMD

SEQ ID NO: 1044 - protein, 120 aa, Artificial Sequence
  Synthetic
EVQLVESGGGLVQAGGSLRLSCAASGDCHVLWRMGWFRQAPGKEREFVAAISLDGLFTNYADSVRGRFSISADSAKNTVYLQMNSLKPEDTAVYYCNAHHFHPGGMDDYWGQGTQVTVSS

SEQ ID NO: 1045 - DNA, 413 bp, Artificial Sequence
  Synthetic
aaggagatataccatggaagttcaactggttgaatctggtggcggtttagttcaagccggtggtagccttcgtctgagctgcgccgcaagcggagattgtcacgttctctggcgtatgggttggtttcgccaggcacctggtaaagaacgtgaatttgtggcagccattagcctcgacggtttgtttaccaactatgccgattctgttcgtggtcgcttcagcatttcagcagattctgcgaagaataccgtgtacttacagatgaactcactgaaacctgaggataccgccgtttattattgtaatgcacaccattttcatcctggtggtatggatgactattggggtcagggcacacaagtcacggtctcaagcggcggaagctctggtgaacagaaactgatttcagaag

SEQ ID NO: 1046 - protein, 7 aa, Artificial Sequence
  Synthetic
DCHVLWR

SEQ ID NO: 1047 - protein, 5 aa, Artificial Sequence
  Synthetic
LDGLF

SEQ ID NO: 1048 - protein, 4 aa, Artificial Sequence
  Synthetic
MPFF

SEQ ID NO: 1049 - protein, 115 aa, Artificial Sequence
  Synthetic
EVQLVESGGGLVQAGDSLRLSCAASGDCHVLWRMGWFRQAPGKEREFVAAISLDGLFTNYADSVRGRFSISADSAKNTVYLQMNSLKPEDTAVYYCAAMPFFAYWVQGTQVTVSS

SEQ ID NO: 1050 - DNA, 394 bp, Artificial Sequence
  Synthetic
agatataccatggaagttcaactggttgaatctggtggcggtttagttcaagccggtgatagccttcgtctgagctgcgccgcaagcggagattgtcacgttctctggcgtatgggttggtttcgccaggcacctggtaaagaacgtgaatttgtggcagccattagcctcgacggtttgtttaccaactatgccgattctgttcgtggtcgcttcagcatttcagcagattctgcgaagaataccgtgtacttacagatgaactcactgaaacctgaggataccgccgtttattattgtgcggcaatgcctttttttgcctattgggttcagggcacacaagtcacggtctcaagcggcggaagctctggtgaacagaaactgatttcagaag

SEQ ID NO: 1051 - protein, 7 aa, Artificial Sequence
  Synthetic
DCHVLWR

SEQ ID NO: 1052 - protein, 5 aa, Artificial Sequence
  Synthetic
LDGLF

SEQ ID NO: 1053 - protein, 6 aa, Artificial Sequence
  Synthetic
LPKRTV

SEQ ID NO: 1054 - protein, 117 aa, Artificial Sequence
  Synthetic
QVQLVESGGALVQAGDSLRLSCAASGDCHVLWRMGWFRQTPGKEREFVAAISLDGLFTNYADSVRGRFSISADSAKNTVYLQMNSLKPEDTAVYYCAALPKRTVDYWGQGTQVTVSS

SEQ ID NO: 1055 - DNA, 396 bp, Artificial Sequence
  Synthetic
ataccatgcaggttcaactggttgaatctggtggcgcattagttcaagccggtgatagccttcgtctgagctgcgccgcaagcggagattgtcacgttctctggcgtatgggttggtttcgccagacacctggtaaagaacgtgaatttgtggcagccattagcctcgacggtttgtttaccaactatgccgattctgttcgtggtcgcttcagcatttcagcagattctgcgaagaataccgtgtacttacagatgaactcactgaaacctgaggataccgccgtttattattgtgcggcactgcctaagcggactgtggactattggggtcagggcacacaagtcacggtctcaagcggcggaagctctggtgaacagaaactgatttcagaag

SEQ ID NO: 1056 - protein, 7 aa, Artificial Sequence
  Synthetic
DCHVLWR

SEQ ID NO: 1057 - protein, 5 aa, Artificial Sequence
  Synthetic
LDGLF

SEQ ID NO: 1058 - protein, 4 aa, Artificial Sequence
  Synthetic
MPFF

SEQ ID NO: 1059 - protein, 115 aa, Artificial Sequence
  Synthetic
EVQLVESGGGLVQAGDSLRLSCAASGDCHVLWRMGWFRQAPGKEREFVAAISLDGLFTNYADSVRGRFSISADPAKNTVYLQMNSLKPEDTAVYYCAAMPFFDYWGQGTQVTVSS

SEQ ID NO: 1060 - DNA, 388 bp, Artificial Sequence
  Synthetic
accatggaagttcaactggttgaatctggtggcggtttagttcaagccggtgatagccttcgtctgagctgcgccgcaagcggagattgtcacgttctctggcgtatgggttggtttcgacaggcacctggtaaagaacgtgaatttgtggcagccattagcctcgacggtttgtttaccaactatgccgattctgttcgtggtcgcttcagcatttcagcagatcctgcgaagaataccgtgtacttacagatgaactcactgaaacctgaggataccgccgtttattattgtgcggcaatgcctttttttgactattggggtcagggcacacaagtcacggtctcaagcggcggaagctctggtgaacagaaactgatttcagaag

SEQ ID NO: 1061 - protein, 7 aa, Artificial Sequence
  Synthetic
DCHVLWR

SEQ ID NO: 1062 - protein, 5 aa, Artificial Sequence
  Synthetic
LDGLF

SEQ ID NO: 1063 - protein, 6 aa, Artificial Sequence
  Synthetic
LPATSG

SEQ ID NO: 1064 - protein, 117 aa, Artificial Sequence
  Synthetic
EVQLVESGGGLVQVGDSLRLSCAASGDCHVLWRMGWFRQAPGKEREFVAAISLDGLFTNYADSVRGRFSISADSAKNTVYLQMNSLKPEDTAVYYCAALPATSGDYWGQGTQVTVSS

SEQ ID NO: 1065 - DNA, 405 bp, Artificial Sequence
  Synthetic
gaaggagatataccatggaagttcaactggttgaatctggtggcggtttagttcaagtcggtgatagccttcgtctgagctgcgccgcaagcggagattgtcacgttctctggcgtatgggttggtttcgccaggcacctggtaaagaacgtgaatttgtggcagccattagcctcgacggtttgtttaccaactatgccgattctgttcgtggtcgcttcagcatttcagcagattctgcgaagaataccgtgtacttacagatgaactcactgaaacctgaggataccgccgtttattattgtgcggcattgccggcgacttctggcgactattggggtcagggcacacaagtcacggtctcaagcggcggaagctctggtgaacagaaactgatttcagaag

SEQ ID NO: 1066 - protein, 7 aa, Artificial Sequence
  Synthetic
DCHVLWR

SEQ ID NO: 1067 - protein, 5 aa, Artificial Sequence
  Synthetic
LDGLF

SEQ ID NO: 1068 - protein, 4 aa, Artificial Sequence
  Synthetic
MPFF

SEQ ID NO: 1069 - protein, 115 aa, Artificial Sequence
  Synthetic
EVQLVESGGGLVQAGDSLRLSCAASGDCHVLWRMGWFRQAPGKEREFVAAISLDGLFTNYADSVCGRFSISADSAKNTVYLQMNSLKPEDTAVYYCAAMPFFDYWGQGTQVTVSS

SEQ ID NO: 1070 - DNA, 398 bp, Artificial Sequence
  Synthetic
aaggagatataccatggaagttcaactggttgaatctggtggcggtttagttcaagccggtgatagccttcgtctgagctgcgccgcaagcggagattgtcacgttctctggcgtatgggttggtttcgccaggcacctggtaaagaacgtgaatttgtggcagccattagcctcgacggtttgtttaccaactatgccgattctgtttgtggtcgcttcagcatttcagcagattctgcgaagaataccgtgtacttacagatgaactcactgaaacctgaggataccgccgtttattattgtgcggcaatgcctttttttgactattggggtcagggcacacaagtcacggtctcaagcggcggaagctctggtgaacagaaactgatttcagaag

SEQ ID NO: 1071 - protein, 7 aa, Artificial Sequence
  Synthetic
DCHVLWR

SEQ ID NO: 1072 - protein, 5 aa, Artificial Sequence
  Synthetic
LDGLF

SEQ ID NO: 1073 - protein, 4 aa, Artificial Sequence
  Synthetic
MPFF

SEQ ID NO: 1074 - protein, 115 aa, Artificial Sequence
  Synthetic
EVQLVESGGGLVQAGDSLRLSCAASGDCHVLWRMGWFRQAPGKEREFVAAISLDGLFTNYADSVRGRFSISADSAKNTVYLQMNSLKPEDTAVYYCAAMPFFDYWGRGTQVTVSS

SEQ ID NO: 1075 - DNA, 398 bp, Artificial Sequence
  Synthetic
aaggagatataccatggaagttcaactggttgaatctggtggcggtttagttcaagccggtgatagccttcgtctgagctgcgccgcaagcggagattgtcacgttctctggcgtatgggttggtttcgccaggcacctggtaaagaacgtgaatttgtggcagccattagcctcgacggtttgtttaccaactatgccgattctgttcgtggtcgcttcagcatttcagcagattctgcgaagaataccgtgtacttacagatgaactcactgaaacctgaggataccgccgtttattattgtgcggcaatgcctttttttgactattggggtcggggcacacaagtcacggtctcaagcggcggaagctctggtgaacagaaactgatttcagaag

SEQ ID NO: 1076 - protein, 7 aa, Artificial Sequence
  Synthetic
DCHVLWR

SEQ ID NO: 1077 - protein, 5 aa, Artificial Sequence
  Synthetic
LDGLF

SEQ ID NO: 1078 - protein, 6 aa, Artificial Sequence
  Synthetic
CTRFRA

SEQ ID NO: 1079 - protein, 117 aa, Artificial Sequence
  Synthetic
EVQLVESGGGLVQAGDSLRLSCAASGDCHVLWRMGWFRQAPGKEREFVAAISLDGLFTNYADSVRGRFSISADSAKNTVYLQMNSLKPEDTAVYYCAACTRFRADYWGQGTQVTVSS

SEQ ID NO: 1080 - DNA, 404 bp, Artificial Sequence
  Synthetic
aaggagatataccatggaagttcaactggttgaatctggtggcggtttagttcaagccggcgatagccttcgtctgagctgcgccgcaagcggagattgtcacgttctctggcgtatgggttggtttcgccaggcacctggtaaagaacgtgaatttgtggcagccattagcctcgacggtttgtttaccaactatgccgattctgttcgtggtcgcttcagcatttcagcagattctgcgaagaataccgtgtacttacagatgaactcactgaaacctgaggataccgccgtttattattgtgcggcatgtaccaggttcagggccgactattggggtcagggcacacaagtcacggtctcaagcggcggaagctctggtgaacagaaactgatttcagaag

SEQ ID NO: 1081 - protein, 7 aa, Artificial Sequence
  Synthetic
DCHVLWR

SEQ ID NO: 1082 - protein, 5 aa, Artificial Sequence
  Synthetic
LDGLF

SEQ ID NO: 1083 - protein, 6 aa, Artificial Sequence
  Synthetic
LPATSG

SEQ ID NO: 1084 - protein, 117 aa, Artificial Sequence
  Synthetic
EVQLVESGGGLVKAGDSLRLSCAASGDCHVLWRMGWFRQAPGKEREFVAAISLDGLFTNYADSVRGRFSISADSAKNTVYLQMNSLKPEDTAVYYCAALPATSGAYWGQGTQVTVSS

SEQ ID NO: 1085 - DNA, 402 bp, Artificial Sequence
  Synthetic
ggagatataccatggaagttcaactggttgaatctggtggcggtttagttaaagccggtgatagccttcgtctgagctgcgccgcaagcggagattgtcacgttctctggcgtatgggttggtttcgccaggcacctggtaaagaacgtgaatttgtggcagccattagcctcgacggtttgtttaccaactatgccgattctgttcgtggtcgcttcagcatttcagcagattctgcgaagaataccgtgtacttacagatgaactcactgaaacctgaggataccgccgtttattattgtgcggcattgccggcgacttctggcgcctattggggtcagggcacacaagtcacggtctcaagcggcggaagctctggtgaacagaaactgatttcagaag

SEQ ID NO: 1086 - protein, 7 aa, Artificial Sequence
  Synthetic
DCHVLWR

SEQ ID NO: 1087 - protein, 5 aa, Artificial Sequence
  Synthetic
LDGLF

SEQ ID NO: 1088 - protein, 4 aa, Artificial Sequence
  Synthetic
MPFF

SEQ ID NO: 1089 - protein, 115 aa, Artificial Sequence
  Synthetic
EVQLVESGGGLVQAGDRLRLSCAASGDCHVLWRMGWFRQAPGKEREFVAAISLDGLFTNYADSVRGRFSISADSAKNTVYLQMNSLKPEDTAVYYCAAMPFFDYWGQGTQVTVSS

SEQ ID NO: 1090 - DNA, 403 bp, Artificial Sequence
  Synthetic
gaaggagatataccatggaagttcaactggttgaatctggtggcggtttagttcaagccggtgatcgccttcgtctgagctgcgccgcaagcggagattgtcacgttctctggcgtatgggttggtttcgccaggcacctggtaaagaacgtgaatttgtggcagccattagcctcgacggtttgtttaccaactatgccgattctgttcgtggtcgcttcagcatttcagcagattctgcgaagaataccgtgtacttacagatgaactcactgaaacctgaggataccgccgtttattattgtgcggcaatgcctttttttgactattggggtcagggcacacaagtcacggtctcaagcggcggaagctctggtgaaaagaaactgatttcagaagccaa

SEQ ID NO: 1091 - protein, 7 aa, Artificial Sequence
  Synthetic
DCHVLWR

SEQ ID NO: 1092 - protein, 5 aa, Artificial Sequence
  Synthetic
LDGLF

SEQ ID NO: 1093 - protein, 4 aa, Artificial Sequence
  Synthetic
MPFF

SEQ ID NO: 1094 - protein, 115 aa, Artificial Sequence
  Synthetic
EVQLVESGGGLVQAGDSLRLSCAASGDCHVLWRMGWFRQAPGKEREFAAAISLDGLFTNYADSVRGRFSISADSAKNTVYLQMNSLKPEDTAVYYCAAMPFFDYWGQGTQVTVSS

SEQ ID NO: 1095 - DNA, 394 bp, Artificial Sequence
  Synthetic
ataccatggaagttcaactggttgaatctggtggcggtttagttcaagccggtgatagccttcgtctgagctgcgccgcaagcggagattgtcacgttctctggcgtatgggttggtttcgccaggcacctggtaaagaacgtgaatttgcggcagccattagcctcgacggtttgtttaccaactatgccgattctgttcgtggtcgcttcagcatttcagcagattctgcgaagaataccgtgtacttacagatgaactcactgaaacctgaggataccgccgtttattattgtgcggcaatgcctttttttgactattggggtcagggcacacaagtcacggtctcaagcggcggaagctctggtgaacagaaactgatttcagaagccaa

SEQ ID NO: 1096 - protein, 7 aa, Artificial Sequence
  Synthetic
DCHVLWR

SEQ ID NO: 1097 - protein, 5 aa, Artificial Sequence
  Synthetic
LDGLF

SEQ ID NO: 1098 - protein, 9 aa, Artificial Sequence
  Synthetic
HNFHPGGMD

SEQ ID NO: 1099 - protein, 120 aa, Artificial Sequence
  Synthetic
EVQLVESGGGLVQAGDSLRLSCAASGDCHVLWRMGWFRQAPGKEREFVAAISLDGLFTNYADSVRGRFSISADSAKNTVYLQMNSLKPEDTAVYYCNAHNFHPGGMDDYWGQGTQVTVSS

SEQ ID NO: 1100 - DNA, 413 bp, Artificial Sequence
  Synthetic
agatataccatggaagttcaactggttgaatctggtggcggtttagttcaagccggtgatagccttcgtctgagctgcgccgcaagcggagattgtcacgttctctggcgtatgggttggtttcgccaggcacctggtaaagaacgtgaatttgtggcagccattagcctcgacggtttgtttaccaactatgccgattctgttcgtggtcgcttcagcatttcagcagattctgcgaagaataccgtgtacttacagatgaactcactgaaacctgaggataccgccgtttattattgtaatgcacacaattttcatcctggtggtatggatgactattggggtcagggcacacaagtcacggtctcaagcggcggaagctctggtgaacagaaactgatttcagaagccaa

SEQ ID NO: 1101 - protein, 7 aa, Artificial Sequence
  Synthetic
DCHVLSR

SEQ ID NO: 1102 - protein, 5 aa, Artificial Sequence
  Synthetic
LDGLF

SEQ ID NO: 1103 - protein, 6 aa, Artificial Sequence
  Synthetic
TIYGVY

SEQ ID NO: 1104 - protein, 117 aa, Artificial Sequence
  Synthetic
EVQLVESGGGLVQAGDSLRLSCAASGDCHVLSRMGWFRQAPGKEREFVAAISLDGLFTNYADSVRGRFGISADSAKNTVYLQMNSLKPEDTAVYYCAATIYGVYEYWGQGTQVTVSS

SEQ ID NO: 1105 - DNA, 407 bp, Artificial Sequence
  Synthetic
aggagatataccatggaagttcaactggttgaatctggtggcggtttagttcaagccggtgatagccttcgtctgagctgcgccgcaagcggagattgtcacgttctctcgcgtatgggttggtttcgccaggcacctggtaaagaacgtgaatttgtggcagccattagcctcgacggtttgtttaccaactatgccgattctgttcgtggtcgcttcggcatttcagcagattctgcgaagaataccgtgtacttacagatgaactcactgaaacctgaggataccgccgtttattattgtgcggcaactatctatggtgtctatgagtattggggtcagggcacacaagtcacggtctcaagcggcggaagctctggtgaacagaaactgatttcagaagccaa

SEQ ID NO: 1106 - protein, 7 aa, Artificial Sequence
  Synthetic
DCHVLWR

SEQ ID NO: 1107 - protein, 5 aa, Artificial Sequence
  Synthetic
LDGLF

SEQ ID NO: 1108 - protein, 4 aa, Artificial Sequence
  Synthetic
MPFF

SEQ ID NO: 1109 - protein, 115 aa, Artificial Sequence
  Synthetic
EVQLVESGGGLVQAGDSLRLSCAASGDCHVLWRMGWFRQAPGKEREFVAAISLDGLFTNYADSVRGRFSISADSAKNTVYLQMNSLKPEDTAVYYCAAMPFFDYWGQGTQGTVSS

SEQ ID NO: 1110 - DNA, 392 bp, Artificial Sequence
  Synthetic
accatggaagttcaactggttgaatctggtggcggtttagttcaagccggtgatagccttcgtctgagctgcgccgcaagcggagattgtcacgttctctggcgtatgggttggtttcgccaggcacctggtaaagaacgtgaatttgtggcagccattagcctcgacggtttgtttaccaactatgccgattctgttcgtggtcgcttcagcatttcagcagattctgcgaagaataccgtgtacttacagatgaactcactgaaacctgaggataccgccgtttattattgtgcggcaatgcctttttttgactattggggtcagggcacacaaggcacggtctcaagcggcggaagctctggtgaacagaaactgatttcagaagccaa

SEQ ID NO: 1111 - protein, 7 aa, Artificial Sequence
  Synthetic
DCHVLWR

SEQ ID NO: 1112 - protein, 5 aa, Artificial Sequence
  Synthetic
LDGLF

SEQ ID NO: 1113 - protein, 6 aa, Artificial Sequence
  Synthetic
LPATSG

SEQ ID NO: 1114 - protein, 117 aa, Artificial Sequence
  Synthetic
EVQLVESGGGLVQAGDSLRLSCAASGDCHVLWRMGWFRQAPGKEREFVAAISLDGLFTNYADSVRGRFSISADSAKNTVYLQMNSLKPEDTAVYYCAALPATSGDYWGQGTQGTVSS

SEQ ID NO: 1115 - DNA, 406 bp, Artificial Sequence
  Synthetic
ggagatataccatggaagttcaactggttgaatctggtggcggtttagttcaagccggtgatagccttcgtctgagctgcgccgcaagcggagattgtcacgttctctggcgtatgggttggtttcgccaggcacctggtaaagaacgtgaatttgtggcagccattagcctcgacggtttgtttaccaactatgccgattctgttcgtggtcgcttcagcatttcagcagattctgcgaagaataccgtgtacttacagatgaactcactgaaacctgaggataccgccgtttattattgtgcggcattgccggcgacttctggcgactattggggtcagggcacacaaggtacggtctcaagcggcggaagctctggtgaacagaaactgatttcagaagccaa

SEQ ID NO: 1116 - protein, 7 aa, Artificial Sequence
  Synthetic
DCHVLWR

SEQ ID NO: 1117 - protein, 5 aa, Artificial Sequence
  Synthetic
LDGLF

SEQ ID NO: 1118 - protein, 4 aa, Artificial Sequence
  Synthetic
MPFF

SEQ ID NO: 1119 - protein, 115 aa, Artificial Sequence
  Synthetic
EVQLVESGGGLVHAGDSLRLSCAASGDCHVLWRMGWFRQAPGKEREFVAAISLDGLFTNYADSVRGRFSISADSAKNTVYLQMNSLKPEDTAVYYCAAMPFFDYWAQGTHVTVSS

SEQ ID NO: 1120 - DNA, 403 bp, Artificial Sequence
  Synthetic
gaaggagatataccatggaagttcaactggttgaatctggtggcggtttagttcacgccggtgatagccttcgtctgagctgcgccgcaagcggagattgtcacgttctctggcgtatgggttggtttcgccaggcacctggtaaagaacgtgaatttgtggcagccattagcctcgacggtttgtttaccaactatgccgattctgttcgtggtcgcttcagcatttcagcagattctgcgaagaataccgtgtacttacagatgaactcactgaaacctgaggataccgccgtttattattgtgcggcaatgcctttttttgactattgggctcagggcacacatgtcacggtctcaagcggcggaagctctggtgcacagaaactgatctcagaagccaa

SEQ ID NO: 1121 - protein, 7 aa, Artificial Sequence
  Synthetic
DCHVLWR

SEQ ID NO: 1122 - protein, 5 aa, Artificial Sequence
  Synthetic
LDGLF

SEQ ID NO: 1123 - protein, 4 aa, Artificial Sequence
  Synthetic
MPFF

SEQ ID NO: 1124 - protein, 115 aa, Artificial Sequence
  Synthetic
QVQLQESGGGLVQAGDSLRLSCAASGDCHVLWRMGWFRQAPGKEREFVAAISLDGLFTNYADSVRGRFSISADSAKNTVYLQMNSLKPEDTAVYYCAAMPFFDYWGQGTQVTVSS

SEQ ID NO: 1125 - DNA, 396 bp, Artificial Sequence
  Synthetic
atataccatgcaggttcaactgcaagaatctggtggcggtttagttcaagccggtgatagccttcgtctgagctgcgccgcaagcggagattgtcacgttctctggcgtatgggttggtttcgccaggcacctggtaaagaacgtgaatttgtggcagccattagcctcgacggtttgtttaccaactatgccgattctgttcgtggtcgcttcagcatttcagcagattctgcgaagaataccgtgtacttacagatgaactcactgaaacctgaggataccgccgtttattattgtgcggcaatgcctttttttgactattggggtcagggcacacaagtcacggtctcaagcggcggaagctctggtgaacagaaactgatttcagaagccaa

SEQ ID NO: 1126 - protein, 7 aa, Artificial Sequence
  Synthetic
DCHVLWR

SEQ ID NO: 1127 - protein, 5 aa, Artificial Sequence
  Synthetic
LDGLF

SEQ ID NO: 1128 - protein, 6 aa, Artificial Sequence
  Synthetic
LPATSG

SEQ ID NO: 1129 - protein, 117 aa, Artificial Sequence
  Synthetic
EVQLVESGGGLVQAGDSLRLSCAASGDCHVLWRMGWFRQAPGKEREIVAAISLDGLFTNYADSVRGRFSISADSAKNTVYLQMNSLKPEDTAVYYCAALPATSGDCWGQGTQVTVSS

SEQ ID NO: 1130 - DNA, 398 bp, Artificial Sequence
  Synthetic
accatggaagttcaactggttgaatctggtggcggtttagttcaagccggtgatagccttcgtctgagctgcgccgcaagcggagattgtcacgttctctggcgtatgggttggtttcgccaggcacctggtaaagaacgtgaaattgtggcagccattagcctcgacggtttgtttaccaactatgccgattctgttcgtggtcgcttcagcatttcagcagattctgcgaagaataccgtgtacttacagatgaactcactgaaacctgaggataccgccgtttattattgtgcggcattgccggcgacttctggcgactgttggggtcagggcacacaagtcacggtctcaagcggcggaagctctggtgaacagaaactgatttcagaagccaa

SEQ ID NO: 1131 - protein, 7 aa, Artificial Sequence
  Synthetic
DCHVLWR

SEQ ID NO: 1132 - protein, 5 aa, Artificial Sequence
  Synthetic
LDGLF

SEQ ID NO: 1133 - protein, 9 aa, Artificial Sequence
  Synthetic
LTSPLSDSS

SEQ ID NO: 1134 - protein, 120 aa, Artificial Sequence
  Synthetic
EVQLFESGGGLVQAGDSLRLSCAASGDCHVLWRMGWFRQAPGKEREFVAAISLDGLFTNYADSVRGRFSISADSAKNTVYLQMNSLKPEDTAVYYCAALTSPLSDSSDYWGQGTQVTVSS

SEQ ID NO: 1135 - DNA, 411 bp, Artificial Sequence
  Synthetic
atataccatggaagttcaactgtttgaatctggtggcggtttagttcaagccggtgatagccttcgtctgagctgcgccgcaagcggagattgtcacgttctctggcgtatgggttggtttcgccaggcacctggtaaagaacgtgaatttgtggcagccattagcctcgacggtttgtttaccaactatgccgattctgttcgtggtcgcttcagcatttcagcagattctgcgaagaataccgtgtacttacagatgaactcactgaaacctgaggacaccgccgtttattattgtgcggcattgacgtctccgctttcggattcgtccgactattggggtcagggcacacaagtcacggtctcaagcggcggaagctctggtgaacagaaactgatttcagaagccaa

SEQ ID NO: 1136 - protein, 7 aa, Artificial Sequence
  Synthetic
DCHVLWR

SEQ ID NO: 1137 - protein, 5 aa, Artificial Sequence
  Synthetic
LDGLF

SEQ ID NO: 1138 - protein, 4 aa, Artificial Sequence
  Synthetic
MPFF

SEQ ID NO: 1139 - protein, 115 aa, Artificial Sequence
  Synthetic
EVQLVESGGGLVQAGDSLRLSCAASGDCHVLWRMGWFRQAPGKEREFVAAISLDGLFTNYADSVRGRFSISADSAKNTVYLQMNSLKPEDTAVYYCAAMPFFDYWGQGTQVTVSI

SEQ ID NO: 1140 - DNA, 396 bp, Artificial Sequence
  Synthetic
atataccatggaagttcaactggttgaatctggtggcggtttagttcaagccggtgatagccttcgtctgagctgcgccgcaagcggagattgtcacgttctctggcgtatgggttggtttcgccaggcacctggtaaagaacgtgaatttgtggcagccattagcctcgacggtttgtttaccaactatgccgattctgttcgtggtcgcttcagcatttcagcagattctgcgaagaataccgtgtacttacagatgaactcactgaaacctgaggataccgccgtttattattgtgcggcaatgcctttttttgactattggggtcagggcacacaagtcacggtctcaatcggcggaagctctggtgaacagaaactgatttcagaagccaa

SEQ ID NO: 1141 - protein, 7 aa, Artificial Sequence
  Synthetic
DCHVLWR

SEQ ID NO: 1142 - protein, 5 aa, Artificial Sequence
  Synthetic
LDGLF

SEQ ID NO: 1143 - protein, 4 aa, Artificial Sequence
  Synthetic
MPFF

SEQ ID NO: 1144 - protein, 115 aa, Artificial Sequence
  Synthetic
EVQLVESGGGLVQTGDSLRLSCAASGDCHVLWRMGWFRQAPGKEREFVAAISLDGLFTNYADSVRGRFSISADSAKNTVYLQMNSLKPEDTAVYYCAAMPFFDYWGQGTQVTVSS

SEQ ID NO: 1145 - DNA, 400 bp, Artificial Sequence
  Synthetic
ggagatataccatggaagttcaactggttgaatctggtggcggtttagttcaaaccggtgatagccttcgtctgagctgcgccgcaagcggagattgtcacgttctctggcgtatgggttggtttcgccaggcacctggtaaagaacgtgaatttgtggcagccattagcctcgacggtttgtttaccaactatgccgattctgttcgtggtcgcttcagcatttcagcagattctgcgaagaataccgtgtacttacagatgaactcactgaaacctgaggataccgccgtttattattgtgcggcaatgcctttttttgactattggggtcagggcacacaagtcacggtctcaagcggcggaagctctggtgaacagaaactgatttcagaagccaa

SEQ ID NO: 1146 - protein, 7 aa, Artificial Sequence
  Synthetic
DCHILWR

SEQ ID NO: 1147 - protein, 5 aa, Artificial Sequence
  Synthetic
LDGLF

SEQ ID NO: 1148 - protein, 6 aa, Artificial Sequence
  Synthetic
LPSVCT

SEQ ID NO: 1149 - protein, 117 aa, Artificial Sequence
  Synthetic
EVQLVESGGGLVQAGDSLRLSCAASGDCHILWRMGWFRQAPGKEREFVAAISLDGLFTNYADSVRGRFSISADSAKNTVYLQMNSLKPEDTAVYYCAALPSVCTDYWGQGTQGTVSS

SEQ ID NO: 1150 - DNA, 402 bp, Artificial Sequence
  Synthetic
atataccatggaagttcaactggttgaatctggtggcggtttagttcaagccggtgatagccttcgtctgagctgcgccgcaagcggagattgtcacattctctggcgtatgggttggtttcgccaggcacctggtaaagaacgtgaatttgtggcagccattagcctcgacggtttgtttaccaactatgccgattctgttcgtggtcgcttcagcatttcagcagattctgcgaagaataccgtgtacttacagatgaactcactgaaacctgaggataccgccgtttattattgtgcggcactgcctagtgtgtgtaccgactattgggggcagggcacacaaggcacggtctcaagcggcggaagctctggtgaacagaaactgatttcagaagccaa

SEQ ID NO: 1151 - protein, 7 aa, Artificial Sequence
  Synthetic
DCHVLWR

SEQ ID NO: 1152 - protein, 5 aa, Artificial Sequence
  Synthetic
LDGLF

SEQ ID NO: 1153 - protein, 4 aa, Artificial Sequence
  Synthetic
MPFF

SEQ ID NO: 1154 - protein, 115 aa, Artificial Sequence
  Synthetic
EVQLVESGGGLVQAGDSLRLSCAASGDCHVLWRMGWFRQAPGKEREFVAAISLDGLFTNYADSVRGHFSISADSAKNTVYLQMNSLKPEDTAVYYCAAMPFFDYWGQGTQVTVSS

SEQ ID NO: 1155 - DNA, 401 bp, Artificial Sequence
  Synthetic
aggagatataccatggaagttcaactggttgaatctggtggcggtttagttcaagccggtgatagccttcgtctgagctgcgccgcaagcggagattgtcacgttctctggcgtatgggttggtttcgccaggcacctggtaaagaacgtgaatttgtggcagccattagcctcgacggtttgtttaccaactatgccgattctgttcgtggtcacttcagcatttcagcagattctgcgaagaataccgtgtacttacagatgaactcactgaaacctgaggataccgccgtttattattgtgcggcaatgcctttttttgactattggggtcagggcacacaagtcacggtctcaagcggcggaagctctggtgaacagaaactgatttcagaagccaa

SEQ ID NO: 1156 - protein, 7 aa, Artificial Sequence
  Synthetic
DFHVLWR

SEQ ID NO: 1157 - protein, 5 aa, Artificial Sequence
  Synthetic
LDGLF

SEQ ID NO: 1158 - protein, 6 aa, Artificial Sequence
  Synthetic
LPATSG

SEQ ID NO: 1159 - protein, 117 aa, Artificial Sequence
  Synthetic
EVQLVESGGGLVQAGDSLRLSCAASGDFHVLWRMGWFRQAPGKEREFVAAISLDGLFTNYADSVRGRFSISADSAKNTVYLQMNSLKPEDTAVYYCAALPATSGDYWGQGTQVTVSS

SEQ ID NO: 1160 - DNA, 406 bp, Artificial Sequence
  Synthetic
ggagatataccatggaagttcaactggttgaatctggtggcggtttagttcaagccggtgatagccttcgtctgagctgcgccgcaagcggagattttcacgttctctggcgtatgggttggtttcgccaggcacctggtaaagaacgtgaatttgtggcagccattagcctcgacggtttgtttaccaactatgccgattctgttcgtggtcgcttcagcatttcagcagattctgcgaagaataccgtgtacttacagatgaactcactgaaacctgaggataccgccgtttattattgtgcggcattgccggcgacttctggcgactattggggtcagggcacacaagtcacggtctcaagcggcggaagctctggtgaacagaaactgatttcagaagccaa

SEQ ID NO: 1161 - protein, 7 aa, Artificial Sequence
  Synthetic
DCHVLWR

SEQ ID NO: 1162 - protein, 5 aa, Artificial Sequence
  Synthetic
LDGLF

SEQ ID NO: 1163 - protein, 4 aa, Artificial Sequence
  Synthetic
MPFF

SEQ ID NO: 1164 - protein, 115 aa, Artificial Sequence
  Synthetic
EVQLVESGGGLVQAGDSLRLSCAASGDCHVLWRMGWFRQAPGKEREFVVAISLDGLFTNYADSVRGRFSISADSAKNTVYLQMNSLKPEDTAVYYCAAMPFFDYWGQGTQVTVSS

SEQ ID NO: 1165 - DNA, 403 bp, Artificial Sequence
  Synthetic
gaaggagatataccatggaagttcaactggttgaatctggtggcggtttagttcaagccggtgatagccttcgtctgagctgcgccgcaagcggagattgtcacgttctctggcgtatgggttggtttcgccaggcacctggtaaagaacgtgaatttgtggtagccattagcctcgacggtttgtttaccaactatgccgattctgttcgtggtcgcttcagcatttcagcagattctgcgaagaataccgtgtacttacagatgaactcactgaaacctgaggataccgccgtttattattgtgcggcaatgcctttttttgactattggggtcagggcacacaagtcacggtctcaagcggcggaagctctggtgaacagaaactgatttcagaagccaa

SEQ ID NO: 1166 - protein, 7 aa, Artificial Sequence
  Synthetic
DCHVLWR

SEQ ID NO: 1167 - protein, 5 aa, Artificial Sequence
  Synthetic
LDGLF

SEQ ID NO: 1168 - protein, 4 aa, Artificial Sequence
  Synthetic
MPFF

SEQ ID NO: 1169 - protein, 115 aa, Artificial Sequence
  Synthetic
EVQLVESGGGLVQAGDSLRLSCAASGDCHVLWRMGWFRQAPGKEREFVAAISLDGLFTNYADSVRGRFSISADSAKNAVYLQMNSLKPEDTAVYYCAAMPFFDYWGQGTQVTVSS

SEQ ID NO: 1170 - DNA, 392 bp, Artificial Sequence
  Synthetic
accatggaagttcaactggttgaatctggtggcggtttagttcaagccggtgatagccttcgtctgagctgcgccgcaagcggagattgtcacgttctctggcgtatgggttggtttcgccaggcacctggtaaagaacgtgaatttgtggcagccattagcctcgacggtttgtttaccaactatgccgattctgttcgtggtcgcttcagcatttcagcagattctgcgaagaatgccgtgtacttacagatgaactcactgaaacctgaggataccgccgtttattattgtgcggcaatgcctttttttgactattggggtcagggcacacaagtcacggtctcaagcggcggaagctctggtgaacagaaactgatttcagaagccaa

SEQ ID NO: 1171 - protein, 7 aa, Artificial Sequence
  Synthetic
DCHVLWR

SEQ ID NO: 1172 - protein, 5 aa, Artificial Sequence
  Synthetic
LDGLF

SEQ ID NO: 1173 - protein, 6 aa, Artificial Sequence
  Synthetic
LPATSG

SEQ ID NO: 1174 - protein, 117 aa, Artificial Sequence
  Synthetic
EVQLVESGGGLVQAGDSLRLSCAASGDCHVLWRMGWFRQAPGKEREFVAAISLDGLFTNYADSVRGRFSISADSAKNTVYLQMNLLKPEDTAVYYCAALPATSGDYWGQGTQVTVSS

SEQ ID NO: 1175 - DNA, 406 bp, Artificial Sequence
  Synthetic
ggagatataccatggaagttcaactggttgaatctggtggcggtttagttcaagccggtgatagccttcgtctgagctgcgccgcaagcggagattgtcacgttctctggcgtatgggttggtttcgccaggcacctggtaaagaacgtgaatttgtggcagccattagcctcgacggtttgtttaccaactatgccgattctgttcgtggtcgcttcagcatttcagcagattctgcgaagaataccgtgtacttacagatgaacttactgaaacctgaggataccgccgtttattattgtgcggcattgccggcgacttctggcgactattggggtcagggcacacaagtcacggtctcaagcggcggaagctctggtgaacagaaactgatttcagaagccaa

SEQ ID NO: 1176 - protein, 7 aa, Artificial Sequence
  Synthetic
DCHVLWR

SEQ ID NO: 1177 - protein, 5 aa, Artificial Sequence
  Synthetic
LDGLF

SEQ ID NO: 1178 - protein, 4 aa, Artificial Sequence
  Synthetic
MPFF

SEQ ID NO: 1179 - protein, 115 aa, Artificial Sequence
  Synthetic
EVQLVESGGGLVQDGDSVRLSCAASGDCHVLWRMGWFRQAPGKEREFVAAISLDGLFTNYADSVRGRFSISADSAKNTVYLQMNSLKPEDTAVYYCAAMPFFDYWGQGTQVTVSS

SEQ ID NO: 1180 - DNA, 403 bp, Artificial Sequence
  Synthetic
gaaggagatataccatggaagttcaactggttgaatctggtggcggtttagttcaagacggtgatagcgttcgtctgagctgcgccgcaagcggagattgtcacgttctctggcgtatgggttggtttcgccaggcacctggtaaagaacgtgaatttgtggcagccattagcctcgacggtttgtttaccaactatgccgattctgttcgtggtcgcttcagcatttcagcagattctgcgaagaataccgtgtacttacagatgaactcactgaaacctgaggataccgccgtttattattgtgcggcaatgcctttttttgactattggggtcagggcacacaagtcacggtctcaagcggcggaagctctggtgaacagaaactgatttcagaagccaa

SEQ ID NO: 1181 - protein, 7 aa, Artificial Sequence
  Synthetic
DCHVLWR

SEQ ID NO: 1182 - protein, 5 aa, Artificial Sequence
  Synthetic
LVGLF

SEQ ID NO: 1183 - protein, 4 aa, Artificial Sequence
  Synthetic
MPFF

SEQ ID NO: 1184 - protein, 115 aa, Artificial Sequence
  Synthetic
EVQLVESGGGLVQAGDSLRLSCAASGDCHVLWRMGWFRQAPGKEREFVAAISLVGLFTNYVDSVRGRFSISADSAKNTVYLQMNSLKPEDTAVYYCAAMPFFDYWGQGTQVTVSS

SEQ ID NO: 1185 - DNA, 396 bp, Artificial Sequence
  Synthetic
atataccatggaagttcaactggttgaatctggtggcggtttagttcaagccggtgatagccttcgtctgagctgcgccgcaagcggagattgtcacgttctctggcgtatgggttggtttcgccaggcacctggtaaagaacgtgaatttgtggcagccattagcctcgtcggtttgtttaccaactatgtcgattctgttcgtggtcgcttcagcatttcagcagattctgcgaagaataccgtgtacttacagatgaactcactgaaacctgaggataccgccgtttattattgtgcggcaatgcctttttttgactattggggtcagggcacacaagtcacggtctcaagcggcggaagctctggtgaacagaaactgatttcagaagccaa

SEQ ID NO: 1186 - protein, 7 aa, Artificial Sequence
  Synthetic
DCHVLWR

SEQ ID NO: 1187 - protein, 5 aa, Artificial Sequence
  Synthetic
LDGLF

SEQ ID NO: 1188 - protein, 9 aa, Artificial Sequence
  Synthetic
HHFHPGGMD

SEQ ID NO: 1189 - protein, 120 aa, Artificial Sequence
  Synthetic
EVQLVESGGGLVQAGDRLRLSCAASGDCHVLWRMGWFRQAPGKEREFVAAISLDGLFTNYADSVRGRFSISADSAKNTVYLQMNSLKPEDTAVYYCNAHHFHPGGMDDYWGQGTQVTVSS

SEQ ID NO: 1190 - DNA, 418 bp, Artificial Sequence
  Synthetic
gaaggagatataccatggaagttcaactggttgaatctggtggcggtttagttcaagccggtgatcgccttcgtctgagctgcgccgcaagcggagattgtcacgttctctggcgtatgggttggtttcgccaggcacctggtaaagaacgtgaatttgtggcagccattagcctcgacggtttgtttaccaactatgccgattctgttcgtggtcgcttcagcatttcagcagattctgcgaagaataccgtgtacttacagatgaactcactgaaacctgaggataccgccgtttattattgtaatgcacaccattttcatcctggtggtatggatgactattggggtcagggcacacaagtcacggtctcaagcggcggaagctctggtgaacagaaactgatttcagaagccaa

SEQ ID NO: 1191 - protein, 7 aa, Artificial Sequence
  Synthetic
DCHVLWR

SEQ ID NO: 1192 - protein, 5 aa, Artificial Sequence
  Synthetic
LDGLF

SEQ ID NO: 1193 - protein, 6 aa, Artificial Sequence
  Synthetic
LPATSG

SEQ ID NO: 1194 - protein, 117 aa, Artificial Sequence
  Synthetic
EVQLVESGGGLVQAGDSLRLSCAASGDCHVLWRMGWFRQAPGKEREFVAAISLDGLFTNYADSVRGRFSISADSAKNTVYLQMNSLKPEDTAVYYCAALPATSGDYWGQGTQVTFSS

SEQ ID NO: 1195 - DNA, 407 bp, Artificial Sequence
  Synthetic
aggagatataccatggaagttcaactggttgaatctggtggcggtttagttcaagccggtgatagccttcgtctgagctgcgccgcaagcggagattgtcacgttctctggcgtatgggttggtttcgccaggcacctggtaaagaacgtgaatttgtggcagccattagcctcgacggtttgtttaccaactatgccgattctgttcgtggtcgcttcagcatttcagcagattctgcgaagaataccgtgtacttacagatgaactcactgaaacctgaggataccgccgtttattattgtgcggcattgccggcgacttctggcgactattggggtcagggcacacaagtcacgttctcaagcggcggaagctctggtgaacagaaactgatttcagaagccaa

SEQ ID NO: 1196 - protein, 7 aa, Artificial Sequence
  Synthetic
DCHVLWR

SEQ ID NO: 1197 - protein, 5 aa, Artificial Sequence
  Synthetic
ASYRY

SEQ ID NO: 1198 - protein, 6 aa, Artificial Sequence
  Synthetic
WPILSA

SEQ ID NO: 1199 - protein, 117 aa, Artificial Sequence
  Synthetic
EVQLVESGGGLVQAGDSLRLSCAASGDCHVLWRMGWFRQAPGKEREFVAAITASYRYTDYADSVRGRFSISADSAKNTVYLQMNSLKPEDTAVYYCAAWPILSADYWGQGTQVTVSS

SEQ ID NO: 1200 - DNA, 406 bp, Artificial Sequence
  Synthetic
ggagatataccatggaagttcaactggttgaatctggtggcggtttagttcaagccggtgatagccttcgtctgagctgcgccgcaagcggagattgtcacgttctctggcgtatgggttggtttcgccaggcacctggtaaagaacgtgaatttgtggcagccattaccgcgtcttaccgttacaccgactatgccgattctgttcgtggtcgcttcagcatttcagcagattctgcgaagaataccgtgtacttacagatgaactcactgaaacctgaggataccgccgtttattattgtgcggcatggcccattctgtccgctgactattggggtcagggcacacaagtcacggtctcaagcggcggaagctctggtgaacagaaactgatttcagaagccaa

SEQ ID NO: 1201 - protein, 7 aa, Artificial Sequence
  Synthetic
DCHVLWR

SEQ ID NO: 1202 - protein, 5 aa, Artificial Sequence
  Synthetic
LDGLF

SEQ ID NO: 1203 - protein, 6 aa, Artificial Sequence
  Synthetic
LLATSG

SEQ ID NO: 1204 - protein, 117 aa, Artificial Sequence
  Synthetic
EVQLVESGGGLVQAGDSLRLSCAASGDCHVLWRMGWFRQAPGKEREFVAAISLDGLFTNYADSVRGRFSISADSAKNTVYLQMNSLKPEDTAVYYCAALLATSGDYWGQGTQVTVSS

SEQ ID NO: 1205 - DNA, 402 bp, Artificial Sequence
  Synthetic
atataccatggaagttcaactggttgaatctggtggcggtttagttcaagccggtgatagccttcgtctgagctgcgccgcaagcggagattgtcacgttctctggcgtatgggttggtttcgccaggcacctggtaaagaacgtgaatttgtggcagccattagcctcgacggtttgtttaccaactatgccgattctgttcgtggtcgcttcagcatttcagcagattctgcgaagaataccgtgtacttacagatgaactcactgaaacctgaggataccgccgtttattattgtgcggcattgctggcgacttctggcgactattggggtcagggcacacaagtcacggtctcaagcggcggaagctctggtgaacagaaactgatttcagaagccaa

SEQ ID NO: 1206 - protein, 7 aa, Artificial Sequence
  Synthetic
DCHVLWR

SEQ ID NO: 1207 - protein, 5 aa, Artificial Sequence
  Synthetic
LDGLF

SEQ ID NO: 1208 - protein, 4 aa, Artificial Sequence
  Synthetic
MPFF

SEQ ID NO: 1209 - protein, 115 aa, Artificial Sequence
  Synthetic
EVQLVESGGGLVHAGDSLRLSCAASGDCHVLWRMGWFRQAPGKEREFVAAISLDGLFTNYADSVRGRFSISADSAKNTVYLQMNSLKPEDTAVYYCAAMPFFDYWGQGTQVTVSS

SEQ ID NO: 1210 - DNA, 403 bp, Artificial Sequence
  Synthetic
gaaggagatataccatggaagttcaactggttgaatctggtggcggtttagttcacgccggtgatagccttcgtctgagctgcgccgcaagcggagattgtcacgttctctggcgtatgggttggtttcgccaggcacctggtaaagaacgtgaatttgtggcagccattagcctcgacggtttgtttaccaactatgccgattctgttcgtggtcgcttcagcatttcagcagattctgcgaagaataccgtgtacttacagatgaactcactgaaacctgaggataccgccgtttattattgtgcggcaatgcctttttttgactattggggtcagggcacacaagtcacggtctcaagcggcggaagctctggtgaacagaaactgatttcagaagccaa

SEQ ID NO: 1211 - protein, 7 aa, Artificial Sequence
  Synthetic
DCHVLWR

SEQ ID NO: 1212 - protein, 5 aa, Artificial Sequence
  Synthetic
LDGLF

SEQ ID NO: 1213 - protein, 4 aa, Artificial Sequence
  Synthetic
MPFF

SEQ ID NO: 1214 - protein, 115 aa, Artificial Sequence
  Synthetic
EVQLVESGGGLVQAGDSLRLRCAASGDCHVLWRMGWFRQAPGKEREFVAAISLDGLFTNYADSVRGRFSISADSAKNTVYLQMNSLKPEDTAVYYCAAMPFFDYWGQGTQVTVSS

SEQ ID NO: 1215 - DNA, 401 bp, Artificial Sequence
  Synthetic
aggagatataccatggaagttcaactggttgaatctggtggcggtttagttcaagccggtgatagccttcgtctgcgctgcgccgcaagcggagattgtcacgttctctggcgtatgggttggtttcgccaggcacctggtaaagaacgtgaatttgtggcagccattagcctcgacggtttgtttaccaactatgccgattctgttcgtggtcgcttcagcatttcagcagattctgcgaagaataccgtgtacttacagatgaactcactgaaacctgaggataccgccgtttattattgtgcggcaatgcctttttttgactattggggtcagggcacacaagtcacggtctcaagcggcggaagctctggtgaacagaaactgatttcagaagccaa

SEQ ID NO: 1216 - protein, 7 aa, Artificial Sequence
  Synthetic
DCHVLWR

SEQ ID NO: 1217 - protein, 5 aa, Artificial Sequence
  Synthetic
LDGLF

SEQ ID NO: 1218 - protein, 9 aa, Artificial Sequence
  Synthetic
VQFNGTAVA

SEQ ID NO: 1219 - protein, 120 aa, Artificial Sequence
  Synthetic
EVQLVESGGGLVQAGDSLRLSCAASGDCHVLWRMGWFRQAPGKEREFVAAISLDGLFTNYADSVRCRFSISADSAKNTVYLQMNSLKPEDTAVYYCNAVQFNGTAVADYWGQGTQVTFSS

SEQ ID NO: 1220 - DNA, 407 bp, Artificial Sequence
  Synthetic
accatggaagttcaactggttgaatctggtggcggtttagttcaagccggtgatagccttcgtctgagctgcgccgcaagcggagattgtcacgttctctggcgtatgggttggtttcgccaggcacctggtaaagaacgtgaatttgtggcagccattagcctcgacggtttgtttaccaactatgccgattctgttcgttgtcgcttcagcatttcagcagattctgcgaagaataccgtgtacttacagatgaactcactgaaacctgaggataccgccgtttattattgtaatgcagtgcagtttaacgggacggcggttgcggactattggggtcagggcacacaagtcacgttctcaagcggcggaagctctggtgaacagaaactgatttcagaagccaa

SEQ ID NO: 1221 - protein, 7 aa, Artificial Sequence
  Synthetic
DCHVLWR

SEQ ID NO: 1222 - protein, 5 aa, Artificial Sequence
  Synthetic
LDGLF

SEQ ID NO: 1223 - protein, 4 aa, Artificial Sequence
  Synthetic
MPFF

SEQ ID NO: 1224 - protein, 115 aa, Artificial Sequence
  Synthetic
EVQLVESGGGLVQAGDSLRLSCAASGDCHVLWRMGWFRQAPSKEREFVAAISLDGLFTNYADSVRGRFSISADSAKNTVYLQMNSLKPEDTAVYYCAAMPFFDYWGQGTQVTVSS

SEQ ID NO: 1225 - DNA, 392 bp, Artificial Sequence
  Synthetic
accatggaagttcaactggttgaatctggtggcggtttagttcaagccggtgatagccttcgtctgagctgcgccgcaagcggagattgtcacgttctctggcgtatgggttggtttcgccaggcacctagtaaagaacgtgaatttgtggcagccattagcctcgacggtttgtttaccaactatgccgattctgttcgtggtcgcttcagcatttcagcagattctgcgaagaataccgtgtacttacagatgaactcactgaaacctgaggataccgccgtttattattgtgcggcaatgcctttttttgactattggggtcagggcacacaagtcacggtctcaagcggcggaagctctggtgaacagaaactgatttcagaagccaa

SEQ ID NO: 1226 - protein, 7 aa, Artificial Sequence
  Synthetic
DCHVLWR

SEQ ID NO: 1227 - protein, 5 aa, Artificial Sequence
  Synthetic
LDGLF

SEQ ID NO: 1228 - protein, 4 aa, Artificial Sequence
  Synthetic
MPFF

SEQ ID NO: 1229 - protein, 115 aa, Artificial Sequence
  Synthetic
EVRLVESGGGLVQAGDSLRLSCAAGGDCHVLWRMGWFRQAPGKEREFVAAISLDGLFTNYADSVRGRFSISADSAKNTVYLQMNSLKPEDTAVYYCAAMPFFDYWGQGTQVTVSS

SEQ ID NO: 1230 - DNA, 396 bp, Artificial Sequence
  Synthetic
atataccatggaagttcgactggttgaatctggtggcggtttagttcaagccggtgatagccttcgtctgagctgcgccgcaggcggagattgtcacgttctctggcgtatgggttggtttcgccaggcacctggtaaagaacgtgaatttgtggcagccattagcctcgacggtttgtttaccaactatgccgattctgttcgtggtcgcttcagcatttcagcagattctgcgaagaataccgtgtacttacagatgaactcactgaaacctgaggataccgccgtttattattgtgcggcaatgcctttttttgactattggggtcagggcacacaagtcacggtctcaagcggcggaagctctggtgaacagaaactgatttcagaagccaa

SEQ ID NO: 1231 - protein, 7 aa, Artificial Sequence
  Synthetic
DCHVLWR

SEQ ID NO: 1232 - protein, 5 aa, Artificial Sequence
  Synthetic
LDGLF

SEQ ID NO: 1233 - protein, 6 aa, Artificial Sequence
  Synthetic
LPATSG

SEQ ID NO: 1234 - protein, 117 aa, Artificial Sequence
  Synthetic
EVQLVESGGGLVHAGDRLRLSCAASGDCHVLWRMGWFRQAPGKEREFVAAISLDGLFTNYADSVRGRFSISADSAKNTVYLQMNSLKPEDTAVYYCAALPATSGDYWGQGTQVTVSS

SEQ ID NO: 1235 - DNA, 409 bp, Artificial Sequence
  Synthetic
gaaggagatataccatggaagttcaactggttgaatctggtggcggtttagttcacgccggtgatcgccttcgtctgagctgcgccgcaagcggagattgtcacgttctctggcgtatgggttggtttcgccaggcacctggtaaagaacgtgaatttgtggcagccattagcctcgacggtttgtttaccaactatgccgattctgttcgtggtcgcttcagcatttcggcagattctgcgaagaataccgtgtacttacagatgaactcactgaaacctgaggataccgccgtttattattgtgcggcattgccggcgacttctggcgactattggggtcagggcacacaagtcacggtctcaagcggcggaagctctggtgaacagaaactgatttcagaagccaa

SEQ ID NO: 1236 - protein, 7 aa, Artificial Sequence
  Synthetic
DCHVLWR

SEQ ID NO: 1237 - protein, 5 aa, Artificial Sequence
  Synthetic
LDGLF

SEQ ID NO: 1238 - protein, 4 aa, Artificial Sequence
  Synthetic
MPFF

SEQ ID NO: 1239 - protein, 115 aa, Artificial Sequence
  Synthetic
EVQLVESGGGLVQAGDSLRLSCAASGDCHVLWRMGWFRQAPAKEREFVAAISLDGLFTNYADSVRGRFSISADSAKNTVYLQMNSLKPEDTAVYYCAAMPFFDYWGQGTQVTVSS

SEQ ID NO: 1240 - DNA, 396 bp, Artificial Sequence
  Synthetic
atataccatggaagttcaactggttgaatctggtggcggtttagttcaagccggtgatagccttcgtctgagctgcgccgcaagcggagattgtcacgttctctggcgtatgggttggtttcgccaggcacctgctaaagaacgtgaatttgtggcagccattagcctcgacggtttgtttaccaactatgccgattctgttcgtggtcgcttcagcatttcagcagattctgcgaagaataccgtgtacttacagatgaactcactgaaacctgaggataccgccgtttattattgtgcggcaatgcctttttttgactattggggtcagggcacacaagtcacggtctcaagcggcggaagctctggtgaacagaaactgatttcagaagccaa

SEQ ID NO: 1241 - protein, 7 aa, Artificial Sequence
  Synthetic
DCHVLWR

SEQ ID NO: 1242 - protein, 5 aa, Artificial Sequence
  Synthetic
LDGLF

SEQ ID NO: 1243 - protein, 9 aa, Artificial Sequence
  Synthetic
HHFHPGGMD

SEQ ID NO: 1244 - protein, 120 aa, Artificial Sequence
  Synthetic
EVQLVESGGGLVQAGDSLRLSCAASGDCHVLWRMGWFRQAPGKEREFVAAISLDGLFTNYADSVRGRFSISADSAKNTVYLQMNSLKPEDTAVYYCNAHHFHPGGMDDYWGQGTQVAVSS

SEQ ID NO: 1245 - DNA, 409 bp, Artificial Sequence
  Synthetic
ataccatggaagttcaactggttgaatctggtggcggtttagttcaagccggtgatagccttcgtctgagctgcgccgcaagcggagattgtcacgttctctggcgtatgggttggtttcgccaggcacctggtaaagaacgtgaatttgtggcagccattagcctcgacggtttgtttaccaactatgccgattctgttcgtggtcgcttcagcatttcagcagattctgcgaagaataccgtgtacttacagatgaactcactgaaacctgaggataccgccgtttattattgtaatgcacaccattttcatcctggtggtatggatgactattggggtcagggcacacaagtcgcggtctcaagcggcggaagctctggtgaacagaaactgatttcagaagccaa

SEQ ID NO: 1246 - protein, 7 aa, Artificial Sequence
  Synthetic
DCHVLWR

SEQ ID NO: 1247 - protein, 5 aa, Artificial Sequence
  Synthetic
LDGLF

SEQ ID NO: 1248 - protein, 4 aa, Artificial Sequence
  Synthetic
MPFF

SEQ ID NO: 1249 - protein, 115 aa, Artificial Sequence
  Synthetic
EVQLVESGGGLVQAGDSLRLSCAASGDCHVLWRMGWFRQAPGKEREFVAAISLDGLFTNYVDSVRGRFSISADSAKNTVYLQMNSLKPEDTAVYYCAAMPFFDYWGLGTQVTVSS

SEQ ID NO: 1250 - DNA, 400 bp, Artificial Sequence
  Synthetic
ggagatataccatggaagttcaactggttgaatctggtggcggtttagttcaagccggtgatagccttcgtctgagctgcgccgcaagcggagattgtcacgttctctggcgtatgggttggtttcgccaggcacctggtaaagaacgtgaatttgtggcagccattagcctcgacggtttgtttaccaactatgtcgattctgttcgtggtcgcttcagcatttcagcagattctgcgaagaataccgtgtacttacagatgaactcactgaaacctgaggataccgccgtttattattgtgcggcaatgcctttttttgactattggggtctgggcacacaagtcacggtctcaagcggcggaagctctggtgaacagaaactgatttcagaagccaa

SEQ ID NO: 1251 - protein, 7 aa, Artificial Sequence
  Synthetic
DCHVLWR

SEQ ID NO: 1252 - protein, 5 aa, Artificial Sequence
  Synthetic
LDGLF

SEQ ID NO: 1253 - protein, 9 aa, Artificial Sequence
  Synthetic
HHFHPGGMD

SEQ ID NO: 1254 - protein, 120 aa, Artificial Sequence
  Synthetic
EVQLVESGGGLVHAGDSLRLSCAASGDCHVLWRMGWFRQAPGKEREFVAAISLDGLFTNYADSVRGRFSISADSAKNTVYLQMNSLKPEDTAVYYCNAHHFHPGGMDDYWGQGTQVTVSS

SEQ ID NO: 1255 - DNA, 418 bp, Artificial Sequence
  Synthetic
gaaggagatataccatggaagttcaactggttgaatctggtggcggtttagttcacgccggtgatagccttcgtctgagctgcgccgcaagcggagattgtcacgttctctggcgtatgggttggtttcgccaggcacctggtaaagaacgtgaatttgtggcagccattagcctcgacggtttgtttaccaactatgccgattctgttcgtggtcgcttcagcatttcagcagattctgcgaagaataccgtgtacttacagatgaactcactgaaacctgaggataccgccgtttattattgtaatgcacaccattttcatcctggtggtatggatgactattggggtcagggcacacaagtcacggtctcaagcggcggaagctctggtgaacagaaactgatttcagaagccaa

SEQ ID NO: 1256 - protein, 7 aa, Artificial Sequence
  Synthetic
DCHVLWR

SEQ ID NO: 1257 - protein, 5 aa, Artificial Sequence
  Synthetic
LDGLF

SEQ ID NO: 1258 - protein, 4 aa, Artificial Sequence
  Synthetic
IPFF

SEQ ID NO: 1259 - protein, 115 aa, Artificial Sequence
  Synthetic
EVQLVESGGGLVQAGDSLRLSCAASGDCHVLWRMGWFRQAPGKEREFVAAISLDGLFTNYADSVRGRFSISADSAKNTVYLQMNSLKPEDTAVYYCAAIPFFDYWGQGTQVTVSS

SEQ ID NO: 1260 - DNA, 396 bp, Artificial Sequence
  Synthetic
atataccatggaagttcaactggttgaatctggtggcggtttagttcaagccggtgatagccttcgtctgagctgcgccgcaagcggagattgtcacgttctctggcgtatgggttggtttcgccaggcacctggtaaagaacgtgaatttgtggcagccattagcctcgacggtttgtttaccaactatgccgattctgttcgtggtcgcttcagcatttcagcagattctgcgaagaataccgtgtacttacagatgaactcactgaaacctgaggataccgccgtttattattgtgcggcaattcctttttttgactattggggtcagggcacacaagtcacggtctcaagcggcggaagctctggtgaacagaaactgatttcagaagccaa

SEQ ID NO: 1261 - protein, 7 aa, Artificial Sequence
  Synthetic
DCHVLWR

SEQ ID NO: 1262 - protein, 5 aa, Artificial Sequence
  Synthetic
LDGLF

SEQ ID NO: 1263 - protein, 4 aa, Artificial Sequence
  Synthetic
MPFF

SEQ ID NO: 1264 - protein, 115 aa, Artificial Sequence
  Synthetic
EVQLVESGGGLVQAGDSLRLGCAASGDCHVLWRMGWFRQAPGKEREFVAAISLDGLFTNYADSVRGRFSISADSAKNTVYLQMNSLKPEDTAVYYCAAMPFFDYWGQGTQVTVSS

SEQ ID NO: 1265 - DNA, 394 bp, Artificial Sequence
  Synthetic
ataccatggaagttcaactggttgaatctggtggcggtttagttcaagccggtgatagccttcgtttgggctgcgccgcaagcggagattgtcacgttctctggcgtatgggttggtttcgccaggcacctggtaaagaacgtgaatttgtggcagccattagcctcgacggtttgtttaccaactatgccgattctgttcgtggtcgcttcagcatttcagcagattctgcgaagaataccgtgtacttacagatgaactcactgaaacctgaggataccgccgtttattattgtgcggcaatgcctttttttgactattggggtcagggcacacaagtcacggtctcaagcggcggaagctctggtgaacagaaactgatttcagaagccaa

SEQ ID NO: 1266 - protein, 7 aa, Artificial Sequence
  Synthetic
DCHVLWR

SEQ ID NO: 1267 - protein, 5 aa, Artificial Sequence
  Synthetic
LDGLF

SEQ ID NO: 1268 - protein, 6 aa, Artificial Sequence
  Synthetic
LPSVCT

SEQ ID NO: 1269 - protein, 117 aa, Artificial Sequence
  Synthetic
EVQLVESGGGLVQAGDSLRLSCAASGDCHVLWRMGWFRQAPGKEREFVAAISLDGLFTNYADSVRGRFSISADSAKNTVYLQINSLKPEDTAVYYCAALPSVCTDYWVHCTQVTVSS

SEQ ID NO: 1270 - DNA, 409 bp, Artificial Sequence
  Synthetic
gaaggagatataccatggaagttcaactggttgaatctggtggcggtttagttcaagccggtgatagccttcgtctgagctgcgccgcaagcggagattgtcacgttctctggcgtatgggttggtttcgccaggcacctggtaaagaacgtgaatttgtggcagccattagcctcgacggtttgtttaccaactatgccgattctgttcgtggtcgcttcagcatttcagcagattctgcgaagaataccgtgtacttacagattaactcactgaaacctgaggataccgccgtttattattgtgcggcactgcctagtgtgtgtaccgactattgggttcattgcacacaagtcacggtctcaagcggcggaagctctggtgaacagaaactgatttcagaagccaa

SEQ ID NO: 1271 - protein, 7 aa, Artificial Sequence
  Synthetic
DCHVLWR

SEQ ID NO: 1272 - protein, 5 aa, Artificial Sequence
  Synthetic
LDGLF

SEQ ID NO: 1273 - protein, 6 aa, Artificial Sequence
  Synthetic
LPSVCT

SEQ ID NO: 1274 - protein, 117 aa, Artificial Sequence
  Synthetic
EVQLVESGGGLVQAGDSLRLSCAASGDCHVLWRMGWFRQAPGKEREFVAAISLDGLFTNYADSVRGRFSISADSAKNTVYLQMNSLKPEDTAVYYCAALPSVCTDYWGKGTQVTVSS

SEQ ID NO: 1275 - DNA, 398 bp, Artificial Sequence
  Synthetic
accatggaagttcaactggttgaatctggtggcggtttagttcaagccggtgatagccttcgtctgagctgcgccgcaagcggagattgtcacgttctctggcgtatgggctggtttcgccaggcacctggtaaagaacgtgaatttgtggcagccattagcctcgacggtttgtttaccaactatgccgattctgttcgtggtcgcttcagcatttcagcagattctgcgaagaataccgtgtacttacagatgaactcactgaaacctgaggataccgccgtttattattgtgcggcactgcctagtgtgtgtaccgactattgggggaagggcacacaagtcacggtctcaagcggcggaagctctggtgaacagaaaatgatttcagaagccaa

SEQ ID NO: 1276 - protein, 7 aa, Artificial Sequence
  Synthetic
DCHVLWR

SEQ ID NO: 1277 - protein, 5 aa, Artificial Sequence
  Synthetic
LDGLF

SEQ ID NO: 1278 - protein, 4 aa, Artificial Sequence
  Synthetic
MPFF

SEQ ID NO: 1279 - protein, 115 aa, Artificial Sequence
  Synthetic
EVQLVESGGGLVQAGDSLRLSCAASGDCHVLWRMGWFRQAPGKEREFVAAISLDGLFTNYADSVRGRFSISADSAKNTVYFQMNSLKPEDTAVYYCAAMPFFDYWGQGTQVTVSS

SEQ ID NO: 1280 - DNA, 402 bp, Artificial Sequence
  Synthetic
aaggagatataccatggaagttcaactggttgaatctggtggcggtttagttcaagccggtgatagccttcgtctgagctgcgccgcaagcggagattgtcacgttctctggcgtatgggttggtttcgccaggcacctggtaaagaacgtgaatttgtggcagccattagcctcgacggtttgtttaccaactatgccgattctgttcgtggtcgcttcagcatttcagcagattctgcgaagaataccgtgtactttcagatgaactcactgaaacctgaggataccgccgtttattattgtgcggcaatgcctttttttgactattggggtcagggcacacaagtcacggtctcaagcggcggaagctctggtgaacagaaactgatttcagaagccaa

SEQ ID NO: 1281 - protein, 7 aa, Artificial Sequence
  Synthetic
DCHVLWR

SEQ ID NO: 1282 - protein, 5 aa, Artificial Sequence
  Synthetic
LDGLF

SEQ ID NO: 1283 - protein, 6 aa, Artificial Sequence
  Synthetic
LPATSG

SEQ ID NO: 1284 - protein, 117 aa, Artificial Sequence
  Synthetic
EVQLVESGGGLVQAGDSLRLSCAASGDCHVLWRMGWFRQAPGKEREFVAAISLDGLFTNYADSVRGRFSISADSAKNTVYLQINSLKPEDTAVYYCAALPATSGDYWGQGTQVTVSS

SEQ ID NO: 1285 - DNA, 406 bp, Artificial Sequence
  Synthetic
ggagatataccatggaagttcaactggttgaatctggtggcggtttagttcaagccggtgatagccttcgtctgagctgcgccgcaagcggagattgtcacgttctctggcgtatgggttggtttcgccaggcacccggtaaagaacgtgaatttgtggcagccattagcctcgacggtttgtttaccaactatgccgattctgttcgtggtcgcttcagcatttcagcagattctgcgaagaataccgtgtacttacagattaactcactgaaacctgaggataccgccgtttattattgtgcggcattgccggcgacttctggcgactattggggtcagggcacacaagtcacggtctcaagcggcggaagctctggtgaacagaaactgatttcagaagccaa

SEQ ID NO: 1286 - protein, 7 aa, Artificial Sequence
  Synthetic
DCHVLWR

SEQ ID NO: 1287 - protein, 5 aa, Artificial Sequence
  Synthetic
LDGLF

SEQ ID NO: 1288 - protein, 6 aa, Artificial Sequence
  Synthetic
MSQPTL

SEQ ID NO: 1289 - protein, 117 aa, Artificial Sequence
  Synthetic
QVKLQESGGGLVQAGDSLRLSCAASGDCHVLWRMGWFRQAPGKEREFVAAISLDGLFTNYADSVRGRFSISADSAKNTVYLQMNSLKPEDTAVYYCAAMSQPTLDYWGQGTQVTVSS

SEQ ID NO: 1290 - DNA, 407 bp, Artificial Sequence
  Synthetic
aggagatataccatgcaggttaaactgcaagaatctggtggcggtttagttcaagccggtgatagccttcgtctgagctgcgccgcaagcggagattgtcacgttctctggcgtatgggttggtttcgccaggcacctggtaaagaacgtgaatttgtggcagccattagcctcgacggtttgtttaccaactatgccgattctgttcgtggtcgcttcagcatttcagcagattctgcgaagaataccgtgtacttacagatgaactcactgaaacctgaggataccgccgtttattattgtgcggcaatgagtcagcctaccttggactattggggtcagggcacacaagtcacggtctcaagcggcggaagctctggtgaacagaaactgatttcagaagccaa

SEQ ID NO: 1291 - protein, 7 aa, Artificial Sequence
  Synthetic
DCHVLWR

SEQ ID NO: 1292 - protein, 5 aa, Artificial Sequence
  Synthetic
LDGLF

SEQ ID NO: 1293 - protein, 4 aa, Artificial Sequence
  Synthetic
MPFF

SEQ ID NO: 1294 - protein, 115 aa, Artificial Sequence
  Synthetic
EVQLVESGGGLVQAGDSLRLSCAASGDCHVLWRMGWFRRAPGKEREFVAAISLDGLFTNYADSVRGRFSISADSAKNTVYLQMNSLKPEDTAVYYCAAMPFFDYWGQGTQVTVSS

SEQ ID NO: 1295 - DNA, 403 bp, Artificial Sequence
  Synthetic
gaaggagatataccatggaagttcaactggttgaatctggtggcggtttagttcaagccggtgatagccttcgtctgagctgcgccgcaagcggagattgtcacgttctctggcgtatgggttggtttcgccgggcacctggtaaagaacgtgaatttgtggcagccattagcctcgacggtttgtttaccaactatgccgattctgttcgtggtcgcttcagcatttcagcagattctgcgaagaataccgtgtacttacagatgaactcactgaaacctgaggataccgccgtttattattgtgcggcaatgcctttttttgactattggggtcagggcacacaagtcacggtctcaagcggcggaagctctggtgaacagaaactgatttcagaagccaa

SEQ ID NO: 1296 - protein, 7 aa, Artificial Sequence
  Synthetic
DCHVLWR

SEQ ID NO: 1297 - protein, 5 aa, Artificial Sequence
  Synthetic
LDGLF

SEQ ID NO: 1298 - protein, 4 aa, Artificial Sequence
  Synthetic
MPFF

SEQ ID NO: 1299 - protein, 115 aa, Artificial Sequence
  Synthetic
EVQRVESGGGLVKAGDSLSLSCAASGDCHVLWRMGWFRQAPGKEREFVAAISLDGLFTNYADSVRGRFSISADSAKNTVYLQMNSLKPEDTAVYYCAAMPFFDYWGQGTQVTVSS

SEQ ID NO: 1300 - DNA, 400 bp, Artificial Sequence
  Synthetic
ggagatataccatggaagttcaacgggttgaatctggtggcggtttagttaaagccggtgatagccttagtctgagctgcgccgcaagcggagattgtcacgttctctggcgtatgggttggtttcgccaggcacctggtaaagaacgtgaatttgtggcagccattagcctcgacggtttgtttaccaactatgccgattctgttcgtggtcgcttcagcatttcagcagattctgcgaagaataccgtgtacttacagatgaactcactgaaacctgaggataccgccgtttattattgtgcggcaatgcctttttttgactattggggtcagggcacacaagtcacggtctcaagcggcggaagctctggtgaacagaaactgatttcagaagccaa

SEQ ID NO: 1301 - protein, 7 aa, Artificial Sequence
  Synthetic
DCHVLWR

SEQ ID NO: 1302 - protein, 5 aa, Artificial Sequence
  Synthetic
LDGLF

SEQ ID NO: 1303 - protein, 6 aa, Artificial Sequence
  Synthetic
LPATSG

SEQ ID NO: 1304 - protein, 117 aa, Artificial Sequence
  Synthetic
EVQLVESGGGLVQDGDSLRLSCAASGDCHVLWRMGWFRQAPGKEREFVAAISLDGLFTNYADSVRGRFSISADSAKNTVYLQMNSLKPEDTAVYYCAALPATSGDYWGQGTQVTVSS

SEQ ID NO: 1305 - DNA, 402 bp, Artificial Sequence
  Synthetic
atataccatggaagttcaactggttgaatctggtggcggtttagttcaagacggtgatagccttcgtctgagctgcgccgcaagcggagattgtcacgttctctggcgtatgggttggtttcgccaggcacctggtaaagaacgtgaatttgtggcagccattagcctcgacggtttgtttaccaactatgccgattctgttcgtggtcgcttcagcatttcagcagattctgcgaagaataccgtgtacttacagatgaactcactgaaacctgaggataccgccgtttattattgtgcggcattgccggcgacttctggcgactattggggtcagggcacacaagtcacggtctcaagcggcggaagctctggtgaacagaaactgatttcagaagccaa

SEQ ID NO: 1306 - protein, 7 aa, Artificial Sequence
  Synthetic
DCHVLWR

SEQ ID NO: 1307 - protein, 5 aa, Artificial Sequence
  Synthetic
LDGLF

SEQ ID NO: 1308 - protein, 6 aa, Artificial Sequence
  Synthetic
LPATSG

SEQ ID NO: 1309 - protein, 117 aa, Artificial Sequence
  Synthetic
EVQLVESGGGLVQAGDSLRLSCAASGDCHVLWRMGWFRQAPGKEREFVAAISLDGLFTNYVDSVRGRFSISADSAKNTVYLQMNSLKPEDTAVYYCAALPATSGDYWGQGTQGTVSS

SEQ ID NO: 1310 - DNA, 400 bp, Artificial Sequence
  Synthetic
ataccatggaagttcaactggttgaatctggtggcggtttagttcaagccggtgatagccttcgtctgagctgcgccgcaagcggagattgtcacgttctctggcgtatgggttggtttcgccaggcacctggtaaagaacgtgaatttgtggcagccattagcctcgacggtttgtttaccaactatgtcgattctgttcgtggtcgcttcagcatttcagcagattctgcgaagaataccgtgtacttacagatgaactcactgaaacctgaggataccgccgtttattattgtgcggcattgccggcgacttctggcgactattggggtcagggcacacaaggcacggtctcaagcggcggaagctctggtgaacagaaactgatttcagaagccaa

SEQ ID NO: 1311 - protein, 7 aa, Artificial Sequence
  Synthetic
DCHVLWR

SEQ ID NO: 1312 - protein, 5 aa, Artificial Sequence
  Synthetic
LDGLF

SEQ ID NO: 1313 - protein, 4 aa, Artificial Sequence
  Synthetic
MPFF

SEQ ID NO: 1314 - protein, 115 aa, Artificial Sequence
  Synthetic
EVQLVESGGGLVQAGDSLRLSCAASGDCHVLWRMGWFRQAPGKEREFVAAISLDGLFTNYADSVRGRFSISADSTKNTVYLQMNSLKPEDTAVYYCAAMPFFDYWGQGTQGTVSS

SEQ ID NO: 1315 - DNA, 396 bp, Artificial Sequence
  Synthetic
atataccatggaagttcaactggttgaatctggtggcggtttagttcaagccggtgatagccttcgtctgagctgcgccgcaagcggagattgtcacgttctctggcgtatgggttggtttcgccaggcacctggtaaagaacgtgaatttgtggcagccattagcctcgacggtttgtttaccaactatgccgattctgttcgtggtcgcttcagcatttcagcagattctacgaagaataccgtgtacttacagatgaactcactgaaacctgaggataccgccgtttattattgtgcggcaatgcctttttttgactattggggtcagggcacacaaggcacggtctcaagcggcggaagctctggtgaacagaaactgatttcagaagccaa

SEQ ID NO: 1316 - protein, 7 aa, Artificial Sequence
  Synthetic
DCHVLWR

SEQ ID NO: 1317 - protein, 5 aa, Artificial Sequence
  Synthetic
LDGLF

SEQ ID NO: 1318 - protein, 4 aa, Artificial Sequence
  Synthetic
MPFF

SEQ ID NO: 1319 - protein, 115 aa, Artificial Sequence
  Synthetic
QVQLVESGGGLVQAGDSLRLSCAASGDCHVLWRMGWFRQAPGKEREFVAAISLDGLFTNYADSVRGRFSISADSAKNTVYLQMNSLKPEDTAVYYCAAMPFFDYWGQGTQVTVSS

SEQ ID NO: 1320 - DNA, 398 bp, Artificial Sequence
  Synthetic
agatataccatgcaggttcaactggttgaatctggtggcggtttagttcaagccggtgatagccttcgtctgagctgcgccgcaagcggagattgtcacgttctctggcgtatgggttggtttcgccaggcacctggtaaagaacgtgaatttgtggcagccattagcctcgacggtttgtttaccaactatgccgattctgttcgtggtcgcttcagcatttcagcagattctgcgaagaataccgtgtacttacagatgaactcactgaaacctgaggataccgccgtttattattgtgcggcaatgcctttttttgactattggggtcagggcacacaagtcacggtctcaagcggcggaagctctggtgaacagaaactgatttcagaagccaa

SEQ ID NO: 1321 - protein, 7 aa, Artificial Sequence
  Synthetic
DCHVLWR

SEQ ID NO: 1322 - protein, 5 aa, Artificial Sequence
  Synthetic
LDGLF

SEQ ID NO: 1323 - protein, 6 aa, Artificial Sequence
  Synthetic
LPATSG

SEQ ID NO: 1324 - protein, 117 aa, Artificial Sequence
  Synthetic
EVQLVESGGGLVQAGDSLRLSCAASGDCHVLWRMGWFRQAPGKEHEFVAAISLDGLFTNYADSVRGRFSISADSAKNTVYLQMNSLKPEDTAVYYCAALPATSGDYWGQGTQGTVSS

SEQ ID NO: 1325 - DNA, 402 bp, Artificial Sequence
  Synthetic
atataccatggaagttcaactggttgaatctggtggcggtttagttcaagccggtgatagccttcgtctgagctgcgccgcaagcggagattgtcacgttctctggcgtatgggttggtttcgccaggcacctggtaaagaacatgaatttgtggcagccattagcctcgacggtttgtttaccaactatgccgattctgttcgtggtcgcttcagcatttcagcagattctgcgaagaataccgtgtacttacagatgaactcactgaaacctgaggataccgccgtttattattgtgcggcattgccggcgacttctggcgactattggggtcagggcacacaaggcacggtctcaagcggcggaagctctggtgaacagaaactgatttcagaagccaa

SEQ ID NO: 1326 - protein, 7 aa, Artificial Sequence
  Synthetic
DCHVLWR

SEQ ID NO: 1327 - protein, 5 aa, Artificial Sequence
  Synthetic
LDGLF

SEQ ID NO: 1328 - protein, 6 aa, Artificial Sequence
  Synthetic
LPSVCS

SEQ ID NO: 1329 - protein, 117 aa, Artificial Sequence
  Synthetic
EVQLVESGGGLVQAGDSLRLSCDASGDCHVLWRMGWFRQAPGKEREFVAAISLDGLFTNYADSVRGRFSISADSAKNTVYLQMNSLKPEDTAVYYCAALPSVCSDYWGQGTQDTVSS

SEQ ID NO: 1330 - DNA, 400 bp, Artificial Sequence
  Synthetic
ataccatggaagttcaactggttgaatctggtggcggtttagttcaagccggtgatagccttcgtctgagctgcgacgcaagcggagattgtcacgttctctggcgtatgggttggtttcgccaggcacctggtaaagaacgtgaatttgtggcagccattagcctcgacggtttgtttaccaactatgccgattctgttcgtggtcgcttcagcatttcagcagattctgcgaagaataccgtgtacttacagatgaactcactgaaacctgaggataccgccgtttattattgtgcggcactgcctagtgtgtgttccgactattgggggcagggcacacaagacacggtctcaagcggcggaagctctggtgaacacaaactgatttcagaagccaa

SEQ ID NO: 1331 - protein, 7 aa, Artificial Sequence
  Synthetic
DCHVLWR

SEQ ID NO: 1332 - protein, 5 aa, Artificial Sequence
  Synthetic
LDGLF

SEQ ID NO: 1333 - protein, 4 aa, Artificial Sequence
  Synthetic
MPFF

SEQ ID NO: 1334 - protein, 115 aa, Artificial Sequence
  Synthetic
EVQLVESGGGLVKAGDSLRLSCAASGDCHVLWRMGWFRQAPGKEREFVAAISLDGLFTNYADSVRGRFSISADSAKNTVYLQMNSLKPEDTAVYYCAAMPFFDYWGQGTQGTVSS

SEQ ID NO: 1335 - DNA, 401 bp, Artificial Sequence
  Synthetic
aggagatataccatggaagttcaactggttgaatctggtggcggtttagttaaagccggtgatagccttcgtctgagctgcgccgcaagcggagattgtcacgttctctggcgtatgggttggtttcgccaggcacctggtaaagaacgtgaatttgtggcagccattagcctcgacggtttgtttaccaactatgccgattctgttcgtggtcgcttcagcatttcagcagattctgcgaagaataccgtgtacttacagatgaactcactgaaacctgaggataccgccgtttattattgtgcggcaatgcctttttttgactattggggtcagggcacacaaggcacggtctcaagcggcggaagctctggtgaacagaaactgatttcagaagccaa

SEQ ID NO: 1336 - protein, 7 aa, Artificial Sequence
  Synthetic
DCHVLWR

SEQ ID NO: 1337 - protein, 5 aa, Artificial Sequence
  Synthetic
LDGLF

SEQ ID NO: 1338 - protein, 6 aa, Artificial Sequence
  Synthetic
LPATSG

SEQ ID NO: 1339 - protein, 117 aa, Artificial Sequence
  Synthetic
EVQLVESGGGLVQAGDSLRLSCAASGDCHVLWRMGWFRQAPGKEREFVAAISLDGLFTNYADTVRGRFSISADSAKNTVYLQMNSLKPEDTAVYYCAALPATSGDYWGQGTQGPVSS

SEQ ID NO: 1340 - DNA, 400 bp, Artificial Sequence
  Synthetic
ataccatggaagttcaactggttgaatctggtggcggtttagttcaagccggtgatagccttcgtctgagctgcgccgcaagcggagattgtcacgttctctggcgtatgggttggtttcgccaggcacctggtaaagaacgtgaatttgtggcagccattagcctcgacggtttgtttaccaactatgccgatactgttcgtggtcgcttcagcatttcagcagattctgcgaagaataccgtgtacttacagatgaactcactgaaacctgaggataccgccgtttattattgtgcggcattgccggcgacttctggcgactattggggtcagggcacacaaggcccggtctcaagcggcggaagccctggtgaacagaaactgatttcagaagccaa

SEQ ID NO: 1341 - protein, 7 aa, Artificial Sequence
  Synthetic
DCHVLWR

SEQ ID NO: 1342 - protein, 5 aa, Artificial Sequence
  Synthetic
LDGLF

SEQ ID NO: 1343 - protein, 4 aa, Artificial Sequence
  Synthetic
MPFF

SEQ ID NO: 1344 - protein, 115 aa, Artificial Sequence
  Synthetic
EVQLVESGGGLVQAGDSLRLSCAASGDCHVLWRMGWFRQAPGKEREFVAAISLDGLFTNYADSVRGRFSISADSAKNTVYLQMNSLKPKDTAVYYCAAMPFFDYWGQGTQVTVSS

SEQ ID NO: 1345 - DNA, 403 bp, Artificial Sequence
  Synthetic
gaaggagatataccatggaagttcaactggttgaatctggtggcggtttagttcaagccggtgatagccttcgtctgagttgcgccgcaagcggagattgtcacgttctctggcgtatgggttggtttcgccaggcacctggtaaagaacgtgaatttgtggcagccattagcctcgacggtttgtttaccaactatgccgattctgttcgtggtcgcttcagcatttcagcagattctgcgaagaataccgtgtacttacagatgaactcactgaaacctaaggataccgccgtttattattgtgcggcaatgcctttttttgactattggggtcagggcacacaagtcacggtctcaagcggcggaagctctggtgaacagaaactgatttcagaagccaa

SEQ ID NO: 1346 - protein, 7 aa, Artificial Sequence
  Synthetic
DCHVLWR

SEQ ID NO: 1347 - protein, 5 aa, Artificial Sequence
  Synthetic
LDGLF

SEQ ID NO: 1348 - protein, 6 aa, Artificial Sequence
  Synthetic
LPKRTV

SEQ ID NO: 1349 - protein, 117 aa, Artificial Sequence
  Synthetic
QVQLVESGGALVQAGDSLRLSCAASGDCHVLWRMGWFRQAPGKEREFVAAISLDGLFTNYADSVRGRFSISADSAKNTVYLQMNSLKPEDTAVYYCAALPKRTVDYWGQGTQGTVSS

SEQ ID NO: 1350 - DNA, 402 bp, Artificial Sequence
  Synthetic
atataccatgcaggttcaactggttgaatctggtggcgcattagttcaagccggtgatagccttcgtctgagctgcgccgcaagcggagattgtcacgttctctggcgtatgggttggtttcgccaggcacctggtaaagaacgtgaatttgtggcagccattagcctcgacggtttgtttaccaactatgccgattctgttcgtggtcgcttcagcatttcagcagattctgcgaagaataccgtgtacttacagatgaactcactgaaacctgaggataccgccgtttattattgtgcggcactgcctaagcggactgtggactattggggtcagggcacacaaggcacggtctcaagcggcggaagctctggtgaacagaaactgatttcagaagccaa

SEQ ID NO: 1351 - protein, 7 aa, Artificial Sequence
  Synthetic
DCHVLWR

SEQ ID NO: 1352 - protein, 5 aa, Artificial Sequence
  Synthetic
LDGLF

SEQ ID NO: 1353 - protein, 6 aa, Artificial Sequence
  Synthetic
LPKRTV

SEQ ID NO: 1354 - protein, 117 aa, Artificial Sequence
  Synthetic
QVQLVESGGALVQAGDSLRLSCAASGDCHVLWRMGWFRQAPGKEREFVAAISLDGLFINYADSVRGRFSISADSAKNTVYLQMNSLKPEDTAVYYCAALPKRTVDYWGQGTQVTVSS

SEQ ID NO: 1355 - DNA, 398 bp, Artificial Sequence
  Synthetic
accatgcaggttcaactggttgaatctggtggcgcattagttcaagccggtgatagccttcgtctgagctgcgccgcaagcggagattgtcacgttctctggcgtatgggttggtttcgccaggcacctggtaaagaacgtgaatttgtggcagccattagcctcgacggtttgtttatcaactatgccgattctgttcgtggtcgcttcagcatttcagcagattctgcgaagaataccgtgtacttacagatgaactcactgaaacctgaggataccgccgtttattattgtgcggcactgcctaagcggactgtggactattggggtcagggcacacaagtcacggtctcaagcggcggaagctctggtgaacagaaactgatttcagaagccaa

SEQ ID NO: 1356 - protein, 7 aa, Artificial Sequence
  Synthetic
DCHVLWR

SEQ ID NO: 1357 - protein, 5 aa, Artificial Sequence
  Synthetic
LDGLF

SEQ ID NO: 1358 - protein, 4 aa, Artificial Sequence
  Synthetic
MPFF

SEQ ID NO: 1359 - protein, 115 aa, Artificial Sequence
  Synthetic
EVQLVESGGGLVQAGDGLRLSCAASGDCHVLWRMGWFRQAPGKEREFVAAISLDGLFTNYADSVRGRFSISADSAKNTVYLQMNSLKPEDTAVYYCAAMPFFDYWGQGTQVTVSS

SEQ ID NO: 1360 - DNA, 394 bp, Artificial Sequence
  Synthetic
ataccatggaagttcaactggttgaatctggtggcggtttagttcaagccggtgatggccttcgtctgagctgcgccgcaagcggagattgtcacgttctctggcgtatgggttggtttcgccaggcacctggtaaagaacgtgaatttgtggcagccattagcctcgacggtttgtttaccaactatgccgattctgttcgtggtcgcttcagcatttcagcagattctgcgaagaataccgtgtacttacagatgaactcactgaaacctgaggataccgccgtttattattgtgcggcaatgcctttttttgactattggggtcagggcacacaagtcacggtctcaagcggcggaagctctggtgaacagaaactgatttcagaagccaa

SEQ ID NO: 1361 - protein, 7 aa, Artificial Sequence
  Synthetic
DCHVLWR

SEQ ID NO: 1362 - protein, 5 aa, Artificial Sequence
  Synthetic
LDGLF

SEQ ID NO: 1363 - protein, 9 aa, Artificial Sequence
  Synthetic
HHFHPGGMD

SEQ ID NO: 1364 - protein, 120 aa, Artificial Sequence
  Synthetic
EVLLVESGGGLVQAGDSLRLSCAASGDCHVLWRMGWFRQAPGKEREFVAAISLDGLFTNYADSVRGRFSISADSAKNTVYLQMNSLKPEDTAVYYCNAHHFHPGGMDDYWGQGTQVTVSS

SEQ ID NO: 1365 - DNA, 418 bp, Artificial Sequence
  Synthetic
gaaggagatataccatggaagttctactggttgaatctggtggcggtttagttcaagccggtgatagccttcgtctgagctgcgccgcaagcggagattgtcacgttctctggcgtatgggttggtttcgccaggcacctggtaaagaacgtgaatttgtggcagccattagcctcgacggtttgtttaccaactatgccgattctgttcgtggtcgcttcagcatttcagcagattctgcgaagaataccgtgtacttacagatgaactcactgaaacctgaggataccgccgtttattattgtaatgcacaccattttcatcctggtggtatggatgactattggggtcagggcacacaagtcacggtctcaagcggcggaagctctggtgaacagaaactgatttcagaagccaa

SEQ ID NO: 1366 - protein, 7 aa, Artificial Sequence
  Synthetic
DCHVLWR

SEQ ID NO: 1367 - protein, 5 aa, Artificial Sequence
  Synthetic
LDGLF

SEQ ID NO: 1368 - protein, 4 aa, Artificial Sequence
  Synthetic
MPFF

SEQ ID NO: 1369 - protein, 115 aa, Artificial Sequence
  Synthetic
EVQLVESGGGLVQAGDSLRLSCAASGDCHVLWRMGWFRQAPGKEREFVAAISLDGLFTNYADSVRGRFSISADSAKNTVYLQMNSLKPENTAVYYCAAMPFFDYWGQGTQVTVSS

SEQ ID NO: 1370 - DNA, 400 bp, Artificial Sequence
  Synthetic
ggagatataccatggaagttcaactggttgaatctggtggcggtttagttcaagccggtgatagccttcgtctgagctgcgccgcaagcggagattgtcacgttctctggcgtatgggttggtttcgccaggcacctggtaaagaacgtgaatttgtggcagccattagcctcgacggtttgtttaccaactatgccgattctgttcgtggtcgcttcagcatttcagcagattctgcgaagaataccgtgtacttacagatgaactcactgaaacctgagaataccgccgtttattattgtgcggcaatgcctttttttgactattggggtcagggcacacaagtcacggtctcaagcggcggaagctctggtgaacagaaactgatttcagaagccaa

SEQ ID NO: 1371 - protein, 7 aa, Artificial Sequence
  Synthetic
DCHVLWR

SEQ ID NO: 1372 - protein, 5 aa, Artificial Sequence
  Synthetic
LDGLF

SEQ ID NO: 1373 - protein, 6 aa, Artificial Sequence
  Synthetic
LPSVCI

SEQ ID NO: 1374 - protein, 117 aa, Artificial Sequence
  Synthetic
EVQLVESGGGLVQAGDSLRLSCAASGDCHVLWRMGWFRQAPGKEREFVAAISLDGLFTNYADSVRGRFSISADSAKNTVYLQMNSLKPEDTAVYYCAALPSVCIDYWGQGTQVTVSS

SEQ ID NO: 1375 - DNA, 400 bp, Artificial Sequence
  Synthetic
ataccatggaagttcaactggttgaatctggtggcggtttagttcaagccggtgatagccttcgtctgagctgcgccgcaagcggagattgtcacgttctctggcgtatgggttggtttcgccaggcacctggtaaagaacgtgaatttgtggcagccattagcctcgacggtttgtttaccaactatgccgattctgttcgtggtcgcttcagcatttcagcagattctgcgaagaataccgtgtacttacagatgaactcactgaaacctgaggataccgccgtttattattgtgcggcactgcctagtgtgtgtatcgactattggggtcagggcacacaagtcacggtctcaagcggcggaagctctggtgaacagaaactgatttcagaagccaa

SEQ ID NO: 1376 - protein, 7 aa, Artificial Sequence
  Synthetic
DCHVLWR

SEQ ID NO: 1377 - protein, 5 aa, Artificial Sequence
  Synthetic
LDGLF

SEQ ID NO: 1378 - protein, 4 aa, Artificial Sequence
  Synthetic
MPFF

SEQ ID NO: 1379 - protein, 115 aa, Artificial Sequence
  Synthetic
EVQLVESGGGLVQAGDSLRLSCAASGDCHVLWRMGWFRQAPGKEREFVAAISLDGLFTNYADSVRGRFSISADSAKNTVYLQMNSLKPEDTAVYYCAAMPFFYYWGQGTQVTVSS

SEQ ID NO: 1380 - DNA, 403 bp, Artificial Sequence
  Synthetic
gaaggagatataccatggaagttcaactggttgaatctggtggcggtttagttcaagccggtgatagccttcgtctgagctgcgccgcaagcggagattgtcacgttctctggcgtatgggttggtttcgccaggcacctggtaaagaacgtgaatttgtggcagccattagcctcgacggtttgtttaccaactatgccgattctgttcgtggtcgcttcagcatttcagcagattctgcgaagaataccgtgtacttacagatgaactcactgaaacctgaggataccgccgtttattattgtgcggcaatgccttttttttactattggggtcagggcacacaagtcacggtctcaagcggcggaagctctggtgaacagaaactgatttcagaagccaa

SEQ ID NO: 1381 - protein, 7 aa, Artificial Sequence
  Synthetic
DCHVLWR

SEQ ID NO: 1382 - protein, 5 aa, Artificial Sequence
  Synthetic
LDGLF

SEQ ID NO: 1383 - protein, 9 aa, Artificial Sequence
  Synthetic
HHFHPGGMD

SEQ ID NO: 1384 - protein, 120 aa, Artificial Sequence
  Synthetic
EVQLVESGGGLVQAGDSLRLSCAASGDCHVLWRMGWFRQAPGKEREFVAAISLDGLFTNYADSVRGRFSFSADSAKNTVYLQMNSLKPEDTAVYYCNAHHFHPGGMDDYWGQGTQVTVSS

SEQ ID NO: 1385 - DNA, 407 bp, Artificial Sequence
  Synthetic
accatggaagttcaactggttgaatctggtggcggtttagttcaagccggtgatagccttcgtctgagctgcgccgcaagcggagattgtcacgttctctggcgtatgggttggtttcgccaggcacctggtaaagaacgtgaatttgtggcagccattagcctcgacggtttgtttaccaactatgccgattctgttcgtggtcgcttcagcttttcagcagattctgcgaagaataccgtgtacttacagatgaactcactgaaacctgaggataccgccgtttattattgtaatgcacaccattttcatcctggtggtatggatgactattggggtcagggcacacaagtcacggtctcaagcggcggaagctctggtgaacagaaactgatttcagaagccaa

SEQ ID NO: 1386 - protein, 7 aa, Artificial Sequence
  Synthetic
DCHVLWR

SEQ ID NO: 1387 - protein, 5 aa, Artificial Sequence
  Synthetic
LDGLF

SEQ ID NO: 1388 - protein, 9 aa, Artificial Sequence
  Synthetic
HHFHPGGMD

SEQ ID NO: 1389 - protein, 120 aa, Artificial Sequence
  Synthetic
EVQLVESGGGLVHAGDRLRLSCAASGDCHVLWRMGWFRQAPGKEREFVAAISLDGLFTNYADSVRGRFSISADSAKNTVYLQMNSLKPEDTAVYYCNAHHFHPGGMDDYWGQGTQVTVSS

SEQ ID NO: 1390 - DNA, 418 bp, Artificial Sequence
  Synthetic
gaaggagatataccatggaagttcaactggttgaatctggtggcggtttagttcacgccggtgatcgccttcgtctgagctgcgccgcaagcggagattgtcacgttctctggcgtatgggttggtttcgccaggcacctggtaaagaacgtgaatttgtggcagccattagcctcgacggtttgtttaccaactatgccgattctgttcgtggtcgcttcagcatttcagcagattctgcgaagaataccgtgtacttacagatgaactcactgaaacctgaggataccgccgtttattattgtaatgcacaccattttcatcctggtggtatggatgactattggggtcagggcacacaagtcacggtctcaagcggcggaagctctggtgaacagaaactgatttcagaagccaa

SEQ ID NO: 1391 - protein, 7 aa, Artificial Sequence
  Synthetic
DCHVLWR

SEQ ID NO: 1392 - protein, 5 aa, Artificial Sequence
  Synthetic
LDGLF

SEQ ID NO: 1393 - protein, 4 aa, Artificial Sequence
  Synthetic
MPFF

SEQ ID NO: 1394 - protein, 115 aa, Artificial Sequence
  Synthetic
EVQLVESGGGLVQAGDSLSLSCAASGDCHVLWRMGWFRQAPGKEREFVAAISLDGLFTNYADSVRGRFSISADSAKNTVYLQMNSLKPEDTAVYYCAAMPFFDYWGQGTQVTVSS

SEQ ID NO: 1395 - DNA, 400 bp, Artificial Sequence
  Synthetic
ggagatataccatggaagttcaactggttgaatctggtggcggtttagttcaagccggtgatagccttagtctgagctgcgccgcaagcggagattgtcacgttctctggcgtatgggttggtttcgccaggcacctggtaaagaacgtgaatttgtggcagccattagcctcgacggtttgtttaccaactatgccgattctgttcgtggtcgcttcagcatttcagcagattctgcgaagaataccgtgtacttacagatgaactcactgaaacctgaggataccgccgtttattattgtgcggcaatgcctttttttgactattggggtcagggcacacaagtcacggtctcaagcggcggaagctctggtgaacagaaactgatttcagaagccaa

SEQ ID NO: 1396 - protein, 7 aa, Artificial Sequence
  Synthetic
DCHVLWR

SEQ ID NO: 1397 - protein, 5 aa, Artificial Sequence
  Synthetic
LDGLF

SEQ ID NO: 1398 - protein, 4 aa, Artificial Sequence
  Synthetic
MPFF

SEQ ID NO: 1399 - protein, 115 aa, Artificial Sequence
  Synthetic
EVQLVESGGGLVQAGDSLRLSCAASGDCHVLWRMGWFRQAPGKEREFVAAISLDGLFTNYADSVRGRFSISADSAKNTVYLQMNSLKPEDTAVYYCAAMPFFDYWGHGTQVTVSS

SEQ ID NO: 1400 - DNA, 394 bp, Artificial Sequence
  Synthetic
ataccatggaagttcaactggttgaatctggtggcggtttagttcaagccggtgatagccttcgtctgagctgcgccgcaagcggagattgtcacgttctctggcgtatgggttggtttcgccaggcacctggtaaagaacgtgaatttgtggcagccattagcctcgacggtttgtttaccaactatgccgattctgttcgtggtcgcttcagcatttcagcagattctgcgaagaataccgtgtacttacagatgaactcactgaaacctgaggataccgccgtttattattgtgcggcaatgcctttttttgactattgggggcatggcacacaagtcacggtctcaagcggcggaagctctggtgaacagaaactgatttcagaagccaa

SEQ ID NO: 1401 - protein, 7 aa, Artificial Sequence
  Synthetic
DCHVLWR

SEQ ID NO: 1402 - protein, 5 aa, Artificial Sequence
  Synthetic
LDGLF

SEQ ID NO: 1403 - protein, 9 aa, Artificial Sequence
  Synthetic
HHFHPGGMD

SEQ ID NO: 1404 - protein, 120 aa, Artificial Sequence
  Synthetic
EVQLVQSGGGLVQAGDSLRLSCAASGDCHVLWRMGWFRQAPGKEREFVAAISLDGLFTNYADSVRGRFSISADSAKNTVYLQMNSLKPEDTAVYYCNAHHFHPGGMDDYWGQGTQVTVSS

SEQ ID NO: 1405 - DNA, 418 bp, Artificial Sequence
  Synthetic
gaaggagatataccatggaagttcaactggttcaatctggtggcggtttagttcaagccggtgatagccttcgtctgagctgcgccgcaagcggagattgtcacgttctctggcgtatgggttggtttcgccaggcacctggtaaagaacgtgaatttgtggcagccattagcctcgacggtttgtttaccaactatgccgattctgttcgtggtcgcttcagcatttcagcagattctgcgaagaataccgtgtacttacagatgaactcactgaaacctgaggataccgccgtttattattgtaatgcacaccattttcatcctggtggtatggatgactattggggtcagggcacacaagtcacggtctcaagcggcggaagctctggtgaacagaaactgatttcagaagccaa

SEQ ID NO: 1406 - protein, 7 aa, Artificial Sequence
  Synthetic
DCHVLWR

SEQ ID NO: 1407 - protein, 5 aa, Artificial Sequence
  Synthetic
LDGLF

SEQ ID NO: 1408 - protein, 4 aa, Artificial Sequence
  Synthetic
MPFF

SEQ ID NO: 1409 - protein, 115 aa, Artificial Sequence
  Synthetic
EVQLVESGGGLVQAGDSLRLSCAASGDCHVLWRMGWFRQAPGKEREFVAAISLDGLFTNYADSVRGRFSISTDSAKNTVYLQMNSLKPEDTAVYYCAAMPFFDYWGQGTQVTVSS

SEQ ID NO: 1410 - DNA, 400 bp, Artificial Sequence
  Synthetic
ggagatataccatggaagttcaactggttgaatctggtggcggtttagttcaagccggtgatagccttcgtctgagctgcgccgcaagcggagattgtcacgttctctggcgtatgggttggtttcgccaggcacctggtaaagaacgtgaatttgtggcagccattagcctcgacggtttgtttaccaactatgccgattctgttcgtggtcgcttcagcatttcaacagattctgcgaagaataccgtgtacttacagatgaactcactgaaacctgaggataccgccgtttattattgtgcggcaatgcctttttttgactattggggtcagggcacacaagtcacggtctcaagcggcggaagctctggtgaacagaaactgatttcagaagccaa

SEQ ID NO: 1411 - protein, 7 aa, Artificial Sequence
  Synthetic
DCHVLWR

SEQ ID NO: 1412 - protein, 5 aa, Artificial Sequence
  Synthetic
LDGLF

SEQ ID NO: 1413 - protein, 4 aa, Artificial Sequence
  Synthetic
MPFF

SEQ ID NO: 1414 - protein, 115 aa, Artificial Sequence
  Synthetic
EVQLVESGGGSVQAGDSLRLSCAASGDCHVLWRMGWFRQAPGKEREFVAAISLDGLFTNYADSVRGRFSISADSAKNTVYLQMNSLKPEDTAVYYCAAMPFFDYWGQGTQVTVSS

SEQ ID NO: 1415 - DNA, 400 bp, Artificial Sequence
  Synthetic
ggagatataccatggaagttcaactggttgaatctggtggcggttcagttcaagccggtgatagccttcgtctgagctgcgccgcaagcggagattgtcacgttctctggcgtatgggttggtttcgccaggcacctggtaaagaacgtgaatttgtggcagccattagcctcgacggtttgtttaccaactatgccgattctgttcgtggtcgcttcagcatttcagcagattctgcgaagaataccgtgtacttacagatgaactcactgaaacctgaggataccgccgtttattattgtgcggcaatgcctttttttgactattggggtcagggcacacaagtcacggtctcaagcggcggaagctctggtgaacagaaactgatttcagaagccaa

SEQ ID NO: 1416 - protein, 7 aa, Artificial Sequence
  Synthetic
DCHVLWR

SEQ ID NO: 1417 - protein, 5 aa, Artificial Sequence
  Synthetic
LDGLF

SEQ ID NO: 1418 - protein, 6 aa, Artificial Sequence
  Synthetic
LIPRPT

SEQ ID NO: 1419 - protein, 117 aa, Artificial Sequence
  Synthetic
EVQLVESGGGLVQAGDSLRLSCAASGDCHVLWRMGWFRQAPGKEREFVAAISLDGLFTNYADSVRGRFSISADSAKNTVYLQMNSLKPEDTAVYYCAALIPRPTDYWGQCTQVTVSS

SEQ ID NO: 1420 - DNA, 408 bp, Artificial Sequence
  Synthetic
aaggagatataccatggaagttcaactggttgaatctggtggcggtttagttcaagccggtgatagccttcgtctgagctgcgccgcaagcggagattgtcacgttctctggcgtatgggttggtttcgccaggcacctggtaaagaacgtgaatttgtggcagccattagcctcgacggtttgtttaccaactatgccgattctgttcgtggtcgcttcagcatttcagcagattctgcgaagaataccgtgtacttacagatgaactcactgaaacctgaggataccgccgtttattattgtgcggcacttatcccgcgtccgaccgactattggggtcagtgcacacaagtcacggtctcaagcggcggaagctctggtgaacagaaactgatttcagaagccaa

SEQ ID NO: 1421 - protein, 7 aa, Artificial Sequence
  Synthetic
DYCMDCF

SEQ ID NO: 1422 - protein, 5 aa, Artificial Sequence
  Synthetic
PYSFK

SEQ ID NO: 1423 - protein, 10 aa, Artificial Sequence
  Synthetic
PLNIGTATIA

SEQ ID NO: 1424 - protein, 121 aa, Artificial Sequence
  Synthetic
EVQLVESGGGLVKAGDSLRLSCAASGDYCMDCFMGWFRQAPGKEREFVAAITPYSFKTYYADSVKGRFTISRDDARNTVYLQMNSLKPEDTAVYYCAAPLNIGTATIAAYWGQGTQVTVSS

SEQ ID NO: 1425 - DNA, 415 bp, Artificial Sequence
  Synthetic
aggagatataccatggaagttcaactggttgaatctggtggcggtttagttaaagccggtgatagccttcgtctgagctgcgccgcaagcggagattactgcatggattgctttatgggttggtttcgccaggcacctggtaaagaacgtgaatttgtggcagccattaccccctattcctttaagacctactatgccgattctgttaaaggtcgcttcactatttcacgcgatgatgcgcgtaataccgtgtacttacagatgaactcactgaaacctgaggataccgccgtttattattgtgcggcacccctcaatatcggcaccgcgacgattgccgcctattggggtcagggcacacaagtcacggtctcaagcggcggaagctctggtgaacagaaactgatttcagaag

SEQ ID NO: 1426 - protein, 7 aa, Artificial Sequence
  Synthetic
DYCMDCF

SEQ ID NO: 1427 - protein, 5 aa, Artificial Sequence
  Synthetic
PYSFK

SEQ ID NO: 1428 - protein, 10 aa, Artificial Sequence
  Synthetic
NPLDPNWTNS

SEQ ID NO: 1429 - protein, 121 aa, Artificial Sequence
  Synthetic
EVQLVESGGGLVQAGDSLRLSCAASGDYCMDCFMGWFRQAPGKEREFVAAITPYSFKTYYADSVKGRFTISRDDARNTVYLQMNSLKPEDTAVYYCAANPLDPNWTNSDYWGQGTQVTVSS

SEQ ID NO: 1430 - DNA, 414 bp, Artificial Sequence
  Synthetic
ggagatataccatggaagttcaactggttgaatctggtggcggtttagttcaagccggtgatagccttcgtctgagctgcgccgcaagcggagattactgcatggattgctttatgggttggtttcgccaggcacctggtaaagaacgtgaatttgtggcagccattaccccctattcctttaagacctactatgccgattctgttaaaggtcgcttcactatttcacgcgatgatgcgcgtaataccgtgtacttacagatgaactcactgaaacctgaggataccgccgtttattattgtgcggcaaaccctctggaccccaactggactaattctgactattggggtcagggcacacaagtcacggtctcaagcggcggaagctctggtgaacagaaactgatttcagaag

SEQ ID NO: 1431 - protein, 7 aa, Artificial Sequence
  Synthetic
DYCMDCF

SEQ ID NO: 1432 - protein, 5 aa, Artificial Sequence
  Synthetic
PYSFK

SEQ ID NO: 1433 - protein, 10 aa, Artificial Sequence
  Synthetic
DSLILANSQW

SEQ ID NO: 1434 - protein, 121 aa, Artificial Sequence
  Synthetic
EVQLVESGGGLVQAGDSLRLSCAASGDYCMDCFMGWFRQAPGKEREFVAAITPYSFKTYYADSVKGRFTISRDDARNTVYLQMNSLKPEDTAVYYCAADSLILANSQWDYWGQGTQVTVSS

SEQ ID NO: 1435 - DNA, 412 bp, Artificial Sequence
  Synthetic
agatataccatggaagttcaactggttgaatctggtggcggtttagttcaagccggtgatagccttcgtctgagctgcgccgcaagcggagattactgcatggattgctttatgggttggtttcgccaggcacctggtaaagaacgtgaatttgtggcagccattaccccctattcctttaagacctactatgccgattctgttaaaggtcgcttcactatttcacgcgatgatgcgcgtaataccgtgtacttacagatgaactcactgaaacctgaggataccgccgtttattattgtgcggcagacagccttattttggctaattctcagtgggactattggggtcagggcacacaagtcacggtctcaagcggcggaagctctggtgaacagaaactgatttcagaag

SEQ ID NO: 1436 - protein, 7 aa, Artificial Sequence
  Synthetic
DYCMDCF

SEQ ID NO: 1437 - protein, 5 aa, Artificial Sequence
  Synthetic
PYSFK

SEQ ID NO: 1438 - protein, 10 aa, Artificial Sequence
  Synthetic
VPNVTWSERA

SEQ ID NO: 1439 - protein, 121 aa, Artificial Sequence
  Synthetic
EVQLFESGGGLVQAGDSLRLSCAASGDYCMDCFMGWFRQAPGKEREFVAAITPYSFKTYYADSVKGRFTISRDDARNTVYLQMNSLKPEDTAVYYCAAVPNVTWSERADYWGQGTQVTVSS

SEQ ID NO: 1440 - DNA, 412 bp, Artificial Sequence
  Synthetic
agatataccatggaagttcaactgtttgaatctggtggcggtttagttcaagccggtgatagccttcgtctgagctgcgccgcaagcggagattactgcatggattgctttatgggttggtttcgccaggcacctggtaaagaacgtgaatttgtggcagccattaccccctattcctttaagacctactatgccgattctgttaaaggtcgcttcactatttcacgcgatgatgcgcgtaataccgtgtacttacagatgaactcactgaaacctgaggataccgccgtttattattgtgcggcagtccccaatgtgacctggtccgagagggctgactattggggtcagggcacacaagtcacggtctcaagcggcggaagctctggtgaacagaaactgatttcagaag

SEQ ID NO: 1441 - protein, 7 aa, Artificial Sequence
  Synthetic
DYCMDCF

SEQ ID NO: 1442 - protein, 5 aa, Artificial Sequence
  Synthetic
PYSFK

SEQ ID NO: 1443 - protein, 10 aa, Artificial Sequence
  Synthetic
PLNIGTATIA

SEQ ID NO: 1444 - protein, 121 aa, Artificial Sequence
  Synthetic
EVQLVESGGGLVQAGDSLRLSCAASGDYCMDCFMGWFRQAPGKEREFVAAITPYSFKTYYADSVKGRFTISRDDARNTVYLQMNSLKPEDTAVYYCAAPLNIGTATIADYWGQGTQVTVSS

SEQ ID NO: 1445 - DNA, 415 bp, Artificial Sequence
  Synthetic
aggagatataccatggaagttcaactggttgaatctggtggcggtttagttcaagccggtgatagccttcgtctgagctgcgccgcaagcggagattactgcatggattgctttatgggttggtttcgccaggcacctggtaaagaacgtgaatttgtggcagccattaccccctattcctttaagacctactatgccgattctgttaaaggtcgcttcactatttcacgcgatgatgcgcgtaataccgtgtacttacagatgaactcactgaaacctgaggataccgccgtttattattgtgcggcacccctcaatatcggcaccgcgacgattgccgactattggggtcagggcacacaagtcacggtctcaagcggcggaagctctggtgaacagaaactgatttcagaag

SEQ ID NO: 1446 - protein, 7 aa, Artificial Sequence
  Synthetic
DYCMDCF

SEQ ID NO: 1447 - protein, 5 aa, Artificial Sequence
  Synthetic
PYSFK

SEQ ID NO: 1448 - protein, 10 aa, Artificial Sequence
  Synthetic
PLNIGTATIA

SEQ ID NO: 1449 - protein, 121 aa, Artificial Sequence
  Synthetic
EVQLVESGGGLVQAGDSLRLSCAASGDYCMDCFMGWFRQAPGKEREFVAAITPYSFKTYYADSVKGRFTISRDDARNTVYLQMNSLKPEDTAVYYCAAPLNIGTATIADYWGQGTQVTISS

SEQ ID NO: 1450 - DNA, 406 bp, Artificial Sequence
  Synthetic
accatggaagttcaactggttgaatctggtggcggtttagttcaagccggtgatagccttcgtctgagctgcgccgcaagcggagattactgcatggattgctttatgggttggtttcgccaggcacctggtaaagaacgtgaatttgtggcagccattaccccctattcctttaagacctactatgccgattctgttaaaggtcgcttcactatttcacgcgatgatgcgcgtaataccgtgtacttacagatgaactcactgaaacctgaggataccgccgtttattattgtgcggcacccctcaatatcggcaccgcgacgattgccgactattggggtcagggcacacaagtcacgatctcaagcggcggaagctctggtgaacagaaactgatttcagaag

SEQ ID NO: 1451 - protein, 7 aa, Artificial Sequence
  Synthetic
DYCMDCF

SEQ ID NO: 1452 - protein, 5 aa, Artificial Sequence
  Synthetic
PYSFK

SEQ ID NO: 1453 - protein, 10 aa, Artificial Sequence
  Synthetic
VPNVTWSERA

SEQ ID NO: 1454 - protein, 121 aa, Artificial Sequence
  Synthetic
EVQLVESGGGLVQAGDSLRLSCAASGDYCMDCFMGWFRQAPGKEREFVAAITPYSFKTYYADSVKGRFTISRDDARNTVYLQMNSLKPEDTAVYYCAAVPNVTWSERAAYWGQGTQVTVSS

SEQ ID NO: 1455 - DNA, 412 bp, Artificial Sequence
  Synthetic
agatataccatggaagttcaactggttgaatctggtggcggtttagttcaagccggtgatagccttcgtctgagctgcgccgcaagcggagattactgcatggattgctttatgggttggtttcgccaggcacctggtaaagaacgtgaatttgtggcagccattaccccctattcctttaagacctactatgccgattctgttaaaggtcgcttcactatttcacgcgatgatgcgcgtaataccgtgtacttacagatgaactcactgaaacctgaggataccgccgtttattattgtgcggcagtccccaatgtgacctggtccgagagggctgcctattggggtcagggcacacaagtcacggtctcaagcggcggaagctctggtgaacagaaactgatttcagaag

SEQ ID NO: 1456 - protein, 7 aa, Artificial Sequence
  Synthetic
DYCMDCF

SEQ ID NO: 1457 - protein, 5 aa, Artificial Sequence
  Synthetic
PYSFK

SEQ ID NO: 1458 - protein, 10 aa, Artificial Sequence
  Synthetic
PLNIGTATIA

SEQ ID NO: 1459 - protein, 121 aa, Artificial Sequence
  Synthetic
EVQLVESGGGLVQTGDSLRLSCAASGDYCMDCFMGWFRQAPGKEREFVAAITPYSFKTYYADSVKGRFTISRDDARNTVYLQMNSLKPEDTAVYYCAAPLNIGTATIADYWGQGTQVTVSS

SEQ ID NO: 1460 - DNA, 412 bp, Artificial Sequence
  Synthetic
agatataccatggaagttcaactggttgaatctggtggcggtttagttcaaaccggtgatagccttcgtctgagctgcgccgcaagcggagattactgcatggattgctttatgggttggtttcgccaggcacctggtaaagaacgtgaatttgtggcagccattaccccctattcctttaagacctactatgccgattctgttaaaggtcgcttcactatttcacgcgatgatgcgcgtaataccgtgtacttacagatgaactcactgaaacctgaggataccgccgtttattattgtgcggcacccctcaatatcggcaccgcgacgattgccgactattggggtcagggcacacaagtcacggtctcaagcggcggaagctctggtgaacagaaactgatttcagaag

SEQ ID NO: 1461 - protein, 7 aa, Artificial Sequence
  Synthetic
DYCMDCF

SEQ ID NO: 1462 - protein, 5 aa, Artificial Sequence
  Synthetic
PYSFK

SEQ ID NO: 1463 - protein, 10 aa, Artificial Sequence
  Synthetic
NPLDPNWTNS

SEQ ID NO: 1464 - protein, 121 aa, Artificial Sequence
  Synthetic
EVQLVESGGGLVQAGDSLRLSCAASGDYCMDCFMGWFRQAPGKEREFVAAITPYSFKTYYADSVKGRFTISRDDARNTVYLQMNSLKPEDTAVYYCAANPLDPNWTNSAYWGQGTQVTVSS

SEQ ID NO: 1465 - DNA, 410 bp, Artificial Sequence
  Synthetic
atataccatggaagttcaactggttgaatctggtggcggtttagttcaagccggtgatagccttcgtctgagctgcgccgcaagcggagattactgcatggattgctttatgggttggtttcgccaggcacctggtaaagaacgtgaatttgtggcagccattaccccctattcctttaagacctactatgccgattctgttaaaggtcgcttcactatttcacgcgatgatgcgcgtaataccgtgtacttacagatgaactcactgaaacctgaggataccgccgtttattattgtgcggcaaaccctctggaccccaactggactaattctgcctattggggtcagggcacacaagtcacggtctcaagcggcggaagctctggtgaacagaaactgatttcagaag

SEQ ID NO: 1466 - protein, 7 aa, Artificial Sequence
  Synthetic
DYCMDCF

SEQ ID NO: 1467 - protein, 5 aa, Artificial Sequence
  Synthetic
PYSFK

SEQ ID NO: 1468 - protein, 10 aa, Artificial Sequence
  Synthetic
NPLDPNWTNS

SEQ ID NO: 1469 - protein, 121 aa, Artificial Sequence
  Synthetic
EVQLVESGGGLVQAGDSLRLSCAASGDYCMDCFMGWFRQAPGKEREFVAAITPYSFKTYYADSVKGRFTISRDDARNTVYLQMNSLKPEDTAVYYCAANPLDPNWTNSDYWCQGTQVTVSS

SEQ ID NO: 1470 - DNA, 416 bp, Artificial Sequence
  Synthetic
aaggagatataccatggaagttcaactggttgaatctggtggcggtttagttcaagccggtgatagccttcgactgagctgcgccgcaagcggagattactgcatggattgctttatgggttggtttcgccaggcacctggtaaagaacgtgaatttgtggcagccattaccccctattcctttaagacctactatgccgattctgttaaaggtcgcttcactatttcacgcgatgatgcgcgtaataccgtgtacttacagatgaactcactgaaacctgaggataccgccgtttattattgtgcggcaaaccctctggaccccaactggactaattctgactattggtgtcagggcacacaagtcacggtctcaagcggcggaagctctggtgaacagaaactgatttcagaag

SEQ ID NO: 1471 - protein, 7 aa, Artificial Sequence
  Synthetic
DYCMDCF

SEQ ID NO: 1472 - protein, 5 aa, Artificial Sequence
  Synthetic
PYSFK

SEQ ID NO: 1473 - protein, 10 aa, Artificial Sequence
  Synthetic
NPLDPNWTNS

SEQ ID NO: 1474 - protein, 121 aa, Artificial Sequence
  Synthetic
EVQLVESGGGLVQAGDSLRLSCAAGGDYCMDCFMGWFRQAPGKEREFVAAITPYSFKTYYADSVKGRFTISRDDARNTVYLQMNSLKPEDTAVYYCAANPLDPNWTNSDYWGQGTQVTVSS

SEQ ID NO: 1475 - DNA, 412 bp, Artificial Sequence
  Synthetic
agatataccatggaagttcaactggttgaatctggtggcggtttagttcaagccggtgatagccttcgtctgagctgcgccgcaggcggagattactgcatggattgctttatgggttggtttcgccaggcacctggtaaagaacgtgaatttgtggcagccattaccccctattcctttaagacctactatgccgattctgttaaaggtcgcttcactatttcacgcgatgatgcgcgtaataccgtgtacttacagatgaactcactgaaacctgaggataccgccgtttattattgtgcggcaaaccctctggaccccaactggactaattctgactattggggtcagggcacacaagtcacggtctcaagcggcggaagctctggtgaacagaaactgatttcagaag

SEQ ID NO: 1476 - protein, 7 aa, Artificial Sequence
  Synthetic
DYCMDCF

SEQ ID NO: 1477 - protein, 5 aa, Artificial Sequence
  Synthetic
PYSFK

SEQ ID NO: 1478 - protein, 10 aa, Artificial Sequence
  Synthetic
SMHLNNISIS

SEQ ID NO: 1479 - protein, 121 aa, Artificial Sequence
  Synthetic
EVQLVESGGGLVQAGDSLRLSCAASGDYCMDCFMGWFRQAPGKEREFVAAITPYSFKTYYADSVKGRFTISRDDARNTVYLQMNSLKPEDTAVYYCAASMHLNNISISDYWGQGTQVTVSS

SEQ ID NO: 1480 - DNA, 415 bp, Artificial Sequence
  Synthetic
aggagatataccatggaagttcaactggttgaatctggtggcggtttagttcaagccggtgatagccttcgtctgagctgcgccgcaagcggagattactgcatggattgctttatgggttggtttcgccaggcacctggtaaagaacgtgaatttgtggcagccattaccccctattcctttaagacctactatgccgattctgttaaaggtcgcttcactatttcacgcgatgatgcgcgtaataccgtgtacttacagatgaactcactgaaacctgaggataccgccgtttattattgtgcggcatctatgcacctgaacaatatcagcattagtgactattggggtcagggcacacaagtcacggtctcaagcggcggaagctctggtgaacagaaactgatttcagaag

SEQ ID NO: 1481 - protein, 7 aa, Artificial Sequence
  Synthetic
DYCMDCF

SEQ ID NO: 1482 - protein, 5 aa, Artificial Sequence
  Synthetic
PYSFK

SEQ ID NO: 1483 - protein, 10 aa, Artificial Sequence
  Synthetic
SANILHLSVI

SEQ ID NO: 1484 - protein, 121 aa, Artificial Sequence
  Synthetic
EVQLVESGGGLVQAGDSLRLSCAASGDYCMDCFMGWFRQAPGKEREFVAAITPYSFKTYYADSVKGRFTISRDDARNTVYLQMNSLKPEDTAVYYCAASANILHLSVINYWGQGTQVTVSS

SEQ ID NO: 1485 - DNA, 408 bp, Artificial Sequence
  Synthetic
ataccatggaagttcaactggttgaatctggtggcggtttagttcaagccggtgatagccttcgtctgagctgcgccgcaagcggagattactgcatggattgctttatgggttggtttcgccaggcacctggtaaagaacgtgaatttgtggcagccattaccccctattcctttaagacctactatgccgattctgttaaaggtcgcttcactatttcacgcgatgatgcgcgtaataccgtgtacttacagatgaactcactgaaacctgaggataccgccgtttattattgtgcggcaagcgcgaacattctccatttgtctgttatcaactattggggtcagggcacacaagtcacggtctcaagcggcggaagctctggtgaacagaaactgatttcagaag

SEQ ID NO: 1486 - protein, 7 aa, Artificial Sequence
  Synthetic
DYCMDCF

SEQ ID NO: 1487 - protein, 5 aa, Artificial Sequence
  Synthetic
PYSFK

SEQ ID NO: 1488 - protein, 10 aa, Artificial Sequence
  Synthetic
LLPLDGFETS

SEQ ID NO: 1489 - protein, 121 aa, Artificial Sequence
  Synthetic
EVQLVESGGGLVQAGDSLRLSCAASGDYCMDCFMGWFRQAPGKEREFVAAITPYSFKTYYADSVKGRFTISRDDARNTVYLQMNSLKPEDTAVYYCAALLPLDGFETSDYWGQGTQVTVSS

SEQ ID NO: 1490 - DNA, 406 bp, Artificial Sequence
  Synthetic
accatggaagttcaactggttgaatctggtggcggtttagttcaagccggtgatagccttcgtctgagctgcgccgcaagcggagattactgcatggattgctttatgggttggtttcgccaggcacctggtaaagaacgtgaatttgtggcagccattaccccctattcctttaagacctactatgccgattctgttaaaggtcgcttcactatttcacgcgatgatgcgcgtaataccgtgtacttacagatgaactcactgaaacctgaggataccgccgtttattattgtgcggcacttctccccctggatggttttgagacttcggactattggggtcagggcacacaagtcacggtctcaagcggcggaagctctggtgaacagaaactgatttcagaag

SEQ ID NO: 1491 - protein, 7 aa, Artificial Sequence
  Synthetic
DYCMDCF

SEQ ID NO: 1492 - protein, 5 aa, Artificial Sequence
  Synthetic
PYSFK

SEQ ID NO: 1493 - protein, 10 aa, Artificial Sequence
  Synthetic
NPLDPNWTNS

SEQ ID NO: 1494 - protein, 121 aa, Artificial Sequence
  Synthetic
EVQLVESGGGLVQAGDSLRLSCAASGDYCMDCFMGWFRQAPGKEREFVAAITPYSFKTYYADSVKGRSTISRDDARNTVYLQMNSLKPEDTAVYYCAANPLDPNWTNSAYWGHGTQVTVSS

SEQ ID NO: 1495 - DNA, 414 bp, Artificial Sequence
  Synthetic
ggagatataccatggaagttcaactggttgaatctggtggcggtttagttcaagccggtgatagccttcgtctgagctgcgccgcaagcggagattactgcatggattgctttatgggttggtttcgccaggcacctggtaaagaacgtgaatttgtggcagccattaccccctattcctttaagacctactatgccgattctgttaaaggtcgctccactatttcacgcgatgatgcgcgtaataccgtgtacttacagatgaactcactgaaacctgaggataccgccgtttattattgtgcggcaaaccctctggaccccaactggactaattctgcctattggggtcacggcacacaagtcacggtctcaagcggcggaagctctggtgaacagaaactgatttcagaag

SEQ ID NO: 1496 - protein, 7 aa, Artificial Sequence
  Synthetic
DYCMDCF

SEQ ID NO: 1497 - protein, 5 aa, Artificial Sequence
  Synthetic
PYSFK

SEQ ID NO: 1498 - protein, 10 aa, Artificial Sequence
  Synthetic
LLPLDGFETS

SEQ ID NO: 1499 - protein, 121 aa, Artificial Sequence
  Synthetic
EVQLVESGGGLVQAGDRLRLSCAASGDYCMDCFMGWFRQAPGKEREFVAAITPYSFKTYYADSVKGRFTISRDGARNTVYLQMNSLKPEDTAVYYCAALLPLDGFETSDYWGQGTQVTVSS

SEQ ID NO: 1500 - DNA, 408 bp, Artificial Sequence
  Synthetic
ataccatggaagttcaactggttgaatctggtggcggtttagttcaagccggtgataggcttcgtctgagctgcgccgcaagcggagattactgcatggattgctttatgggttggtttcgccaggcacctggtaaagaacgtgaatttgtggcagccattaccccctattcttttaagacctactatgccgattctgttaaaggtcgcttcactatttcacgcgatggtgcgcgtaataccgtgtacttacagatgaactcactgaaacctgaggataccgccgtttattattgtgcggcacttctccccctggatggttttgagacttcggactattggggtcagggcacacaagtcacggtctcaagcggcggaagctctggtgaacagaaactgatttcagaag

SEQ ID NO: 1501 - protein, 7 aa, Artificial Sequence
  Synthetic
DYCMDCF

SEQ ID NO: 1502 - protein, 5 aa, Artificial Sequence
  Synthetic
PYSFK

SEQ ID NO: 1503 - protein, 10 aa, Artificial Sequence
  Synthetic
TYYSTTCLLF

SEQ ID NO: 1504 - protein, 121 aa, Artificial Sequence
  Synthetic
EVQLVESGGGLVQAGDSLRLSCAASGDYCMDCFMGWFRQAPGKEREFVAAITPYSFKTYYADSVKGRFTISRDDARNTVYLQMNSLKPEDTAVYYCARTYYSTTCLLFDYWGQGTQVTVSS

SEQ ID NO: 1505 - DNA, 410 bp, Artificial Sequence
  Synthetic
atataccatggaagttcaactggttgaatctggtggcggtttagttcaagccggtgatagccttcgtctgagctgcgccgcaagcggagattactgcatggattgctttatgggttggtttcgccaggcacctggtaaagaacgtgaatttgtggcagccattaccccctattcctttaagacctactatgccgattctgttaaaggtcgcttcactatttcacgcgatgatgcgcgtaataccgtgtacttacagatgaactcactgaaacctgaggataccgccgtttattattgtgcgcgtacgtactacagcaccacctgtttgctgttcgactattggggtcagggcacacaagtcacggtctcaagcggcggaagctctggtgaacagaaactgatttcagaag

SEQ ID NO: 1506 - protein, 7 aa, Artificial Sequence
  Synthetic
DYCMDCF

SEQ ID NO: 1507 - protein, 5 aa, Artificial Sequence
  Synthetic
PYSFK

SEQ ID NO: 1508 - protein, 10 aa, Artificial Sequence
  Synthetic
PLNIGTVTIA

SEQ ID NO: 1509 - protein, 121 aa, Artificial Sequence
  Synthetic
EVQLVESGGGLVQAGDSLRLSCAASGDYCMDCFMGWFRQAPGKEREFVAAITPYSFKTYYADSVKGRFTISRDDARNTVYLQMNSLKPEDTAVYYCAAPLNIGTVTIADYWGQGTQVTVSS

SEQ ID NO: 1510 - DNA, 417 bp, Artificial Sequence
  Synthetic
gaaggagatataccatggaagttcaactggttgaatctggtggcggtttagttcaagccggtgatagccttcgtctgagctgcgccgcaagcggagattactgcatggattgctttatgggttggtttcgccaggcacctggtaaagaacgtgaatttgtggcagccattaccccctattcctttaagacctactatgccgattctgttaaaggtcgcttcactatttcacgcgatgatgcgcgtaataccgtgtacttacagatgaactcactgaaacctgaggataccgccgtttattattgtgcggcacccctcaatatcggcaccgtgacgattgccgactattggggtcagggcacacaagtcacggtctcaagcggcggaagctctggtgaacagaaactgatttcagaag

SEQ ID NO: 1511 - protein, 7 aa, Artificial Sequence
  Synthetic
DYCMDCF

SEQ ID NO: 1512 - protein, 5 aa, Artificial Sequence
  Synthetic
PYSFK

SEQ ID NO: 1513 - protein, 10 aa, Artificial Sequence
  Synthetic
QVSLVTHGDL

SEQ ID NO: 1514 - protein, 121 aa, Artificial Sequence
  Synthetic
EVQLVESGGGLVQAGDSLRLSCAASGDYCMDCFMGWFRQAPGKEREFVAAITPYSFKTYYADSVKGRFTISRDDARNTVYLQMNSLKPEDTAVYYCAAQVSLVTHGDLDSWGQGTQVTVSS

SEQ ID NO: 1515 - DNA, 408 bp, Artificial Sequence
  Synthetic
ataccatggaagttcaactggttgaatctggtggcggtttagttcaagccggtgatagccttcgtctgagctgcgccgcaagcggagattactgcatggattgctttatgggttggtttcgccaggcacctggtaaagaacgtgaatttgtggcagccattaccccctattcctttaagacctactatgccgattctgttaaaggtcgcttcactatttcacgcgatgatgcgcgtaataccgtgtacttacagatgaactcactgaaacctgaggataccgccgtttattattgtgcggcacaggtctcccttgttacccatggggatctggactcttggggtcagggcacacaagtcacggtctcaagcggcggaagctctggtgaacagaaactgatttcagaag

SEQ ID NO: 1516 - protein, 7 aa, Artificial Sequence
  Synthetic
DYCMDCF

SEQ ID NO: 1517 - protein, 5 aa, Artificial Sequence
  Synthetic
PYSFK

SEQ ID NO: 1518 - protein, 10 aa, Artificial Sequence
  Synthetic
NPLDPNWTNS

SEQ ID NO: 1519 - protein, 121 aa, Artificial Sequence
  Synthetic
EVQLVESGGGLVQAGDSLHLSCAASGDYCMDCFMGWFRQAPGKEREFVAAITPYSFKTYYADSVKGRFTISRDDARNTVYLQMNSLKPEDTAVYYCAANPLDPNWTNSDYWGQGTQVTVSS

SEQ ID NO: 1520 - DNA, 410 bp, Artificial Sequence
  Synthetic
atataccatggaagttcaactggttgaatctggtggcggtttagttcaagccggtgatagccttcatctgagctgcgccgcaagcggagattactgcatggattgctttatgggttggtttcgccaggcacctggtaaagaacgtgaatttgtggcagccattaccccctattcctttaagacctactatgccgattctgttaaaggtcgcttcactatttcacgcgatgatgcgcgtaataccgtgtacttacagatgaactcactgaaacctgaggataccgccgtttattattgtgcggcaaaccctctggaccccaactggactaattctgactattggggtcagggcacacaagtcacggtctcaagcggcggaagctctggtgaacagaaactgatttcagaag

SEQ ID NO: 1521 - protein, 7 aa, Artificial Sequence
  Synthetic
DYCMDCF

SEQ ID NO: 1522 - protein, 5 aa, Artificial Sequence
  Synthetic
PYSFK

SEQ ID NO: 1523 - protein, 10 aa, Artificial Sequence
  Synthetic
SANILHLSVI

SEQ ID NO: 1524 - protein, 121 aa, Artificial Sequence
  Synthetic
EVQLVESGGGLVKAGDSLRLSCAASGDYCMDCFMGWFRQAPGKEREFVAAITPYSFKTYYADSVKGRFTISRDDARNTVYLQMNSLKPEDTAVYYCAASANILHLSVINYWGQGTQVTVSS

SEQ ID NO: 1525 - DNA, 415 bp, Artificial Sequence
  Synthetic
aggagatataccatggaagttcaactggttgaatctggtggcggtttagttaaagccggtgatagccttcgtctgagctgcgccgcaagcggagattactgcatggattgctttatgggttggtttcgccaggcacctggtaaagaacgtgaatttgtggcagccattaccccctattcctttaagacctactatgccgattctgttaaaggtcgcttcactatttcacgcgatgatgcgcgtaataccgtgtacttacagatgaactcactgaaacctgaggataccgccgtttattattgtgcggcaagcgcgaacattctccatttgtctgttatcaactattggggtcagggcacacaagtcacggtctcaagcggcggaagctctggtgaacagaaactgatttcagaag

SEQ ID NO: 1526 - protein, 7 aa, Artificial Sequence
  Synthetic
DYCMDCF

SEQ ID NO: 1527 - protein, 5 aa, Artificial Sequence
  Synthetic
PYSFK

SEQ ID NO: 1528 - protein, 10 aa, Artificial Sequence
  Synthetic
SSCLGALLHL

SEQ ID NO: 1529 - protein, 121 aa, Artificial Sequence
  Synthetic
EVQLVESGGGLVQASDSLRLSCAASGDYCMDCFMGWFRQAPGKEREFVAAITPYSFKTYYADSVKGRFTISRDDARNTVYLQMNSLKPEDTAVYYCAASSCLGALLHLDYWGQGTQVTVSS

SEQ ID NO: 1530 - DNA, 410 bp, Artificial Sequence
  Synthetic
atataccatggaagttcaactggttgaatctggtggcggtttagttcaagccagtgatagccttcgtctgagctgcgccgcaagcggagattactgcatggattgctttatgggttggtttcgtcaggcacctggtaaagaacgtgaatttgtggcagccattaccccctattcctttaagacctactatgccgattctgttaaaggtcgcttcactatttcacgcgatgatgcgcgtaataccgtgtacttacagatgaactcactgaaacctgaggataccgccgtttattattgtgcggcatcgtcttgcttgggtgctctccttcatttggactattggggtcagggcacacaagtcacggtctcaagcggcggaagctctggtgaacagaaactgatttcagaag

SEQ ID NO: 1531 - protein, 7 aa, Artificial Sequence
  Synthetic
DYCMDCF

SEQ ID NO: 1532 - protein, 5 aa, Artificial Sequence
  Synthetic
PYSFK

SEQ ID NO: 1533 - protein, 6 aa, Artificial Sequence
  Synthetic
CLPNAH

SEQ ID NO: 1534 - protein, 117 aa, Artificial Sequence
  Synthetic
EVQLVESGGGLVQAGDSLRLSCAASGDYCMDCFMGWFRQAPGKEREFVAAITPYSFKTYYADSVKGRFTISRDDARNTVYLQMNSLKPEDTAVYYCAACLPNAHDYWGQGTQVTVSS

SEQ ID NO: 1535 - DNA, 398 bp, Artificial Sequence
  Synthetic
atatgccatggaagttcaactggttgaatctggtggcggtttagttcaagccggtgatagccttcgtctgagctgcgccgcaagcggagattactgcatggattgctttatgggttggtttcgccaggcacctggtaaagaacgtgaatttgtggcagccattaccccctattcctttaagacctactatgccgattctgttaaaggtcgcttcactatttcacgcgatgatgcgcgtaataccgtgtacttacagatgaactcactgaaacctgaggataccgccgtttattattgtgcggcatgcctccccaatgctcatgactattggggtcagggcacacaagtcacggtctcaagcggcggaagctctggtgaacagaaactgatttcagaag

SEQ ID NO: 1536 - protein, 7 aa, Artificial Sequence
  Synthetic
DYCMDCF

SEQ ID NO: 1537 - protein, 5 aa, Artificial Sequence
  Synthetic
PYSFK

SEQ ID NO: 1538 - protein, 9 aa, Artificial Sequence
  Synthetic
QIRKFSVFW

SEQ ID NO: 1539 - protein, 120 aa, Artificial Sequence
  Synthetic
EVQLVESGGGLVQAGDSLRLSCAASGDYCMDCFMGWFRQAPGKEREFVAAITPYSFKTYYADSVKGRFTISRDDARNTVYLQMNSLKPEDTAVYYCAAQIRKFSVFWDYWGQGTQVTVSS

SEQ ID NO: 1540 - DNA, 407 bp, Artificial Sequence
  Synthetic
atataccatggaagttcaactggttgaatctggtggcggtttagttcaagccggtgatagccttcgtctgagctgcgccgcaagcggagattactgcatggattgctttatgggttggtttcgccaggcacctggtaaagaacgtgaatttgtggcagccattaccccctattcctttaagacctactatgccgattctgttaaaggtcgcttcactatttcacgcgatgatgcgcgtaataccgtgtacttacagatgaactcactgaaacctgaggataccgccgtttattattgtgcggcacagattcgcaagtttagtgtgttttgggactattggggtcagggcacacaagtcacggtctcaagcggcggaagctctggtgaacagaaactgatttcagaag

SEQ ID NO: 1541 - protein, 7 aa, Artificial Sequence
  Synthetic
DYCMDCF

SEQ ID NO: 1542 - protein, 5 aa, Artificial Sequence
  Synthetic
PYSFK

SEQ ID NO: 1543 - protein, 10 aa, Artificial Sequence
  Synthetic
QVSLVTHGDL

SEQ ID NO: 1544 - protein, 121 aa, Artificial Sequence
  Synthetic
EVQLVKSGGGLVQAGDSLRLSCAASGDYCMDCFMGWFRQAPGKEREFVAAITPYSFKTYYADSVKGRFTISRDDARNTVYLQMNSLKPEDTAVYYCAAQVSLVTHGDLDSWGQGTQVTVSS

SEQ ID NO: 1545 - DNA, 412 bp, Artificial Sequence
  Synthetic
agatataccatggaagttcaactggttaaatctggtggcggtttagttcaagccggtgatagccttcgtctgagctgcgccgcaagcggagattactgcatggattgctttatgggttggtttcgccaggcacctggtaaagaacgtgaatttgtggcagccattaccccctattcctttaagacctactatgccgattctgttaaaggtcgcttcactatttcacgcgatgatgcgcgtaataccgtgtacttacagatgaactcactgaaacctgaggataccgccgtttattattgtgcggcacaggtctcccttgttacccatggggatctggactcttggggtcagggcacacaagtcacggtctcaagcggcggaagctctggtgaacagaaactgatttcagaag

SEQ ID NO: 1546 - protein, 7 aa, Artificial Sequence
  Synthetic
DYCMDCF

SEQ ID NO: 1547 - protein, 5 aa, Artificial Sequence
  Synthetic
PYSFK

SEQ ID NO: 1548 - protein, 10 aa, Artificial Sequence
  Synthetic
NPLDPNWTNS

SEQ ID NO: 1549 - protein, 121 aa, Artificial Sequence
  Synthetic
EVQLVESGGGLVHAGDSLRLSCAASGDYCMDCFMGWFRQAPGKEREFVAAITPYSFKTYYADSVKGRFTISRDDARNTVYLQMNSLKPEDTAVYYCAANPLDPNWTNSDYWGQGTQVTVSS

SEQ ID NO: 1550 - DNA, 417 bp, Artificial Sequence
  Synthetic
gaaggagatataccatggaagttcaactggttgaatctggtggcggtttagttcacgccggtgatagccttcgtctgagctgcgccgcaagcggagattactgcatggattgctttatgggttggtttcgccaggcacctggtaaagaacgtgaatttgtggcagccattaccccctattcctttaagacctactatgccgattctgttaaaggtcgcttcactatttcacgcgatgatgcgcgtaataccgtgtacttacagatgaactcactgaaacctgaggataccgccgtttattattgtgcggcaaaccctctggaccccaactggactaattctgactattggggtcagggcacacaagtcacggtctcaagcggcggaagctctggtgaacagaaactgatttcagaag

SEQ ID NO: 1551 - protein, 7 aa, Artificial Sequence
  Synthetic
DYCMDCF

SEQ ID NO: 1552 - protein, 5 aa, Artificial Sequence
  Synthetic
PYSFK

SEQ ID NO: 1553 - protein, 9 aa, Artificial Sequence
  Synthetic
CRTTTCYGF

SEQ ID NO: 1554 - protein, 120 aa, Artificial Sequence
  Synthetic
EVQLVESGGGLVQAGDSLRLSCAASGDYCMDCFMGWFRQAPGKEREFVAAITPYSFKTYYADSVKGRFTISRDDARNTVYLQMNSLKPEDTAVYYCATCRTTTCYGFDYWGQGTQVTVSS

SEQ ID NO: 1555 - DNA, 407 bp, Artificial Sequence
  Synthetic
atataccatggaagttcaactggttgaatctggtggcggtttagttcaagccggtgatagccttcgtctgagctgcgccgcaagcggagattactgcatggattgctttatgggttggtttcgccaggcacctggtaaagaacgtgaatttgtggcagccattaccccctattcctttaagacctactatgccgattctgttaaaggtcgcttcactatttcacgcgatgatgcgcgtaataccgtgtacttacagatgaactcactgaaacctgaggataccgccgtttattattgtgcgacatgtaggaccactacgtgttatggttttgactattggggtcagggcacacaagtcacggtctcaagcggcggaagctctggtgaacagaaactgatttcagaag

SEQ ID NO: 1556 - protein, 7 aa, Artificial Sequence
  Synthetic
DYCMDCF

SEQ ID NO: 1557 - protein, 5 aa, Artificial Sequence
  Synthetic
PYSFK

SEQ ID NO: 1558 - protein, 10 aa, Artificial Sequence
  Synthetic
NPLDPNWTNS

SEQ ID NO: 1559 - protein, 121 aa, Artificial Sequence
  Synthetic
EVQLVESGGVLVQAGDSLRLSCAASGDYCMDCFMGWFRQAPGKEREFVAAITPYSFKTYYADSVKGRFTISRDDARNTVYLQMNSLKPEDTAVYYCAANPLDPNWTNSDYWGQGTQVTVSS

SEQ ID NO: 1560 - DNA, 415 bp, Artificial Sequence
  Synthetic
aggagatataccatggaagttcaactggttgaatctggtggcgttttagttcaagccggtgatagccttcgtctgagctgcgccgcaagcggagattactgcatggattgctttatgggttggtttcgccaggcacctggtaaagaacgtgaatttgtggcagccattaccccctattcctttaagacctactatgccgattctgttaaaggtcgcttcactatttcacgcgatgatgcgcgtaataccgtgtacttacagatgaactcactgaaacctgaggataccgccgtttattattgtgcggcaaaccctctggaccccaactggactaattctgactattggggtcagggcacacaagtcacggtctcaagcggcggaagctctggtgaacagaaactgatttcagaag

SEQ ID NO: 1561 - protein, 7 aa, Artificial Sequence
  Synthetic
DYCMDCF

SEQ ID NO: 1562 - protein, 5 aa, Artificial Sequence
  Synthetic
PYSFK

SEQ ID NO: 1563 - protein, 10 aa, Artificial Sequence
  Synthetic
WLTTQPFCGW

SEQ ID NO: 1564 - protein, 121 aa, Artificial Sequence
  Synthetic
EVQLVESGGGLVQAGDSLRLSCAASGDYCMDCFMGWFRQAPGKEREFVAAITPYSFKTYYADSVRGRFSISADSAKNTVYLQMNSLKPEDTAVYYCAAWLTTQPFCGWNYWGQGTQVTVSS

SEQ ID NO: 1565 - DNA, 406 bp, Artificial Sequence
  Synthetic
accatggaagttcaactggttgaatctggtggcggtttagttcaagccggtgatagccttcgtctgagctgcgccgcaagcggagattactgcatggattgctttatgggttggtttcgccaggcacctggtaaagaacgtgaatttgtggcagccattaccccctattcctttaagacctactatgccgattctgttcgtggtcgcttcagcatttcagcagattctgcgaagaataccgtgtacttacagatgaactcactgaaacctgaggataccgccgtttattattgtgcggcatggctgaccactcagccgttctgcggttggaactattggggtcagggcacacaagtcacggtctcaagcggcggaagctctggtgaacagaaactgatttcagaag

SEQ ID NO: 1566 - protein, 7 aa, Artificial Sequence
  Synthetic
DYCMDCF

SEQ ID NO: 1567 - protein, 5 aa, Artificial Sequence
  Synthetic
PYSFK

SEQ ID NO: 1568 - protein, 13 aa, Artificial Sequence
  Synthetic
GICAPSNTLGFVL

SEQ ID NO: 1569 - protein, 124 aa, Artificial Sequence
  Synthetic
EVQLVESGGGLVQAGDSLRLSCAASGDYCMDCFMGWFRQAPGKEREFVAAITPYSFKTYYADSVKGRFTISRDDARNTVYLQMNSLKPEDTAVYYCAAGICAPSNTLGFVLGYWGQGTQVTVSS

SEQ ID NO: 1570 - DNA, 426 bp, Artificial Sequence
  Synthetic
gaaggagatataccatggaagttcaactggttgaatctggtggcggtttagttcaagccggtgatagccttcgtctgagctgcgccgcaagcggagattactgcatggattgctttatgggttggtttcgccaggcacctggtaaagaacgtgaatttgtggcagccattaccccctattcctttaagacctactatgccgattctgttaaaggtcgcttcactatttcacgcgatgatgcgcgtaataccgtgtacttacagatgaactcactgaaacctgaggataccgccgtttattattgtgcggcagggatctgtgccccctccaatacgctcggcttcgttcttggctattggggtcagggcacacaagtcacggtctcaagcggcggaagctctggtgaacagaaactgatttcagaag

SEQ ID NO: 1571 - protein, 7 aa, Artificial Sequence
  Synthetic
DYCMDCF

SEQ ID NO: 1572 - protein, 5 aa, Artificial Sequence
  Synthetic
PYSFK

SEQ ID NO: 1573 - protein, 10 aa, Artificial Sequence
  Synthetic
DSLILANSQW

SEQ ID NO: 1574 - protein, 121 aa, Artificial Sequence
  Synthetic
EVQLVESGGGLVHAGDRLRLSCAASGDYCMDCFMGWFRQAPGKEREFVAAITPYSFKTYYADSVKGRFTISRDDARNTVYLQMNSLKPEDTAVYYCAADSLILANSQWDYWGQGTQVTVSS

SEQ ID NO: 1575 - DNA, 417 bp, Artificial Sequence
  Synthetic
gaaggagatataccatggaagttcaactggttgaatctggtggcggtttagttcacgccggtgatcgccttcgtctgagctgcgccgcaagcggagattactgcatggattgctttatgggttggtttcgccaggcacctggtaaagaacgtgaatttgtggcagccattaccccctattcctttaagacctactatgccgattctgttaaaggtcgcttcactatttcacgcgatgatgcgcgtaataccgtgtacttacagatgaactcactgaaacctgaggataccgccgtttattattgtgcggcagacagccttattttggctaattctcagtgggactattggggtcagggcacacaagtcacggtctcaagcggcggaagctctggtgaacagaaactgatttcagaag

SEQ ID NO: 1576 - protein, 7 aa, Artificial Sequence
  Synthetic
DYCMDCF

SEQ ID NO: 1577 - protein, 5 aa, Artificial Sequence
  Synthetic
PYSFK

SEQ ID NO: 1578 - protein, 10 aa, Artificial Sequence
  Synthetic
PFAPLTVLLA

SEQ ID NO: 1579 - protein, 121 aa, Artificial Sequence
  Synthetic
EVQLVESGGGLVQAGDSLRLSCAASGDYCMDCFMGWFRQAPGKEREFVAAITPYSFKTYYADSVKGRFTISRDDARNTVYLQMNSLKPEDTAVYYCAAPFAPLTVLLAEYWGQDTQVTVSS

SEQ ID NO: 1580 - DNA, 406 bp, Artificial Sequence
  Synthetic
accatggaagttcaactggttgaatctggtggcggtttagttcaagccggtgatagccttcgtctgagctgcgccgcaagcggagattactgcatggattgctttatgggttggtttcgccaggcacctggtaaagaacgtgaatttgtggcagccattaccccctattcctttaagacctactatgccgattctgttaaaggtcgcttcactatttcacgcgatgatgcgcgtaataccgtgtacttacagatgaactcactgaaacctgaggataccgccgtttattattgtgcggcaccgttcgcgccccttaccgttcttctcgcggagtattggggtcaggacacacaagtcacggtctcaagcggcggaagctctggtgaacagaaactgatttcagaag

SEQ ID NO: 1581 - protein, 7 aa, Artificial Sequence
  Synthetic
DYCMDCF

SEQ ID NO: 1582 - protein, 5 aa, Artificial Sequence
  Synthetic
PYSFR

SEQ ID NO: 1583 - protein, 10 aa, Artificial Sequence
  Synthetic
DSLILANSQW

SEQ ID NO: 1584 - protein, 121 aa, Artificial Sequence
  Synthetic
EVQLVESGGGLVQAGDSLRLSCAASGDYCMDCFMGWFRQAPGKEREFVAAITPYSFRTYYADSVKGRFTISRDDARNTVYLQMNSLKPEDTAVYYCAADSLILANSQWDYWGQGTQVTVSS

SEQ ID NO: 1585 - DNA, 406 bp, Artificial Sequence
  Synthetic
accatggaagttcaactggttgaatctggtggcggtttagttcaagccggtgatagccttcgtctgagctgcgccgcaagcggagattactgcatggattgctttatgggttggtttcgccaggcacctggtaaagaacgtgaatttgtggcagccattaccccctattcctttaggacctactatgccgattctgttaaaggtcgcttcactatttcacgcgatgatgcgcgtaataccgtgtacttacagatgaactcactgaaacctgaggataccgccgtttattattgtgcggcagacagccttattttggctaattctcagtgggactattggggtcagggcacacaagtcacggtctcaagcggcggaagctctggtgaacagaaactgctttcagaag

SEQ ID NO: 1586 - protein, 7 aa, Artificial Sequence
  Synthetic
DYCMDCF

SEQ ID NO: 1587 - protein, 5 aa, Artificial Sequence
  Synthetic
PYSFK

SEQ ID NO: 1588 - protein, 10 aa, Artificial Sequence
  Synthetic
VPNGTWSERA

SEQ ID NO: 1589 - protein, 121 aa, Artificial Sequence
  Synthetic
EVQLVESGGGLVQAGDSLRLSCAASGDYCMDCFMGWFRQAPGKEREFVAAITPYSFKTYYADSVKGRFTISRDDARNTVYLQMNSLKPEDTAVYYCAAVPNGTWSERADYWGQGTQVTVSS

SEQ ID NO: 1590 - DNA, 412 bp, Artificial Sequence
  Synthetic
agatataccatggaagttcaactggttgaatctggtggcggtttagttcaagccggtgatagccttcgtctgagctgcgccgcaagcggagattactgcatggattgctttatgggttggtttcgccaggcacctggtaaagaacgtgaatttgtggcagccattaccccctattcctttaagacctactatgccgattctgttaaaggtcgcttcactatttcacgcgatgatgcgcgtaataccgtgtacttacagatgaactcactgaaacctgaggataccgccgtttattattgtgcggcagtccccaatgggacctggtccgagagggctgactattggggtcagggcacacaagtcacggtctcaagcggcggaagctctggtgaacagaaactgatttcagaag

SEQ ID NO: 1591 - protein, 7 aa, Artificial Sequence
  Synthetic
DYCMDCF

SEQ ID NO: 1592 - protein, 5 aa, Artificial Sequence
  Synthetic
PYSFK

SEQ ID NO: 1593 - protein, 10 aa, Artificial Sequence
  Synthetic
NPLDPNWTNS

SEQ ID NO: 1594 - protein, 121 aa, Artificial Sequence
  Synthetic
EVQLVESGGGLVQAGDSLRLSCAAGGDYCMDCFMGWFRQAPGKEREFVAAITPYSFKTYYADSVKGRFTISRDDARNTVYLQMNSLKPEDTAVYYCAANPLDPNWTNSAYWGQGTQVTVSS

SEQ ID NO: 1595 - DNA, 406 bp, Artificial Sequence
  Synthetic
accatggaagttcaactggttgaatctggtggcggtttagttcaagccggtgatagccttcgtctgagctgcgccgcaggcggagattactgcatggattgctttatgggttggtttcgccaggcacctggtaaagaacgtgaatttgtggcagccattaccccctattcctttaagacctactatgccgattctgttaaaggtcgcttcactatttcacgcgatgatgcgcgtaataccgtgtacttacagatgaactcactgaaacctgaggataccgccgtttattattgtgcggcaaaccctctggaccccaactggactaattctgcctattggggtcagggcacacaagtcacggtctcaagcggcggaagctctggtgaacagaaactgatttcagaag

SEQ ID NO: 1596 - protein, 7 aa, Artificial Sequence
  Synthetic
DYCMDCF

SEQ ID NO: 1597 - protein, 5 aa, Artificial Sequence
  Synthetic
PYSFK

SEQ ID NO: 1598 - protein, 10 aa, Artificial Sequence
  Synthetic
NPLDPSWTNS

SEQ ID NO: 1599 - protein, 121 aa, Artificial Sequence
  Synthetic
EVQLVESGGGLVQAGDSLRLSCAASGDYCMDCFMGWFRQAPGKEREFVAAITPYSFKTYYADSVKGRFTISRDDARNTVYLQMNSLKPEDTAVYYCAANPLDPSWTNSDYWGQGTQVTVSS

SEQ ID NO: 1600 - DNA, 416 bp, Artificial Sequence
  Synthetic
aaggagatataccatggaagttcaactggttgaatctggtggcggtttagttcaagccggtgatagccttcgtctgagctgcgccgcaagcggagattactgcatggattgctttatgggttggtttcgccaggcacctggtaaagaacgtgaatttgtggcagccattaccccctattcctttaagacctactatgccgattctgttaaaggtcgcttcactatttcacgcgatgatgcgcgtaataccgtgtacttacagatgaactcactgaaacctgaggataccgccgtttattattgtgcggcaaaccctctggaccccagctggactaattctgactattggggtcagggcacacaagtcacggtctcaagcggcggaagctctggtgaacagaaactgatttcagaag

SEQ ID NO: 1601 - protein, 7 aa, Artificial Sequence
  Synthetic
DYCMDCF

SEQ ID NO: 1602 - protein, 5 aa, Artificial Sequence
  Synthetic
PYSFK

SEQ ID NO: 1603 - protein, 10 aa, Artificial Sequence
  Synthetic
VPNVTWSERA

SEQ ID NO: 1604 - protein, 121 aa, Artificial Sequence
  Synthetic
EVQLVESGGGLVQAGDSLRLSCAASGDYCMDCFMGWFRQAPGKEREFVAAITPYSFKTYYADSVKGRFTISRDAARNTVYLQMNSLKPEDTAVYYCAAVPNVTWSERADYWGQGTQVTVSS

SEQ ID NO: 1605 - DNA, 408 bp, Artificial Sequence
  Synthetic
ataccatggaagttcaactggttgaatctggtggcggtttagttcaagccggtgatagccttcgtctgagctgcgccgcaagcggagattactgcatggattgctttatgggttggtttcgccaggcacctggtaaagaacgtgaatttgtggcagccattaccccctattcctttaagacctactatgccgattctgttaaaggtcgcttcactatttcacgcgatgctgcgcgtaataccgtgtacttacagatgaactcactgaaacctgaggataccgccgtttattattgtgcggcagtccccaatgtgacctggtccgagagggctgactattggggtcagggcacacaagtcacggtctcaagcggcggaagctctggtgaacagaaactgatttcagaag

SEQ ID NO: 1606 - protein, 7 aa, Artificial Sequence
  Synthetic
DYCMDCF

SEQ ID NO: 1607 - protein, 5 aa, Artificial Sequence
  Synthetic
PYSFK

SEQ ID NO: 1608 - protein, 10 aa, Artificial Sequence
  Synthetic
PLNIGTATIA

SEQ ID NO: 1609 - protein, 121 aa, Artificial Sequence
  Synthetic
EVQLVESGGGLVHAGDRLRLSCAASGDYCMDCFMGWFRQAPGKEREFVAAITPYSFKTYYADSVKGRFTISRDDARNTVYLQMNSLKPEDTAVYYCAAPLNIGTATIADYWGQGTQVTVSS

SEQ ID NO: 1610 - DNA, 417 bp, Artificial Sequence
  Synthetic
gaaggagatataccatggaagttcaactggttgaatctggtggcggtttagttcacgccggtgatcgccttcgtctgagctgcgccgcaagcggagattactgcatggattgctttatgggttggtttcgccaggcacctggtaaagaacgtgaatttgtggcagccattaccccctattcctttaagacctactatgccgattctgttaaaggtcgcttcactatttcacgcgatgatgcgcgtaataccgtgtacttacagatgaactcactgaaacctgaggataccgccgtttattattgtgcggcacccctcaatatcggcaccgcgacgattgccgactattggggtcagggcacacaagtcacggtctcaagcggcggaagctctggtgaacagaaactgatttcagaag

SEQ ID NO: 1611 - protein, 7 aa, Artificial Sequence
  Synthetic
DYCMDCF

SEQ ID NO: 1612 - protein, 5 aa, Artificial Sequence
  Synthetic
PYSFK

SEQ ID NO: 1613 - protein, 10 aa, Artificial Sequence
  Synthetic
PFAPLTVLLA

SEQ ID NO: 1614 - protein, 121 aa, Artificial Sequence
  Synthetic
EVQLVESGGGLVQAGDSLRLSCAASGDYCMDCFMGWFRQAPGKEREFVAAITPYSFKTYYADSVKGRFTISRDDARNTVYLQMNSLKPEDTAVYYCAAPFAPLTVLLAEYWGQGTQVTVSS

SEQ ID NO: 1615 - DNA, 415 bp, Artificial Sequence
  Synthetic
aggagatataccatggaagttcaactggttgaatctggtggcggtttagttcaagccggtgatagccttcgtctgagctgcgccgcaagcggagattactgcatggattgctttatgggttggtttcgccaggcacctggtaaagaacgtgaatttgtggcagccattaccccctattcctttaagacctactatgccgattctgttaaaggtcgcttcactatttcacgcgatgatgcgcgtaataccgtgtacttacagatgaactcactgaaacctgaggataccgccgtttattattgtgcggcaccgttcgcgccccttaccgttcttctcgcggagtattggggtcagggcacacaagtcacggtctcaagcggcggaagctctggtgaacagaaactgatttcagaag

SEQ ID NO: 1616 - protein, 7 aa, Artificial Sequence
  Synthetic
DYCMDCF

SEQ ID NO: 1617 - protein, 5 aa, Artificial Sequence
  Synthetic
PYSFK

SEQ ID NO: 1618 - protein, 10 aa, Artificial Sequence
  Synthetic
VPNVTWSERA

SEQ ID NO: 1619 - protein, 121 aa, Artificial Sequence
  Synthetic
EVQLVESGGGLVQAGDSLRLSCAASGDYCMDCFMGWFRQAPGKEREFVAAITPYSFKTYYADSVKGRFTISRDDARNTVYLQMNSLKPEDTAVYYCAAVPNVTWSERADYWGQGTQVTVSS

SEQ ID NO: 1620 - DNA, 415 bp, Artificial Sequence
  Synthetic
aggagatataccatggaagttcaactggttgaatctggtggcggtttagttcaagccggtgatagccttcgtctgagctgcgccgcaagcggagattactgcatggattgctttatgggttggtttcgccaggcacctggtaaagaacgtgaatttgtggcagccattaccccctattcctttaagacctactatgccgattctgttaaaggtcgcttcactatttcacgcgatgatgcgcgtaataccgtgtacttacagatgaactcactgaaacctgaggataccgccgtttattattgtgcggcagtccccaatgtgacctggtccgagagggctgactattggggtcagggcacacaagtcacggtctcaagcggcggaagctctggtgaacagaaactgatttcagaag

SEQ ID NO: 1621 - protein, 7 aa, Artificial Sequence
  Synthetic
DYCMDCF

SEQ ID NO: 1622 - protein, 5 aa, Artificial Sequence
  Synthetic
PYSFK

SEQ ID NO: 1623 - protein, 10 aa, Artificial Sequence
  Synthetic
NPLDPNWTNS

SEQ ID NO: 1624 - protein, 121 aa, Artificial Sequence
  Synthetic
EVQLVESGGGLVQAGDSLRPSCAASGDYCMDCFMGWFRQAPGKEREFVAAITPYSFKTYYADSVKGRFTISRDDARNTVYLQMNSLKPEDTAVYYCAANPLDPNWTNSDYWGQGTQVTVSS

SEQ ID NO: 1625 - DNA, 415 bp, Artificial Sequence
  Synthetic
aggagatataccatggaagttcaactggttgaatctggtggcggtttagttcaagccggtgatagccttcgtccgagctgcgccgcaagcggagattactgcatggattgctttatgggttggtttcgccaggcacctggtaaagaacgtgaatttgtggcagccattaccccctattcctttaagacctactatgccgattctgttaaaggtcgcttcactatttcacgcgatgatgcgcgtaataccgtgtacttacagatgaactcactgaaacctgaggataccgccgtttattattgtgcggcaaaccctctggaccccaactggactaattctgactattggggtcagggcacacaagtcacggtctcaagcggcggaagctctggtgaacagaaactgatttcagaag

SEQ ID NO: 1626 - protein, 7 aa, Artificial Sequence
  Synthetic
DYCMDCF

SEQ ID NO: 1627 - protein, 5 aa, Artificial Sequence
  Synthetic
PYSFK

SEQ ID NO: 1628 - protein, 10 aa, Artificial Sequence
  Synthetic
PLNIGTATIA

SEQ ID NO: 1629 - protein, 121 aa, Artificial Sequence
  Synthetic
EVQLVESGGGLVQAGDSLRLSCAASGDYCMDCFMGWFRQAPGKEREFVAAITPYSFKTYYADSVKGRFTISRDDARNTVYLQMNSLKPEDTAVYYCATPLNIGTATIADYWGQGTQVTVSS

SEQ ID NO: 1630 - DNA, 408 bp, Artificial Sequence
  Synthetic
ataccatggaagttcaactggttgaatctggtggcggtttagttcaagccggtgatagccttcgtctgagctgcgccgcaagcggagattactgcatggattgctttatgggttggtttcgccaggcacctggtaaagaacgtgaatttgtggcagccattaccccctattcctttaagacctactatgccgattctgttaaaggtcgcttcactatttcacgcgatgatgcgcgtaataccgtgtacttacagatgaactcactgaaacctgaggataccgccgtttattattgtgcgacacccctcaatatcggcaccgcgacgattgccgactattggggtcagggcacacaagtcacggtctcaagcggcggaagctctggtgaacagaaactgatttcagaag

SEQ ID NO: 1631 - protein, 7 aa, Artificial Sequence
  Synthetic
DYCMDFF

SEQ ID NO: 1632 - protein, 5 aa, Artificial Sequence
  Synthetic
PYSFK

SEQ ID NO: 1633 - protein, 10 aa, Artificial Sequence
  Synthetic
WLTTQPFYGW

SEQ ID NO: 1634 - protein, 121 aa, Artificial Sequence
  Synthetic
EVQLVESGGGLVQAGDRLRLNCAASGDYCMDFFMGWFRQAPGKEREFVAAITPYSFKTYYADSVRGRFSISADSAKNTVYLQMNSLKPEDTAVYYCAAWLTTQPFYGWNYWGQGTQVTVSS

SEQ ID NO: 1635 - DNA, 414 bp, Artificial Sequence
  Synthetic
ggagatataccatggaagttcaactggttgaatctggtggcggtttagttcaagccggtgataggcttcgtctgaactgcgccgcaagcggagattactgcatggatttctttatgggttggtttcgccaagcacctggtaaagaacgtgaatttgtggccgccattaccccctattcctttaagacctactatgccgattctgttcgtggtcgcttcagcatttcagcagattctgcgaagaataccgtgtacttacagatgaactcactgaaacctgaggataccgccgtttattattgtgcggcatggctgaccactcagccgttctacggttggaactattggggtcagggcacacaagtcacggtctcaagcggcggaagctcttgtgaacagaaactgatttcagaag

SEQ ID NO: 1636 - protein, 7 aa, Artificial Sequence
  Synthetic
DYCMDCF

SEQ ID NO: 1637 - protein, 5 aa, Artificial Sequence
  Synthetic
PYSFK

SEQ ID NO: 1638 - protein, 10 aa, Artificial Sequence
  Synthetic
TLNIGTATIA

SEQ ID NO: 1639 - protein, 121 aa, Artificial Sequence
  Synthetic
EVQLVESGGGLVQAGDSLRLSCAASGDYCMDCFMGWFRQAPGKEREFVAAITPYSFKTYYADSVKGRFTISRDDARNTVYLQMTSLKPEDTAVYYCAATLNIGTATIADYWGQGTQVTVSS

SEQ ID NO: 1640 - DNA, 406 bp, Artificial Sequence
  Synthetic
accatggaagttcaactggttgaatctggtggcggtttagttcaagccggtgatagccttcgtctgagctgcgccgcaagcggagattactgcatggattgctttatgggttggtttcgccaggcacctggtaaagaacgtgaatttgtggcagccattaccccctattcctttaagacctactatgccgattctgttaaaggtcgcttcactatttcacgcgatgatgcgcgtaataccgtgtacttacagatgacctccctgaaacctgaggataccgccgtttattattgtgcggcaaccctcaatatcggcaccgcgacgattgccgactattggggtcagggcacacaagtcacggtctcaagcggcgtaagctctggtgaacagaaactgatttcagaag

SEQ ID NO: 1641 - protein, 7 aa, Artificial Sequence
  Synthetic
DYCMDCF

SEQ ID NO: 1642 - protein, 5 aa, Artificial Sequence
  Synthetic
PYSFK

SEQ ID NO: 1643 - protein, 10 aa, Artificial Sequence
  Synthetic
VPNVTWSERA

SEQ ID NO: 1644 - protein, 121 aa, Artificial Sequence
  Synthetic
EVQLVESGGGLVQAGDSFRLSCAASGDYCMDCFMGWFRQAPGKEREFVAAITPYSFKTYYADSVKGRFTISRDDARNTVYLQMNSLKPEDTAVYYCAAVPNVTWSERADYWGQGTQVTVSS

SEQ ID NO: 1645 - DNA, 416 bp, Artificial Sequence
  Synthetic
aaggagatataccatggaagttcaactggttgaatctggtggcggtttagttcaagccggtgatagctttcgtctgagctgcgccgcaagcggagattactgcatggattgctttatgggttggtttcgccaggcacctggtaaagaacgtgaatttgtggcagccattaccccctattcctttaagacctactatgccgattctgttaaaggtcgcttcactatttcacgcgatgatgcgcgtaataccgtgtacttacagatgaactcactgaaacctgaggataccgccgtttattattgtgcggcagtccccaatgtgacctggtccgagagggctgactattggggtcagggcacacaagtcacggtctcaagcggcggaagctctggtgaacagaaactgatttcagaag

SEQ ID NO: 1646 - protein, 7 aa, Artificial Sequence
  Synthetic
DYCMDCF

SEQ ID NO: 1647 - protein, 5 aa, Artificial Sequence
  Synthetic
PYSFK

SEQ ID NO: 1648 - protein, 10 aa, Artificial Sequence
  Synthetic
PLNIGTATIA

SEQ ID NO: 1649 - protein, 121 aa, Artificial Sequence
  Synthetic
EVQLVESGGGLVQAGDSLRLSCAASGDYCMDCFMGWFRQAPGKEREFVAAITPYSFKTYYADSVKGRFTISRDDARNTMYLQMNSLKPEDTAVYYCAAPLNIGTATIADYWGQGTQVTVSS

SEQ ID NO: 1650 - DNA, 412 bp, Artificial Sequence
  Synthetic
agatataccatggaagttcaactggttgaatctggtggcggtttagttcaagccggtgatagccttcgtctgagctgcgccgcaagcggagattactgcatggattgctttatgggttggtttcgccaggcacctggtaaagaacgtgaatttgtggcagccattaccccctattcctttaagacctactatgccgattctgttaaaggtcgcttcactatttcacgcgatgatgcgcgtaataccatgtacttacagatgaactcactgaaacctgaggataccgccgtttattattgtgcggcacccctcaatatcggcaccgcgacgattgccgactattggggtcagggcacacaagtcacggtctcaagcggcggaagctctggtgaacagaaactgatttcagaag

SEQ ID NO: 1651 - protein, 7 aa, Artificial Sequence
  Synthetic
DYCMDCF

SEQ ID NO: 1652 - protein, 5 aa, Artificial Sequence
  Synthetic
PYSFK

SEQ ID NO: 1653 - protein, 10 aa, Artificial Sequence
  Synthetic
NPLDPNWTNS

SEQ ID NO: 1654 - protein, 121 aa, Artificial Sequence
  Synthetic
EVQLVESGGGLVQAGDSLRLSCAAGGDYCMDCFMGWFRQAPGKEREFVAAITPYSFKTYYVDSVKGRFTISRDDARNTVYLQMNSLKPEDTAVYYCAANPLDPNWTNSDYWGQGTQVTVSS

SEQ ID NO: 1655 - DNA, 416 bp, Artificial Sequence
  Synthetic
aaggagatataccatggaagttcaactggttgaatctggtggcggtttagttcaagccggtgatagccttcgtctgagctgcgccgcaggcggagattactgcatggattgctttatgggttggtttcgccaggcacctggtaaagaacgtgaatttgtggcagccattaccccctattcctttaagacctactatgtcgattctgttaaaggtcgcttcactatttcacgcgatgatgcgcgtaataccgtgtacttacagatgaactcactgaaacctgaggataccgccgtttattattgtgcggcaaaccctctggaccccaactggactaattctgactattggggtcagggcacacaagtcacggtctcaagcggcggaagctctggtgaacagaaactgatttcagaag

SEQ ID NO: 1656 - protein, 7 aa, Artificial Sequence
  Synthetic
DYCMDCF

SEQ ID NO: 1657 - protein, 5 aa, Artificial Sequence
  Synthetic
PYSFK

SEQ ID NO: 1658 - protein, 6 aa, Artificial Sequence
  Synthetic
DICAGS

SEQ ID NO: 1659 - protein, 117 aa, Artificial Sequence
  Synthetic
EVQLVESGGGLVQAGDSLRLSCAASGDYCMDCFMGWFRQAPGKEREFVAAITPYSFKTYYADSVKGRFTISRDDARNTVYLQMNSLKPEDTAVYYCAADICAGSDSWGQGTQVTVSS

SEQ ID NO: 1660 - DNA, 396 bp, Artificial Sequence
  Synthetic
ataccatggaagttcaactggttgaatctggtggcggtttagttcaagccggtgatagccttcgtctgagctgcgccgcaagcggagattactgcatggattgctttatgggttggtttcgccaggcacctggtaaagaacgtgaatttgtggcagccattaccccctattcctttaagacctactatgccgattctgttaaaggtcgcttcactatttcacgcgacgatgcgcgtaataccgtgtacttacagatgaactcactgaaacctgaggataccgccgtttattattgtgcggcagacatttgtgctggcagcgactcttggggtcagggcacacaagtcacggtctcaagcggcggaagctctggtgaacagaaactgatttcagaag

SEQ ID NO: 1661 - protein, 7 aa, Artificial Sequence
  Synthetic
DYCMDCF

SEQ ID NO: 1662 - protein, 5 aa, Artificial Sequence
  Synthetic
PYSFK

SEQ ID NO: 1663 - protein, 10 aa, Artificial Sequence
  Synthetic
NPLDPNWTNS

SEQ ID NO: 1664 - protein, 121 aa, Artificial Sequence
  Synthetic
EVQLVESGGGLVHAGDRLRLSCAAGGDYCMDCFMGWFRQAPGKEREFVAAITPYSFKTYYADSVKGRFTISRDDARNTVYLQMNSLKPEDTAVYYCAANPLDPNWTNSDYWGQGTQVTVSS

SEQ ID NO: 1665 - DNA, 417 bp, Artificial Sequence
  Synthetic
gaaggagatataccatggaagttcaactggttgaatctggtggcggtttagttcacgccggtgatcgccttcgtctgagctgcgccgcaggcggagattactgcatggattgctttatgggttggtttcgccaggcacctggtaaagaacgtgaatttgtggcagccattaccccctattcctttaagacctactatgccgattctgttaaaggtcgcttcactatttcacgcgatgatgcgcgtaataccgtgtacttacagatgaactcactgaaacctgaggataccgccgtttattattgtgcggcaaaccctctggaccccaactggactaattctgactattggggtcagggcacacaagtcacggtctcaagcggcggaagctctggtgaacagaaactgatttcagaag

SEQ ID NO: 1666 - protein, 7 aa, Artificial Sequence
  Synthetic
DYCMDCF

SEQ ID NO: 1667 - protein, 5 aa, Artificial Sequence
  Synthetic
PYSFK

SEQ ID NO: 1668 - protein, 10 aa, Artificial Sequence
  Synthetic
PLNIGTATIA

SEQ ID NO: 1669 - protein, 121 aa, Artificial Sequence
  Synthetic
EVQLVESGGGLVKAGDSLRLSCAASGDYCMDCFMGWFRQAPGKEREFVAAITPYSFKTYYADSVKGRFTISRDDARNTVYLQMNSLKPEDTAVYYCAAPLNIGTATIADYWGQGTQVTVSS

SEQ ID NO: 1670 - DNA, 415 bp, Artificial Sequence
  Synthetic
aggagatataccatggaagttcaactggttgaatctggtggcggtttagttaaagccggtgatagccttcgtctgagctgcgccgcaagcggagattactgcatggattgctttatgggttggtttcgccaggcacctggtaaagaacgtgaatttgtggcagccattaccccctattcctttaagacctactatgccgattctgttaaaggtcgcttcactatttcacgcgatgatgcgcgtaataccgtgtacttacagatgaactcactgaaacctgaggataccgccgtttattattgtgcggcacccctcaatatcggcaccgcgacgattgccgactattggggtcagggcacacaagtcacggtctcaagcggcggaagctctggtgaacagaaactgatttcagaag

SEQ ID NO: 1671 - protein, 7 aa, Artificial Sequence
  Synthetic
DYCMDCF

SEQ ID NO: 1672 - protein, 5 aa, Artificial Sequence
  Synthetic
PYSFK

SEQ ID NO: 1673 - protein, 10 aa, Artificial Sequence
  Synthetic
PVISFAADGW

SEQ ID NO: 1674 - protein, 121 aa, Artificial Sequence
  Synthetic
EVQLVESGGGLVQAGDSLRLSCAASGDYCMDCFMGWFRQAPGKEREFVAAITPYSFKTYYADSVKGRFTISRDDARNTVYLQMNSLKPEDTAVYYCAAPVISFAADGWAYWGQGTQVTVSS

SEQ ID NO: 1675 - DNA, 415 bp, Artificial Sequence
  Synthetic
aggagatataccatggaagttcaactggttgaatctggtggcggtttagttcaagccggtgatagccttcgtctgagctgcgccgcaagcggagattactgcatggattgctttatgggttggtttcgccaggcacctggtaaagaacgtgaatttgtggcagccattaccccctattcctttaagacctactatgccgattctgttaaaggtcgcttcactatttcacgcgatgatgcgcgtaataccgtgtacttacagatgaactcactgaaacctgaggataccgccgtttattattgtgcggcacccgtcatctcctttgctgcggacggctgggcctattggggtcagggcacacaagtcacggtttcaagcggcggaagctctggtgaacagaaactgatttcagaag

SEQ ID NO: 1676 - protein, 7 aa, Artificial Sequence
  Synthetic
DYCMDCF

SEQ ID NO: 1677 - protein, 5 aa, Artificial Sequence
  Synthetic
PYSFK

SEQ ID NO: 1678 - protein, 10 aa, Artificial Sequence
  Synthetic
DSLILANSQW

SEQ ID NO: 1679 - protein, 121 aa, Artificial Sequence
  Synthetic
EVQLFESGGGLVQAGDSLRLSCAASGDYCMDCFMGWFRQAPGKEREFVAAITPYSFKTYYADSVKGRFTISRDDARNTVYLQMNSLKPEDTAVYYCAADSLILANSQWDYWGQGTQVTVSS

SEQ ID NO: 1680 - DNA, 410 bp, Artificial Sequence
  Synthetic
atataccatggaagttcaactgtttgaatctggtggcggtttagttcaagccggtgatagccttcgtctgagctgcgccgcaagcggagattactgcatggattgctttatgggttggtttcgccaggcacctggtaaagaacgtgaatttgtggcagccattaccccctattcctttaagacctactatgccgattctgttaaaggtcgcttcactatttcacgcgatgatgcgcgtaataccgtgtacttacagatgaactcactgaaacctgaggataccgccgtttattattgtgcggcagacagccttattttggctaattctcagtgggactattggggtcagggcacacaagtcacggtctcaagcggcggaagctctggtgaacagaaactgatttcagaag

SEQ ID NO: 1681 - protein, 7 aa, Artificial Sequence
  Synthetic
DYCMDCF

SEQ ID NO: 1682 - protein, 5 aa, Artificial Sequence
  Synthetic
PYSFK

SEQ ID NO: 1683 - protein, 10 aa, Artificial Sequence
  Synthetic
NPLDPNWTNS

SEQ ID NO: 1684 - protein, 121 aa, Artificial Sequence
  Synthetic
EVQLVDSGGGLVQAGDSLRLSCAASGDYCMDCFMGWFRQAPGKEREFVAAITPYSFKTYYADSVKGRFTISRDDARNTVYLQMNSLKPEDTAVYYCAANPLDPNWTNSDYWGQGTQVTVSS

SEQ ID NO: 1685 - DNA, 417 bp, Artificial Sequence
  Synthetic
gaaggagatataccatggaagttcaactggttgactctggtggcggtttagttcaagccggtgatagccttcgtctgagctgcgccgcaagcggagattactgcatggattgctttatgggttggtttcgccaggcacctggtaaagaacgtgaatttgtggcagccattaccccctattcctttaagacctactatgccgattctgttaaaggtcgcttcactatttcacgcgatgatgcgcgtaataccgtgtacttacagatgaactcactgaaacctgaggataccgccgtttattattgtgcggcaaaccctctggaccccaactggactaattctgactattggggtcagggcacacaagtcacggtctcaagcggcggaagctctggtgaacagaaactgatttcagaag

SEQ ID NO: 1686 - protein, 7 aa, Artificial Sequence
  Synthetic
DYCMDCF

SEQ ID NO: 1687 - protein, 5 aa, Artificial Sequence
  Synthetic
PYSFK

SEQ ID NO: 1688 - protein, 10 aa, Artificial Sequence
  Synthetic
NPLDPNWTNS

SEQ ID NO: 1689 - protein, 121 aa, Artificial Sequence
  Synthetic
EVQLFESGGGLVQAGDSLRLSCAASGDYCMDCFMGWFRQAPGKEREFVAAITPYSFKTYYADSVKGRFTISRDDARNTVYLQMNSLKPEDTAVYYCAANPLDPNWTNSDYWGQGTQVTVSS

SEQ ID NO: 1690 - DNA, 412 bp, Artificial Sequence
  Synthetic
agatataccatggaagttcaactgtttgaatctggtggcggtttagttcaagccggtgatagccttcgtctgagctgcgccgcaagcggagattactgcatggattgctttatgggttggtttcgccaggcacctggtaaagaacgtgaatttgtggcagccattaccccctattcctttaagacctactatgccgattctgttaaaggtcgcttcactatttcacgcgatgatgcgcgtaataccgtgtacttacagatgaactcactgaaacctgaggataccgccgtttattattgtgcggcaaaccctctggaccccaactggactaattctgactattggggtcagggcacacaagtcacggtctcaagcggcggaagctctggtgaacagaaactgatttcagaag

SEQ ID NO: 1691 - protein, 7 aa, Artificial Sequence
  Synthetic
DYCMDCF

SEQ ID NO: 1692 - protein, 5 aa, Artificial Sequence
  Synthetic
PYSFK

SEQ ID NO: 1693 - protein, 10 aa, Artificial Sequence
  Synthetic
SANILHLSVI

SEQ ID NO: 1694 - protein, 121 aa, Artificial Sequence
  Synthetic
EVQLVASGGGLVQAGDSLRLSCAASGDYCMDCFMGWFRQAPGKEREFVAAITPYSFKTYYADSVKGRFTISRDDARNTVYLQMNSLKPEDTAVYYCAASANILHLSVINYWGQGTQVTVSS

SEQ ID NO: 1695 - DNA, 418 bp, Artificial Sequence
  Synthetic
agaaggagatataccatggaagttcaactggttgcatctggtggcggtttagttcaagccggtgatagccttcgtctgagctgcgccgcaagcggagattactgcatggattgctttatgggttggtttcgccaggcacctggtaaagaacgtgaatttgtggcagccattaccccctattcctttaagacctactatgccgattctgttaaaggtcgcttcactatttcacgcgatgatgcgcgtaataccgtgtacttacagatgaactcactgaaacctgaggataccgccgtttattattgtgcggcaagcgcgaacattctccatttgtctgttatcaactattggggtcagggcacacaagtcacggtctcaagcggcggaagctctggtgaacagaaactgatttcagaag

SEQ ID NO: 1696 - protein, 7 aa, Artificial Sequence
  Synthetic
DYCMDCF

SEQ ID NO: 1697 - protein, 5 aa, Artificial Sequence
  Synthetic
PYSFK

SEQ ID NO: 1698 - protein, 10 aa, Artificial Sequence
  Synthetic
GRLRLTGSGC

SEQ ID NO: 1699 - protein, 121 aa, Artificial Sequence
  Synthetic
EVQLVESGGGLVQAGDSLRLSCAASGDYCMDCFMGWFRQAPGKEREFVAAITPYSFKTYYADSVKGRFTISRDDARNTVYLQMNSLKPEDTAVYYCAAGRLRLTGSGCDYWGQGTQVTVSS

SEQ ID NO: 1700 - DNA, 406 bp, Artificial Sequence
  Synthetic
accatggaagttcaactggttgaatctggtggcggtttagttcaagccggtgatagccttcgtctgagctgcgccgcaagcggagattactgcatggattgctttatgggttggtttcgccaggcacctggtaaagaacgtgaatttgtggcagccattaccccctattcctttaagacctactatgccgattctgttaaaggtcgcttcactatttcacgcgatgatgcgcgtaataccgtgtacttacagatgaactcactgaaacctgaggataccgccgtttattattgtgcggcaggtcgccttcgcctcactggcagtggctgtgactattggggtcagggcacacaagtcacggtctcaagcggcggaagctctggtgaacagaaactgatttcagaag

SEQ ID NO: 1701 - protein, 7 aa, Artificial Sequence
  Synthetic
DYCMDCF

SEQ ID NO: 1702 - protein, 5 aa, Artificial Sequence
  Synthetic
PYSFK

SEQ ID NO: 1703 - protein, 10 aa, Artificial Sequence
  Synthetic
VPNVTWSERA

SEQ ID NO: 1704 - protein, 121 aa, Artificial Sequence
  Synthetic
EVQLVESGGGLVQAGDSLRLSCAASGDYCMDCFMGWFRQAPGKEREFVAAITPYSFKTYYADSVKGRFTISRDDARNTVYLQMNSLKPEDTAVYYCAAVPNVTWSERADYWGQGTQVTASS

SEQ ID NO: 1705 - DNA, 406 bp, Artificial Sequence
  Synthetic
accatggaagttcaactggttgaatctggtggcggtttagttcaagccggtgatagccttcgtctgagctgcgccgcaagcggagattactgcatggattgctttatgggttggtttcgccaggcacctggtaaagaacgtgaatttgtggcagccattaccccctattcctttaagacctactatgccgattctgttaaaggtcgcttcactatttcacgcgatgatgcgcgtaataccgtgtacttacagatgaactcactgaaacctgaggataccgccgtttattattgtgcggcagtccccaatgtgacctggtccgagagggctgactattggggtcagggcacacaagtcacggcctcaagcggcggaagctctggtgaacagaaactgatttcagaag

SEQ ID NO: 1706 - protein, 7 aa, Artificial Sequence
  Synthetic
DYCMDCF

SEQ ID NO: 1707 - protein, 5 aa, Artificial Sequence
  Synthetic
PYSFK

SEQ ID NO: 1708 - protein, 10 aa, Artificial Sequence
  Synthetic
PLNIGTATIA

SEQ ID NO: 1709 - protein, 121 aa, Artificial Sequence
  Synthetic
EVQLVESGGVLVQAGDSLRLSCAASGDYCMDCFMGWFRQAPGKEREFVAAITPYSFKTYYADSVKGRFTISRDDARNTVYLQMNSLKPEDTAVYYCAAPLNIGTATIAAYWGQGTQVTVSS

SEQ ID NO: 1710 - DNA, 406 bp, Artificial Sequence
  Synthetic
accatggaagttcaactggttgaatctggtggcgttttagttcaagccggtgatagccttcgtctgagctgcgccgcaagcggagattactgcatggattgctttatgggttggtttcgccaggcacctggtaaagaacgtgaatttgtggcagccattaccccctattcctttaagacctactatgccgattctgttaaaggtcgcttcactatttcacgcgatgatgcgcgtaataccgtgtacttacagatgaactcactgaaacctgaggataccgccgtttattattgtgcggcacccctcaatatcggcaccgcgacgattgccgcctattggggtcagggcacacaagtcacggtctcaagcggcggaagctctggtgaacagaaactgatttcagaag

SEQ ID NO: 1711 - protein, 7 aa, Artificial Sequence
  Synthetic
DYCMDCF

SEQ ID NO: 1712 - protein, 5 aa, Artificial Sequence
  Synthetic
PYSFK

SEQ ID NO: 1713 - protein, 10 aa, Artificial Sequence
  Synthetic
DSLILANSQW

SEQ ID NO: 1714 - protein, 121 aa, Artificial Sequence
  Synthetic
EVQLVESGGGLVQAGDSLRLSCAASGDYCMDCFMGWFRQAPGKEREFVAAITPYSFKTYYADSVKGRFTISRDDVRNTVYLQMNSLKPEDTAVYYCAADSLILANSQWDYWGQGTQVTVSS

SEQ ID NO: 1715 - DNA, 414 bp, Artificial Sequence
  Synthetic
ggagatataccatggaagttcaactggttgaatctggtggcggtttagttcaagccggtgatagccttcgtctgagctgcgccgcaagcggagattactgcatggattgctttatgggttggtttcgccaggcacctggtaaagaacgtgaatttgtggcagccattaccccctattcctttaagacctactatgccgattctgttaaaggtcgcttcactatttcacgcgatgatgtgcgtaataccgtgtacttacagatgaactcactgaaacctgaggataccgccgtttattattgtgcggcagacagccttattttggctaattctcagtgggactattggggtcagggcacacaagtcacggtctcaagcggcggaagctctggtgaacagaaactgatttcagaag

SEQ ID NO: 1716 - protein, 7 aa, Artificial Sequence
  Synthetic
DYCMDCF

SEQ ID NO: 1717 - protein, 5 aa, Artificial Sequence
  Synthetic
PYSFK

SEQ ID NO: 1718 - protein, 10 aa, Artificial Sequence
  Synthetic
LFPPATARWE

SEQ ID NO: 1719 - protein, 121 aa, Artificial Sequence
  Synthetic
EVQLVESGGGLVQAGDSLRLSCAASGDYCMDCFMGWFRQAPGKEREFVAAITPYSFKTYYADSVKGRFTISRDDARNTVYLQMNSLKPEDTAVYYCATLFPPATARWEDYWGQGTQVTVSS

SEQ ID NO: 1720 - DNA, 408 bp, Artificial Sequence
  Synthetic
ataccatggaagttcaactggttgaatctggtggcggtttagttcaagccggtgatagccttcgtctgagctgcgccgcaagcggagattactgcatggattgctttatgggttggtttcgccaggcacctggtaaagaacgtgaatttgtggcagccattaccccctattcctttaagacctactatgccgattctgttaaaggtcgcttcactatttcacgcgatgatgcgcgtaataccgtgtacttacagatgaactcactgaaacctgaggataccgccgtttattattgtgcgacactttttcccccggcgactgctaggtgggaggactattggggtcagggcacacaagtcacggtctcaagcggcggaagctctggtgaacagaaactgatttcagaag

SEQ ID NO: 1721 - protein, 7 aa, Artificial Sequence
  Synthetic
DYCMDCF

SEQ ID NO: 1722 - protein, 5 aa, Artificial Sequence
  Synthetic
PYSFK

SEQ ID NO: 1723 - protein, 10 aa, Artificial Sequence
  Synthetic
LETTKHGCQT

SEQ ID NO: 1724 - protein, 121 aa, Artificial Sequence
  Synthetic
EVQLVESGGGLVQAGDSLRLSCAASGDYCMDCFMGWFRQAPGKEREFVAAITPYSFKTYYADSVKGRFTISRDDARNTVYLQMNSLKPEDTAVYYCAALETTKHGCQTDSWGQGTQVTVSS

SEQ ID NO: 1725 - DNA, 408 bp, Artificial Sequence
  Synthetic
ataccatggaagttcaactggttgaatctggtggcggtctagttcaagccggtgatagccttcgtctgagctgcgccgcaagcggagattactgcatggattgctttatgggttggtttcgccaggcacctggtaaagaacgtgaatttgtggcagccattaccccctattcctttaagacctactatgccgattctgttaaaggtcgcttcactatttcacgcgatgatgcgcgtaataccgtgtacttacagatgaactcactgaaacctgaggataccgccgtttattattgtgcggcactcgagactactaagcacgggtgccagacggactcttggggtcagggcacacaagtcacggtctcaagcggcggaagctctggtgaacagaaactgatttcagaag

SEQ ID NO: 1726 - protein, 7 aa, Artificial Sequence
  Synthetic
DYCMDCF

SEQ ID NO: 1727 - protein, 5 aa, Artificial Sequence
  Synthetic
PYSFK

SEQ ID NO: 1728 - protein, 10 aa, Artificial Sequence
  Synthetic
NPLDPNWTNS

SEQ ID NO: 1729 - protein, 121 aa, Artificial Sequence
  Synthetic
EVQLVESGGGLVHAGDRLRLSCAASGDYCMDCFMGWFRQAPGKEREFVAAITPYSFKTYYADSVKGRFTISRDDARNTVYLQMNSLKPEDTAVYYCAANPLDPNWTNSDYWGQGTQVTVSS

SEQ ID NO: 1730 - DNA, 417 bp, Artificial Sequence
  Synthetic
gaaggagatataccatggaagttcaactggttgaatctggtggcggtttagttcacgccggtgatcgccttcgtctgagctgcgccgcaagcggagattactgcatggattgctttatgggttggtttcgccaggcacctggtaaagaacgtgaatttgtggcagccattaccccctattcctttaagacctactatgccgattctgttaaaggtcgcttcactatttcacgcgatgatgcgcgtaataccgtgtacttacagatgaactcactgaaacctgaggataccgccgtttattattgtgcggcaaaccctctggaccccaactggactaattctgactattggggtcagggcacacaagtcacggtctcaagcggcggaagctctggtgaacagaaactgatttcagaag

SEQ ID NO: 1731 - protein, 7 aa, Artificial Sequence
  Synthetic
DYCMDCF

SEQ ID NO: 1732 - protein, 5 aa, Artificial Sequence
  Synthetic
PYSFK

SEQ ID NO: 1733 - protein, 10 aa, Artificial Sequence
  Synthetic
DSLILANSQW

SEQ ID NO: 1734 - protein, 121 aa, Artificial Sequence
  Synthetic
EIQLVESGGGLVQAGDSLRLSCAASGDYCMDCFMGWFRQAPGKEREFVAAITPYSFKTYYADSVKGRFTISRDDARNTVYLQMNSLKPEDTAVYYCAADSLILANSQWDYWGQGTQVTVSG

SEQ ID NO: 1735 - DNA, 415 bp, Artificial Sequence
  Synthetic
aggagatataccatggaaattcaactggttgaatctggtggcggtttagttcaagccggtgatagccttcgtctgagctgcgccgcaagcggagattactgcatggattgctttatgggttggtttcgccaggcacctggtaaagaacgtgaatttgtggcagccattaccccctattcctttaagacctactatgccgattctgttaaaggtcgcttcactatttcacgcgatgatgcgcgtaataccgtgtacttacagatgaactcactgaaacctgaggataccgccgtttattattgtgcggcagacagccttattttggctaattctcagtgggactattggggtcagggcacacaagtcacggtctcaggcggcggaagctctggtgaacagaaactgatttcagaag

SEQ ID NO: 1736 - protein, 7 aa, Artificial Sequence
  Synthetic
DYCMDCF

SEQ ID NO: 1737 - protein, 5 aa, Artificial Sequence
  Synthetic
PYSFK

SEQ ID NO: 1738 - protein, 13 aa, Artificial Sequence
  Synthetic
GDPMIPKLWDSGR

SEQ ID NO: 1739 - protein, 124 aa, Artificial Sequence
  Synthetic
EVQLVESGGGLVQAGDSLRLSCAASGDYCMDCFMGWFRQAPGKEREFVAAITPYSFKTYYADSVKGRFTISRDDARNTVYLQMNSLKPEDTAVYYCARGDPMIPKLWDSGRDYWGQGTQVTVSS

SEQ ID NO: 1740 - DNA, 424 bp, Artificial Sequence
  Synthetic
aggagatataccatggaagttcaactggttgaatctggtggcggtttagttcaagccggtgatagccttcgtctgagctgcgccgcaagcggagattactgcatggattgctttatgggttggtttcgccaggcacctggtaaagaacgtgaatttgtggcagccattaccccctattcctttaagacctactatgccgattctgttaaaggtcgcttcactatttcacgcgatgatgcgcgtaataccgtgtacttacagatgaactcactgaaacctgaggataccgccgtttattattgtgcgcgtggggacccgatgatcccgaagttgtgggattcggggcgtgactattggggtcagggcacacaagtcacggtctcaagcggcggaagctctggtgaacagaaactgatttcagaag

SEQ ID NO: 1741 - protein, 7 aa, Artificial Sequence
  Synthetic
DYCMDCF

SEQ ID NO: 1742 - protein, 5 aa, Artificial Sequence
  Synthetic
PYSFK

SEQ ID NO: 1743 - protein, 10 aa, Artificial Sequence
  Synthetic
QVSLVTHGDL

SEQ ID NO: 1744 - protein, 121 aa, Artificial Sequence
  Synthetic
EVQLVDSGGGLVHAGDRLRLSCAASGDYCMDCFMGWFRQAPGKEREFVAAITPYSFKTYYADSVKGRFTISRDDARNTVYLQMNSLKPEDTAVYYCAAQVSLVTHGDLDSWGQGTQVTVSS

SEQ ID NO: 1745 - DNA, 417 bp, Artificial Sequence
  Synthetic
gaaggagatataccatggaagttcaactggttgactctggtggcggtttagttcacgccggtgatcgccttcgtctgagctgcgccgcaagcggagattactgcatggattgctttatgggttggtttcgccaggcacctggtaaagaacgtgaatttgtggcagccattaccccctattcctttaagacctactatgccgattctgttaaaggtcgcttcactatttcacgcgatgatgcgcgtaataccgtgtacttacagatgaactcactgaaacctgaggataccgccgtttattattgtgcggcacaggtctcccttgttacccatggggatctggactcttggggtcagggcacacaagtcacggtctcaagcggcggaagctctggtgaacagaaactgatttcagaag

SEQ ID NO: 1746 - protein, 7 aa, Artificial Sequence
  Synthetic
DYCMDCF

SEQ ID NO: 1747 - protein, 5 aa, Artificial Sequence
  Synthetic
PYSFK

SEQ ID NO: 1748 - protein, 10 aa, Artificial Sequence
  Synthetic
NPLDPNWTNS

SEQ ID NO: 1749 - protein, 121 aa, Artificial Sequence
  Synthetic
EVQLVESGGGLVQVGDSLRLSCAASGDYCMDCFMGWFRQAPGKEREFVAAITPYSFKTYYADSVKGRFTISRDDARNTVYLQMNSLKPEDTAVYYCAANPLDPNWTNSDYWGQGTQVTVSS

SEQ ID NO: 1750 - DNA, 408 bp, Artificial Sequence
  Synthetic
ataccatggaagttcaactggttgaatctggtggcggtttagttcaagtcggtgatagccttcgtctgagctgcgccgcaagcggagattactgcatggattgctttatgggttggtttcgccaggcacctggtaaagaacgtgaatttgtggcagccattaccccctattcctttaagacctactatgccgattctgttaaaggtcgcttcactatttcacgcgatgatgcgcgtaataccgtgtacttacagatgaactcactgaaacctgaggataccgccgtttattattgtgcggcaaaccctctggaccccaactggactaattctgactattggggtcagggcacacaagtcacggtctcaagcggcggaagctctggtgaacagaaactgatttcagaag

SEQ ID NO: 1751 - protein, 7 aa, Artificial Sequence
  Synthetic
DYCMDCF

SEQ ID NO: 1752 - protein, 5 aa, Artificial Sequence
  Synthetic
PYSFK

SEQ ID NO: 1753 - protein, 10 aa, Artificial Sequence
  Synthetic
NPLDPNWTNS

SEQ ID NO: 1754 - protein, 121 aa, Artificial Sequence
  Synthetic
EVQLVESGGGLVQAGDSLRLSCAAGGDYCMDCFMGWFRQAPGKEREFVAAITPYSFKTYYADSVKGRFTISRDDARNTVYLQMNSLKPEDTAVYYCAANPLDPNWTNSDYWGQGSQVTVSS

SEQ ID NO: 1755 - DNA, 408 bp, Artificial Sequence
  Synthetic
ataccatggaagttcaactggttgaatctggtggcggtttagttcaagccggtgatagccttcgtctgagctgcgccgcaggcggagattactgcatggattgctttatgggttggtttcgccaggcacctggtaaagaacgtgaatttgtggcagccattaccccctattcctttaagacctactatgccgattctgttaaaggtcgcttcactatttcacgcgatgatgcgcgtaataccgtgtacttacagatgaactcactgaaacctgaggataccgccgtttattattgtgcggcaaaccctctggaccccaactggactaattctgactattggggtcagggctcacaagtcacggtctcaagcggcggaagctctggtgaacagaaactgatttcagaag

SEQ ID NO: 1756 - protein, 7 aa, Artificial Sequence
  Synthetic
DYCMDCF

SEQ ID NO: 1757 - protein, 5 aa, Artificial Sequence
  Synthetic
PYSFK

SEQ ID NO: 1758 - protein, 10 aa, Artificial Sequence
  Synthetic
SMYLNNISIS

SEQ ID NO: 1759 - protein, 121 aa, Artificial Sequence
  Synthetic
EVRLVESGGGLVQAGDSLRLSCAASGDYCMDCFMGWFRQAPGKEREFVAAITPYSFKTYYADSVKGRFTISRDDARNTVYLQMNSLKPEDTAVYYCAASMYLNNISISDYWGQGTQVTVSS

SEQ ID NO: 1760 - DNA, 410 bp, Artificial Sequence
  Synthetic
accatggaagttcgactggttgaatctggtggcggtttagttcaagccggtgatagccttcgtctgagctgcgccgcaagcggagattactgcatggattgctttatgggttggtttcgccaggcacctggtaaagaacgtgaatttgtggcagccattaccccctattcctttaagacctactatgccgattctgttaaaggtcgcttcactatttcacgcgatgatgcgcgtaataccgtgtacttacagatgaactcactgaaacctgaggataccgccgtttattattgtgcggcatctatgtacctgaacaatatcagcattagtgactattggggtcagggcacacaagtcacggtctcaagcggcggaagctctggtgaacagaaactgatttcagaagccaa

SEQ ID NO: 1761 - protein, 7 aa, Artificial Sequence
  Synthetic
DYCMDCF

SEQ ID NO: 1762 - protein, 5 aa, Artificial Sequence
  Synthetic
PYSFK

SEQ ID NO: 1763 - protein, 10 aa, Artificial Sequence
  Synthetic
PLNIGTATIA

SEQ ID NO: 1764 - protein, 121 aa, Artificial Sequence
  Synthetic
EVQLVESGGGLVQAGDSLRLSCAASGDYCMDCFMGWFRQAPGKEREFVAAITPYSFKTYYADSVKGRFTISRDDARNTVYLQMNSLKPEDTAVYYCAAPLNIGTATIADYWGQGTQGTVSS

SEQ ID NO: 1765 - DNA, 412 bp, Artificial Sequence
  Synthetic
ataccatggaagttcaactggttgaatctggtggcggtttagttcaagccggtgatagccttcgtctgagctgcgccgcaagcggagattactgcatggattgctttatgggttggtttcgccaggcacctggtaaagaacgtgaatttgtggcagccattaccccctattcctttaagacctactatgccgattctgttaaaggtcgcttcactatttcacgcgatgatgcgcgtaataccgtgtacttacagatgaactcactgaaacctgaggataccgccgtttattattgtgcggcacccctcaatatcggcaccgcgacgattgccgactattggggtcagggcacacaaggcacggtctcaagcggcggaagctctggtgaacagaaactgatttcagaagccaa

SEQ ID NO: 1766 - protein, 7 aa, Artificial Sequence
  Synthetic
DYCMDCF

SEQ ID NO: 1767 - protein, 5 aa, Artificial Sequence
  Synthetic
PYSFK

SEQ ID NO: 1768 - protein, 10 aa, Artificial Sequence
  Synthetic
NPLDPNWTNS

SEQ ID NO: 1769 - protein, 121 aa, Artificial Sequence
  Synthetic
EVQLVESGGGLVQAGDSLRLSCAASGDYCMDCFMGWFRQAPGKEREFVAAITPYSFKTYYDDSVKGRFTISRDDARNTVYLQMNSLKPEDTAVYYCAANPLDPNWTNSDYWGQGTQGSVSS

SEQ ID NO: 1770 - DNA, 419 bp, Artificial Sequence
  Synthetic
aggagatataccatggaagttcaactggttgaatctggtggcggtttagttcaagccggtgatagccttcgtctgagctgcgccgcaagcggagattactgcatggattgctttatgggttggtttcgccaggcacctggtaaagaacgtgaatttgtggcagccattaccccctattcctttaagacctactatgacgattctgttaaaggtcgcttcactatttcacgcgatgatgcgcgtaataccgtgtacttacagatgaactcactgaaacctgaggataccgccgtttattattgtgcggcaaaccctctggaccccaactggactaattctgactattggggtcagggcacacaaggctcggtctcaagcggcggaagctctggtgaacagaaactgatttcagaagccaa

SEQ ID NO: 1771 - protein, 7 aa, Artificial Sequence
  Synthetic
DYCMDCF

SEQ ID NO: 1772 - protein, 5 aa, Artificial Sequence
  Synthetic
PYSFK

SEQ ID NO: 1773 - protein, 10 aa, Artificial Sequence
  Synthetic
QVSLVTHGDL

SEQ ID NO: 1774 - protein, 121 aa, Artificial Sequence
  Synthetic
EVQLVESGGGLVQAGDSLRLSCAASGDYCMDCFMGWFRQAPGKEREFVAAITPYSFKTYYADSVKGRFTISRDDARNTVYLQMNSLKPEDTAVYYCAAQVSLVTHGDLDYWGQGTQGTVSS

SEQ ID NO: 1775 - DNA, 419 bp, Artificial Sequence
  Synthetic
aggagatataccatggaagttcaactggttgaatctggtggcggtttagttcaagccggtgatagccttcgtctgagctgcgccgcaagcggagattactgcatggattgctttatgggttggtttcgccaggcacctggtaaagaacgtgaatttgtggcagccattaccccctattcctttaagacctactatgccgattctgttaaaggtcgcttcactatttcacgcgatgatgcgcgtaataccgtgtacttacagatgaactcactgaaacctgaggataccgccgtttattattgtgcggcacaggtctcccttgttacccatggggatctggactattggggtcagggcacacaaggcacggtctcaagcggcggaagctctggtgaacagaaactgatttcagaagccaa

SEQ ID NO: 1776 - protein, 7 aa, Artificial Sequence
  Synthetic
DYCMDCF

SEQ ID NO: 1777 - protein, 5 aa, Artificial Sequence
  Synthetic
PYSFK

SEQ ID NO: 1778 - protein, 10 aa, Artificial Sequence
  Synthetic
NPLDPNWTNS

SEQ ID NO: 1779 - protein, 121 aa, Artificial Sequence
  Synthetic
EVQLVESGGGLVQAGDSLRLSCAAGGDYCMDCFMGWFRQAPGKEREFVAAITPYSFKTYYADSVKGRFTISRDDARNTVYLQMNSLKPEDTAVYYCAANPLDPNWTNSDYWGQGTQGTVSS

SEQ ID NO: 1780 - DNA, 418 bp, Artificial Sequence
  Synthetic
ggagatataccatggaagttcaactggttgaatctggtggcggtttagttcaagccggtgatagccttcgtctgagctgcgccgcaggcggagattactgcatggattgctttatgggttggtttcgccaggcacctggtaaagaacgtgaatttgtggcagccattaccccctattcctttaagacctactatgccgattctgttaaaggtcgcttcactatttcacgcgatgatgcgcgtaataccgtgtacttacagatgaactcactgaaacctgaggataccgccgtttattattgtgcggcaaaccctctggaccccaactggactaattctgactattggggtcagggcacacaaggcacggtctcaagcggcggaagctctggtgaacagaaactgatttcagaagccaa

SEQ ID NO: 1781 - protein, 7 aa, Artificial Sequence
  Synthetic
DYCMDCF

SEQ ID NO: 1782 - protein, 5 aa, Artificial Sequence
  Synthetic
PYSFK

SEQ ID NO: 1783 - protein, 10 aa, Artificial Sequence
  Synthetic
PLNIGTATIA

SEQ ID NO: 1784 - protein, 121 aa, Artificial Sequence
  Synthetic
EVQLVESGGGLVQAGDSLRLSCAASGDYCMDCFMGWFRQAPGKEREFVAAITPYSFKTYYVDSVKGRFTISRDDARNTVYLQMNSLKPEDTAVYYCAAPLNIGTATIADYWGQGTQVTVSS

SEQ ID NO: 1785 - DNA, 416 bp, Artificial Sequence
  Synthetic
agatataccatggaagttcaactggttgaatctggtggcggtttagttcaagccggtgatagccttcgtctgagctgcgccgcaagcggagattactgcatggattgctttatgggttggtttcgccaggcacctggtaaagaacgtgaatttgtggcagccattaccccctattcctttaagacctactatgtcgattctgttaaaggtcgcttcactatttcacgcgatgatgcgcgtaataccgtgtacttacagatgaactcactgaaacctgaggataccgccgtttattattgtgcggcacccctcaatatcggcaccgcgacgattgccgactattggggtcagggcacacaagtcacggtctcaagcggcggaagctctggtgaacagaaactgatttcagaagccaa

SEQ ID NO: 1786 - protein, 7 aa, Artificial Sequence
  Synthetic
DYCMDCF

SEQ ID NO: 1787 - protein, 5 aa, Artificial Sequence
  Synthetic
PYSFK

SEQ ID NO: 1788 - protein, 10 aa, Artificial Sequence
  Synthetic
LFPPATARWE

SEQ ID NO: 1789 - protein, 121 aa, Artificial Sequence
  Synthetic
EVQLVESGGGLVQAGDSLRLSCATSGDYCMDCFMGWFRQAPGKEREFVAAITPYSFKTYYADSVKGRFTISRDDARNTVYLQMNSLKPEDTAVYYCATLFPPATARWEDYWGQGTQVTVSS

SEQ ID NO: 1790 - DNA, 419 bp, Artificial Sequence
  Synthetic
aggagatataccatggaagttcaactggttgaatctggtggcggtttagttcaagccggtgatagccttcgtctgagctgcgccacaagcggagattactgcatggattgctttatgggttggtttcgccaggcacctggtaaagaacgtgaatttgtggcagccattaccccctattcctttaagacctactatgccgattctgttaaaggtcgcttcactatttcacgcgatgatgcgcgtaataccgtgtacttacagatgaactcactgaaacctgaggataccgccgtttattattgtgcgacactttttcccccggcgactgctaggtgggaggactattggggtcagggcacacaagtcacggtctcaagcggcggaagctctggtgaacagaaactgatttcagaagccaa

SEQ ID NO: 1791 - protein, 7 aa, Artificial Sequence
  Synthetic
DYCMDCF

SEQ ID NO: 1792 - protein, 5 aa, Artificial Sequence
  Synthetic
PYSFK

SEQ ID NO: 1793 - protein, 10 aa, Artificial Sequence
  Synthetic
NPLDPNWTNS

SEQ ID NO: 1794 - protein, 121 aa, Artificial Sequence
  Synthetic
EVQLVESGGGLVHAGDSLRLSCAASGDYCMDCFMGWFRQAPGKEREFVAAITPYSFKTYYADSVKGRFTISRDDARNTVYLQMNSLKPEDTAVYYCAANPLDPNWTNSDYWGQGTQGTVSS

SEQ ID NO: 1795 - DNA, 416 bp, Artificial Sequence
  Synthetic
agatataccatggaagttcaactggttgaatctggtggcggtttagttcacgccggtgatagccttcgtctgagctgcgccgcaagcggagattactgcatggattgctttatgggttggtttcgccaggcacctggtaaagaacgtgaatttgtggcagccattaccccctattcctttaagacctactatgccgattctgttaaaggtcgcttcactatttcacgcgatgatgcgcgtaataccgtgtacttacagatgaactcactgaaacctgaggataccgccgtttattattgtgcggcaaaccctctggaccccaactggactaattctgactattgggggcagggcacacaaggcacggtctcaagcggcggaagctctggtgaacagaaactgatttcagaagccaa

SEQ ID NO: 1796 - protein, 7 aa, Artificial Sequence
  Synthetic
DYCMDCF

SEQ ID NO: 1797 - protein, 5 aa, Artificial Sequence
  Synthetic
PYSFK

SEQ ID NO: 1798 - protein, 10 aa, Artificial Sequence
  Synthetic
QVSLVTHGDL

SEQ ID NO: 1799 - protein, 121 aa, Artificial Sequence
  Synthetic
EVQLVESGGGLVQAGDSLRLSCAASGDYCMDCFMGWFRQAPGKEREFAAAITPYSFKTYYADSVKGRFTISRDDARNTVYLQMNSLKPEDTAVYYCAAQVSLVTHGDLDSWGQGTQVTVSS

SEQ ID NO: 1800 - DNA, 410 bp, Artificial Sequence
  Synthetic
accatggaagttcaactggttgaatctggtggcggtttagttcaagccggtgatagccttcgtctgagctgcgccgcaagcggagattactgcatggattgctttatgggttggtttcgccaggcacctggtaaagaacgtgaatttgcggcagccattaccccctattcctttaagacctactatgccgattctgttaaaggtcgcttcactatttcacgcgatgatgcgcgtaataccgtgtacttacagatgaactcactgaaacctgaggataccgccgtttattattgtgcggctcaggtctcccttgttacccatggggatctggactcttggggtcagggcacacaagtcacggtctcaagcggcggaagctctggtgaacagaaactgatttcagaagccaa

SEQ ID NO: 1801 - protein, 7 aa, Artificial Sequence
  Synthetic
DYCMDCF

SEQ ID NO: 1802 - protein, 5 aa, Artificial Sequence
  Synthetic
PYSFK

SEQ ID NO: 1803 - protein, 10 aa, Artificial Sequence
  Synthetic
NPLDPNWTNS

SEQ ID NO: 1804 - protein, 121 aa, Artificial Sequence
  Synthetic
EVQLVDSGGGLVQAGDRLRLSCAASGDYCMDCFMGWFRQAPGKEREFVAAITPYSFKTYYADSVKGRFTISRDDARNTVYLQMNSLKPEDTAVYYCAANPLDPNWTNSDYWGQGTQVTVSS

SEQ ID NO: 1805 - DNA, 421 bp, Artificial Sequence
  Synthetic
gaaggagatataccatggaagttcaactggttgactctggtggcggtttagttcaagccggtgatcgccttcgtctgagctgcgccgcaagcggagattactgcatggattgctttatgggttggtttcgccaggcacctggtaaagaacgtgaatttgtggcagccattaccccctattcctttaagacctactatgccgattctgttaaaggtcgcttcactatttcacgcgatgatgcgcgtaataccgtgtacttacagatgaactcactgaaacctgaggataccgccgtttattattgtgcggcaaaccctctggaccccaactggactaattctgactattggggtcagggcacacaagtcacggtctcaagcggcggaagctctggtgaacagaaactgatttcagaagccaa

SEQ ID NO: 1806 - protein, 7 aa, Artificial Sequence
  Synthetic
DSCMDCF

SEQ ID NO: 1807 - protein, 5 aa, Artificial Sequence
  Synthetic
PYSFK

SEQ ID NO: 1808 - protein, 10 aa, Artificial Sequence
  Synthetic
DSLILANSQW

SEQ ID NO: 1809 - protein, 121 aa, Artificial Sequence
  Synthetic
EVQLVESGGGLVQAGDSLRLSCAASGDSCMDCFMGWFRQAPGKEREFVAAITPYSFKTYYADSVKGRFTISRDDARNTVYLQMNSLKPEDTAVYYCAADSLILANSQWDYWGQGTQVTVSS

SEQ ID NO: 1810 - DNA, 412 bp, Artificial Sequence
  Synthetic
ataccatggaagttcaactggttgaatctggtggcggtttagttcaagccggtgatagccttcgtctgagctgcgccgcaagcggagattcctgcatggattgctttatgggttggtttcgccaggcacctggtaaagaacgtgaatttgtggcagccattaccccctattcctttaagacctactatgccgattctgttaaaggtcgcttcactatttcacgcgatgatgcgcgtaataccgtgtacttacagatgaactcactgaaacctgaggataccgccgtttattattgtgcggcagacagccttattttggctaattctcagtgggactattggggtcagggcacacaagtcacggtctcaagcggcggaagctctggtgaacagaaactgatttcagaagccaa

SEQ ID NO: 1811 - protein, 7 aa, Artificial Sequence
  Synthetic
DYCMDCF

SEQ ID NO: 1812 - protein, 5 aa, Artificial Sequence
  Synthetic
PYSFK

SEQ ID NO: 1813 - protein, 10 aa, Artificial Sequence
  Synthetic
LETTKHGCQT

SEQ ID NO: 1814 - protein, 121 aa, Artificial Sequence
  Synthetic
EVQLVESGGGLVQAGDSLRLSCAASGDYCMDCFMGWFRQAPGKEREFVAAITPYSFKTYYADSVKGRFTISRDDARNTVYLQMNSLKPEDTAVYYCAALETTKHGCQTDYWGQGTQVTVSS

SEQ ID NO: 1815 - DNA, 420 bp, Artificial Sequence
  Synthetic
aaggagatataccatggaagttcaactggttgaatctggtggcggtttagttcaagccggtgatagccttcgtctgagctgcgccgcaagcggagattactgcatggattgctttatgggttggtttcgccaggcacctggtaaagaacgtgaatttgtggcagccattaccccctattcctttaagacctactatgccgattctgttaaaggtcgcttcactatttcacgcgatgatgcgcgtaataccgtgtacttacagatgaactcactgaaacctgaggataccgccgtttattattgtgcggcactcgagactactaagcacgggtgccagacggactattggggtcagggcacacaagtcacggtctcaagcggcggaagctctggtgaacagaaactgatttcagaagccaa

SEQ ID NO: 1816 - protein, 7 aa, Artificial Sequence
  Synthetic
DYCMDCF

SEQ ID NO: 1817 - protein, 5 aa, Artificial Sequence
  Synthetic
PYSFK

SEQ ID NO: 1818 - protein, 10 aa, Artificial Sequence
  Synthetic
TASDTSDYGM

SEQ ID NO: 1819 - protein, 121 aa, Artificial Sequence
  Synthetic
EVQLVESGGGLVQAGDSLRLSCAASGDYCMDCFMGWFRQAPGKEREFVAAITPYSFKTYYADSVKGRFTISRDDARNTVYLQMNSLKPEDTAVYYCATTASDTSDYGMDYWGQGTQVTVSS

SEQ ID NO: 1820 - DNA, 421 bp, Artificial Sequence
  Synthetic
gaaggagatataccatggaagttcaactggttgaatctggtggcggtttagttcaagccggtgatagccttcgtctgagctgcgccgcaagcggagattactgcatggattgctttatgggttggtttcgccaggcacctggtaaagaacgtgaatttgtggcagccattaccccctattcctttaagacctactatgccgattctgttaaaggtcgcttcactatttcacgcgatgatgcgcgtaataccgtgtacttacagatgaactcactgaaacctgaggataccgccgtttattattgtgcgacaaccgcctccgatactagtgattacggtatggactattggggtcagggcacacaagtcacggtctcaagcggcggaagctctggtgaacagaaactgatttcagaagccaa

SEQ ID NO: 1821 - protein, 7 aa, Artificial Sequence
  Synthetic
DYCMDCF

SEQ ID NO: 1822 - protein, 5 aa, Artificial Sequence
  Synthetic
PYSFK

SEQ ID NO: 1823 - protein, 10 aa, Artificial Sequence
  Synthetic
PLNIGTATIA

SEQ ID NO: 1824 - protein, 121 aa, Artificial Sequence
  Synthetic
EVQLVESGGGLVQAGDSLRLSCAASGDYCMDCFMGWFRRAPGKEREFVAAITPYSFKTYYADSVKGRFTISRDDARNTVYLQMNSLKPEDTAVYYCAAPLNIGTATIADYWGQGTQVTVSS

SEQ ID NO: 1825 - DNA, 414 bp, Artificial Sequence
  Synthetic
atataccatggaagttcaactggttgaatctggtggcggtttagttcaagccggtgatagccttcgtctgagctgcgccgcaagcggagattactgcatggattgctttatgggttggtttcgccgggcacctggtaaagaacgtgaatttgtggcagccattaccccctattcctttaagacctactatgccgattctgttaaaggtcgcttcactatttcacgcgatgatgcgcgtaataccgtgtacttacagatgaactcactgaaacctgaggataccgccgtttattattgtgcggcacccctcaatatcggcaccgcgacgattgccgactattggggtcagggcacacaagtcacggtctcaagcggcggaagctctggtgaacagaaactgatttcagaagccaa

SEQ ID NO: 1826 - protein, 7 aa, Artificial Sequence
  Synthetic
DYCMDCF

SEQ ID NO: 1827 - protein, 5 aa, Artificial Sequence
  Synthetic
PYSFK

SEQ ID NO: 1828 - protein, 10 aa, Artificial Sequence
  Synthetic
PLNIGTATIA

SEQ ID NO: 1829 - protein, 121 aa, Artificial Sequence
  Synthetic
EVQLVESGGGLVQAGDSLRLSCAASGDYCMDCFMGWFRQAPGKEREFVAAITPYSFKTYYADSVKGRFTISRDDARNTVYLQMNSLKPEDTAVYYCAAPLNIGTATIADYWGQGTQVMVSS

SEQ ID NO: 1830 - DNA, 421 bp, Artificial Sequence
  Synthetic
gaaggagatataccatggaagttcaactggttgaatctggtggcggtttagttcaagccggtgatagccttcgtctgagctgcgccgcaagcggagattactgcatggattgctttatgggttggtttcgccaggcacctggtaaagaacgtgaatttgtggcagccattaccccctattcctttaagacctactatgccgattctgttaaaggtcgcttcactatttcacgcgatgatgcgcgtaataccgtgtacttacagatgaactcactgaaacctgaggataccgccgtttattattgtgcggcacccctcaatatcggcaccgcgacgattgccgactattggggtcagggcacacaagtcatggtctcaagcggcggaagctctggtgaacagaaactgatttcagaagccaa

SEQ ID NO: 1831 - protein, 7 aa, Artificial Sequence
  Synthetic
DYCMDCF

SEQ ID NO: 1832 - protein, 5 aa, Artificial Sequence
  Synthetic
PYSFK

SEQ ID NO: 1833 - protein, 10 aa, Artificial Sequence
  Synthetic
DSLILANSQW

SEQ ID NO: 1834 - protein, 121 aa, Artificial Sequence
  Synthetic
EVQLVESGGGLVQAGDSLRLSCAASGDYCMDCFMGWFRQAPGKEREFVAAITPYSFKTYYADSVKGRFTISRDDARNTVYLQMNSLKPEDTAVYYCAADSLILANSQWDYWGQGTQVTFSS

SEQ ID NO: 1835 - DNA, 412 bp, Artificial Sequence
  Synthetic
ataccatggaagttcaactggttgaatctggtggcggtttagttcaagccggtgatagccttcgtctgagctgcgccgcaagcggagattactgcatggattgctttatgggttggtttcgccaggcacctggtaaagaacgtgaatttgtggcagccattaccccctattcctttaagacctactatgccgattctgttaaaggtcgcttcactatttcacgcgatgatgcgcgtaataccgtgtacttacagatgaactcactgaaacctgaggataccgccgtttattattgtgcggcagacagccttattttggctaattctcagtgggactattggggtcagggcacacaagtcacgttctcaagcggcggaagctctggtgaacagaaactgatttcagaagccaa

SEQ ID NO: 1836 - protein, 7 aa, Artificial Sequence
  Synthetic
DYCMDCF

SEQ ID NO: 1837 - protein, 5 aa, Artificial Sequence
  Synthetic
PYSFK

SEQ ID NO: 1838 - protein, 10 aa, Artificial Sequence
  Synthetic
LETTKHGCQT

SEQ ID NO: 1839 - protein, 121 aa, Artificial Sequence
  Synthetic
EVQLVESGGGLVQAGDSLRLSCAASGDYCMDCFMGWFRQAPGKEREFVAAITPYSFKTYYADSVKGRFTISRDDARNTVYLQMNSLKPEDTAVYYCAALETTKHGCQTDSWGQGTQVTFSS

SEQ ID NO: 1840 - DNA, 414 bp, Artificial Sequence
  Synthetic
atataccatggaagttcaactggttgaatctggtggcggtttagttcaagccggtgatagccttcgtctgagctgcgccgcaagcggagattactgcatggattgctttatgggttggtttcgccaggcacctggtaaagaacgtgaatttgtggcagccattaccccctattcctttaagacctactatgccgattctgttaaaggtcgcttcactatttcacgcgatgatgcgcgtaataccgtgtacttacagatgaactcactgaaacctgaggataccgccgtttattattgtgcggcactcgagactactaagcacgggtgccagacggactcttggggtcagggcacacaagtcacgttctcaagcggcggaagctctggtgaacagaaactgatttcagaagccaa

SEQ ID NO: 1841 - protein, 7 aa, Artificial Sequence
  Synthetic
DYCMDCF

SEQ ID NO: 1842 - protein, 5 aa, Artificial Sequence
  Synthetic
PYSFK

SEQ ID NO: 1843 - protein, 10 aa, Artificial Sequence
  Synthetic
DSLILANSQW

SEQ ID NO: 1844 - protein, 121 aa, Artificial Sequence
  Synthetic
EVQLVESGGGLVQAGDSLRLSCAASGDYCMDCFMGWFRQAPGKEREFVAAITPYSFKTYYADSVKGRFTISRDDARNTVYLQMNSLKPEDTAVYYCATDSLILANSQWDYWGQGTQVTVSS

SEQ ID NO: 1845 - DNA, 420 bp, Artificial Sequence
  Synthetic
aaggagatataccatggaagttcaactggttgaatctggtggcggtttagttcaagccggtgatagccttcgtctgagctgcgccgcaagcggagattactgcatggattgctttatgggttggtttcgccaggcacctggtaaagaacgtgaatttgtggcagccattaccccctattcctttaagacctactatgccgattctgttaaaggtcgcttcactatttcacgcgatgatgcgcgtaataccgtgtacttacagatgaactcactgaaacctgaggataccgccgtttattattgtgcgacagacagccttattttggctaattctcagtgggactattggggtcagggcacacaagtcacggtctcaagcggcggaagctctggtgaacagaaactgatttcagaagccaa

SEQ ID NO: 1846 - protein, 7 aa, Artificial Sequence
  Synthetic
DYCMDCF

SEQ ID NO: 1847 - protein, 5 aa, Artificial Sequence
  Synthetic
PYSFK

SEQ ID NO: 1848 - protein, 10 aa, Artificial Sequence
  Synthetic
DSLILANSQW

SEQ ID NO: 1849 - protein, 121 aa, Artificial Sequence
  Synthetic
EVQLVDSGGGLVQAGDRLRLSCAASGDYCMDCFMGWFRQAPGKEREFVAAITPYSFKTYYADSVKGRFTISRDDARNTVYLQMNSLKPEDTAVYYCAADSLILANSQWDYWGQGTQVTVSS

SEQ ID NO: 1850 - DNA, 421 bp, Artificial Sequence
  Synthetic
gaaggagatataccatggaagttcaactggttgactctggtggcggtttagttcaagccggtgatcgccttcgtctgagctgcgccgcaagcggagattactgcatggattgctttatgggttggtttcgccaggcacctggtaaagaacgtgaatttgtggcagccattaccccctattcctttaagacctactatgccgattctgttaaaggtcgcttcactatttcacgcgatgatgcgcgtaataccgtgtacttacagatgaactcactgaaacctgaggataccgccgtttattattgtgcggcagacagccttattttggctaattctcagtgggactattggggtcagggcacacaagtcacggtctcaagcggcggaagctctggtgaacagaaactgatttcagaagccaa

SEQ ID NO: 1851 - protein, 7 aa, Artificial Sequence
  Synthetic
DYCMDCF

SEQ ID NO: 1852 - protein, 5 aa, Artificial Sequence
  Synthetic
PYSFK

SEQ ID NO: 1853 - protein, 10 aa, Artificial Sequence
  Synthetic
PLNIGTATIA

SEQ ID NO: 1854 - protein, 121 aa, Artificial Sequence
  Synthetic
EVQLVESGGGLVQAGDSLRLSCAASGDYCMDCFMGWFRQAPGKEREFVAAITPYSFKTYYADSVKGRFTISRDDARNTVYLQMNSLKPEDTAVYYCAAPLNIGTATIADYWGQGTQVTFSS

SEQ ID NO: 1855 - DNA, 420 bp, Artificial Sequence
  Synthetic
aaggagatataccatggaagttcaactggttgaatctggtggcggtttagttcaagccggtgatagccttcgtctgagctgtgccgcaagcggagattactgcatggattgctttatgggttggtttcgccaggcacctggtaaagaacgtgaatttgtggcagccattaccccctattcctttaagacctactatgccgattccgttaaaggtcgcttcactatttcacgcgatgatgcgcgtaataccgtgtacttacagatgaactcactgaaacctgaggataccgccgtttattattgtgcggcacccctcaatatcggcaccgcgacgattgccgactattggggtcagggcacacaagtcacgttctcaagcggcggaagctctggtgaacagaaactgatttcagaagccaa

SEQ ID NO: 1856 - protein, 7 aa, Artificial Sequence
  Synthetic
DYCMDCF

SEQ ID NO: 1857 - protein, 5 aa, Artificial Sequence
  Synthetic
PYSFK

SEQ ID NO: 1858 - protein, 10 aa, Artificial Sequence
  Synthetic
WPSLPTGGTP

SEQ ID NO: 1859 - protein, 121 aa, Artificial Sequence
  Synthetic
EVQLVESGGGLVQAGDSLRLSCAASGDYCMDCFMGWFRQAPGKEHEFVAAITPYSFKTYYADSVKGRFTISRDDARNTVYLQMNSLKPEDTAVYYCATWPSLPTGGTPDYWGQGTQVTVSS

SEQ ID NO: 1860 - DNA, 414 bp, Artificial Sequence
  Synthetic
atataccatggaagttcaactggttgaatctggtggcggtttagttcaagccggtgatagccttcgtctgagctgcgccgcaagcggagattactgcatggattgctttatgggttggtttcgccaggcacctggtaaagaacatgaatttgtggcagccattaccccctattcctttaagacctactatgccgattctgttaaaggtcgcttcactatttcacgcgatgatgcgcgtaataccgtgtacttacagatgaactcactgaaacctgaggataccgccgtttattattgtgcgacatggccgtccctgcctacgggcggtacccccgactattggggtcagggcacacaagtcacggtctcaagcggcggaagctctggtgaacagaaactgatttcagaagccaa

SEQ ID NO: 1861 - protein, 7 aa, Artificial Sequence
  Synthetic
DYCMDCF

SEQ ID NO: 1862 - protein, 5 aa, Artificial Sequence
  Synthetic
PYSFK

SEQ ID NO: 1863 - protein, 10 aa, Artificial Sequence
  Synthetic
LLPLDGFETS

SEQ ID NO: 1864 - protein, 121 aa, Artificial Sequence
  Synthetic
EVQLVESGGGLVQAGDSLRLSCAASGDYCMDCFMGWFRQAPGKEREFVAAITPYSFKTYYADCVKGRFTISRDDARNTVYLQMNSLKPEDTAVYYCAALLPLDGFETSDYWGQGTQVTVSS

SEQ ID NO: 1865 - DNA, 410 bp, Artificial Sequence
  Synthetic
accatggaagttcaactggttgaatctggtggcggtttagttcaagccggtgatagccttcgtctgagctgcgccgcaagcggagattactgcatggattgctttatgggttggtttcgccaggcacctggtaaagaacgtgaatttgtggcagccattaccccctattcctttaagacctactatgccgattgtgttaaaggtcgcttcactatttcacgcgatgatgcgcgtaataccgtgtacttacagatgaactcactgaaacctgaggataccgccgtttattattgtgcggcacttctccccctggatggttttgagacttcggactattggggtcagggcacacaagtcacggtctcaagcggcggaagctctggtgaacagaaactgatttcagaagccaa

SEQ ID NO: 1866 - protein, 7 aa, Artificial Sequence
  Synthetic
DYCMDCF

SEQ ID NO: 1867 - protein, 5 aa, Artificial Sequence
  Synthetic
PYSFK

SEQ ID NO: 1868 - protein, 13 aa, Artificial Sequence
  Synthetic
SIQTLIGSSSCWV

SEQ ID NO: 1869 - protein, 124 aa, Artificial Sequence
  Synthetic
EVQLVESGGGLVQAGDSLRLSCAASGDYCMDCFMGWFRQAPGKEREFVAAITPYSFKTYYADSVKGRFTISRDDARNTVYLQMNSLKPEDTAVYYCNASIQTLIGSSSCWVDYWGQGTQVTVSS

SEQ ID NO: 1870 - DNA, 425 bp, Artificial Sequence
  Synthetic
agatataccatggaagttcaactggttgaatctggtggcggtttagttcaagccggtgatagccttcgtctgagctgcgccgcaagcggagattactgcatggattgctttatgggttggtttcgccaggcacctggtaaagaacgtgaatttgtggcagccattaccccctattcctttaagacctactatgccgattctgttaaaggtcgcttcactatttcacgcgatgatgcgcgtaataccgtgtacttacagatgaactcactgaaacctgaggataccgccgtttattattgtaatgcaagcatccagaccctgattggcagttcgtcttgctgggtggactattggggtcagggcacacaagtcacggtctcaagcggcggaagctctggtgaacagaaactgatttcagaagccaa

SEQ ID NO: 1871 - protein, 7 aa, Artificial Sequence
  Synthetic
DYCMDCF

SEQ ID NO: 1872 - protein, 5 aa, Artificial Sequence
  Synthetic
PYSFK

SEQ ID NO: 1873 - protein, 10 aa, Artificial Sequence
  Synthetic
PLNIGTATIA

SEQ ID NO: 1874 - protein, 121 aa, Artificial Sequence
  Synthetic
EVQLVESGGGLVQDGDSLRLSCAASGDYCMDCFMGWFRQAPGKEREFVAAITPYSFKTYYADSVKGRFTISRDDARNTVYLQMNSLKPEDTAVYYCAAPLNIGTATIADYWGQGTQVTVSS

SEQ ID NO: 1875 - DNA, 414 bp, Artificial Sequence
  Synthetic
atataccatggaagttcaactggttgaatctggtggcggtttagttcaagacggtgatagccttcgtctgagctgcgccgcaagcggagattactgcatggattgctttatgggttggtttcgccaggcacctggtaaagaacgtgaatttgtggcagccattaccccctattcctttaagacctactatgccgattctgttaaaggtcgcttcactatttcacgcgatgatgcgcgtaataccgtgtacttacagatgaactcactgaaacctgaggataccgccgtttattattgtgcggcacccctcaatatcggcaccgcgacgattgccgactattggggtcagggcacacaagtcacggtctcaagcggcggaagctctggtgaacagaaactgatttcagaagccaa

SEQ ID NO: 1876 - protein, 7 aa, Artificial Sequence
  Synthetic
DYCMDCF

SEQ ID NO: 1877 - protein, 5 aa, Artificial Sequence
  Synthetic
PYSFK

SEQ ID NO: 1878 - protein, 10 aa, Artificial Sequence
  Synthetic
NPLDPNWTNS

SEQ ID NO: 1879 - protein, 121 aa, Artificial Sequence
  Synthetic
EVQLVESGGGLVQAGDSLRLSCAASGDYCMDCFMGWFRQAPGKEREFVEAITPYSFKTYYTDSVKGRFTISRDDARNTVYLQMNSLKPEDTAVYYCAANPLDPNWTNSDYWGQGTQVTVSS

SEQ ID NO: 1880 - DNA, 420 bp, Artificial Sequence
  Synthetic
aaggagatataccatggaagttcaactggttgaatctggtggcggtttagttcaagccggtgatagccttcgtctgagctgcgccgcaagcggagattactgcatggattgctttatgggttggtttcgccaggcacctggtaaagaacgtgaatttgtggaagccattaccccctattcctttaagacctactataccgattctgttaaaggtcgcttcactatttcacgcgatgatgcgcgtaataccgtgtacttacagatgaactcactgaaacctgaggataccgccgtttattattgtgcggcaaaccctctggaccccaactggactaattctgactattggggtcagggcacacaagtcacggtctcaagcggcggaagctctggtgaaaagaaactgatttcagaagccaa

SEQ ID NO: 1881 - protein, 7 aa, Artificial Sequence
  Synthetic
DYCMDCF

SEQ ID NO: 1882 - protein, 5 aa, Artificial Sequence
  Synthetic
ASYRY

SEQ ID NO: 1883 - protein, 9 aa, Artificial Sequence
  Synthetic
LTSPLSDSS

SEQ ID NO: 1884 - protein, 120 aa, Artificial Sequence
  Synthetic
EVQLVESGGGLVQAGDSLRLSCAASGDYCMDCFMGWFRQAPGKEREFVAAITASYRYTDYADSVRGRFSISADSAKNTVYLQMNSLKPEDTAVYYCAALTSPLSDSSDYWGQGTQVTVSS

SEQ ID NO: 1885 - DNA, 409 bp, Artificial Sequence
  Synthetic
ataccatggaagttcaactggttgaatctggtggcggtttagttcaagccggtgatagccttcgtctgagctgcgccgcaagcggagattactgcatggattgctttatgggttggtttcgccaggcacctggtaaagaacgtgaatttgtggcagccattaccgcgtcttaccgttacaccgactatgccgattctgttcgtggtcgcttcagcatttcagcagattctgcgaagaataccgtgtacttacagatgaactcactgaaacctgaggataccgccgtttattattgtgcggcattgacgtctccgctttcggattcgtccgactattggggtcagggcacacaagtcacggtctcaagcggcggaagctctggtgaacagaaactgatttcagaagccaa

SEQ ID NO: 1886 - protein, 7 aa, Artificial Sequence
  Synthetic
DYCMDCF

SEQ ID NO: 1887 - protein, 5 aa, Artificial Sequence
  Synthetic
PYSFK

SEQ ID NO: 1888 - protein, 10 aa, Artificial Sequence
  Synthetic
QVSLVTHGDL

SEQ ID NO: 1889 - protein, 121 aa, Artificial Sequence
  Synthetic
EVQLVESGGGLVQAGDSLRLSCAASGDYCMDCFMGWFRQAPGKEREFVAAITPYSFKTYYADSVKGRFTISRDDARNTVYLQMNSLKPEDTAVYYCAAQVSLVTHGDLDYWGQGTQVTVSS

SEQ ID NO: 1890 - DNA, 410 bp, Artificial Sequence
  Synthetic
accatggaagttcaactggttgaatctggtggcggtttagttcaagccggtgatagccttcgtctgagctgcgccgcaagcggagattactgcatggattgctttatgggttggtttcgccaggcacctggtaaagaacgtgaatttgtggcagccattaccccctattcctttaagacctactatgccgattctgttaaaggtcgcttcactatttcacgcgatgatgcgcgtaataccgtgtacttacagatgaactcactgaaacctgaggataccgccgtttattattgtgcggcacaggtctcccttgttacccatggggatctggactattggggtcagggcacacaagtcacggtctcaagcggcggaagctctggtgaacagaaactgatttcagaagccaa

SEQ ID NO: 1891 - protein, 7 aa, Artificial Sequence
  Synthetic
DYCMDCF

SEQ ID NO: 1892 - protein, 5 aa, Artificial Sequence
  Synthetic
PYSFK

SEQ ID NO: 1893 - protein, 10 aa, Artificial Sequence
  Synthetic
NPLDPNWTNS

SEQ ID NO: 1894 - protein, 121 aa, Artificial Sequence
  Synthetic
EVQLVESGGGLVQAGDSLRLSCAASGDYCMDCFMGWFRQAPGKEREFVSAITPYSFKTYYADSVKGRFTISRDDARNTVYLQMNSLKPEDTAVYYCAANPLDPNWTNSDYWGQGTQVTVSS

SEQ ID NO: 1895 - DNA, 410 bp, Artificial Sequence
  Synthetic
accatggaagttcaactggttgaatctggtggcggtttagttcaagccggtgatagccttcgtctgagctgcgccgcaagcggagattactgcatggattgctttatgggttggtttcgccaggcacctggtaaagaacgtgaatttgtgtcagccattaccccctattcctttaagacctactatgccgattctgttaaaggtcgcttcactatttcacgcgatgatgcgcgtaataccgtgtacttacagatgaactcactgaaacctgaggataccgccgtttattattgtgcggcaaaccctctggaccccaactggactaattctgactattggggtcagggcacacaagtcacggtctcaagcggcggaagctctggtgaacagaaactgatttcagaagccaa

SEQ ID NO: 1896 - protein, 7 aa, Artificial Sequence
  Synthetic
DYCMDCF

SEQ ID NO: 1897 - protein, 5 aa, Artificial Sequence
  Synthetic
PYSFK

SEQ ID NO: 1898 - protein, 10 aa, Artificial Sequence
  Synthetic
PVISFAADGW

SEQ ID NO: 1899 - protein, 121 aa, Artificial Sequence
  Synthetic
EVQLVESGGGLVQAGDSLRLSCAASGDYCMDCFMGWFRQAPGKEREFVAAITPYSFKTYYADSVKGRFTISRDDARNTVYLQMNSLKPEDTAVYYCAAPVISFAADGWDYWGQGTQVTVSS

SEQ ID NO: 1900 - DNA, 414 bp, Artificial Sequence
  Synthetic
atataccatggaagttcaactggttgaatctggtggcggtttagttcaagccggtgatagccttcgtctgagctgcgccgcaagcggagattactgcatggattgctttatgggttggtttcgccaggcacctggtaaagaacgtgaatttgtggcagccattaccccctattcctttaagacctactatgccgattctgttaaaggtcgcttcactatttcacgcgatgatgcgcgtaataccgtgtacttacagatgaactcactgaaacctgaggataccgccgtttattattgtgcggcacccgtcatctcctttgctgcggacggctgggactattggggtcagggcacacaagtcacggtctcaagcggcggaagctctggtgaacagaaactgatttcagaagccaa

SEQ ID NO: 1901 - protein, 7 aa, Artificial Sequence
  Synthetic
DYCMDCF

SEQ ID NO: 1902 - protein, 5 aa, Artificial Sequence
  Synthetic
PYSFK

SEQ ID NO: 1903 - protein, 10 aa, Artificial Sequence
  Synthetic
PLNIGTATIA

SEQ ID NO: 1904 - protein, 121 aa, Artificial Sequence
  Synthetic
EVQLVESGGGLVQAGDSLRLSCAASGDYCMDCFLGWFRQAPGKEREFVAAITPYSFKTYYADSVKGRFTISCDDARNTVYLQMNSLKPEDTAVYYCAAPLNIGTATIADYWGQGTQVTVSS

SEQ ID NO: 1905 - DNA, 421 bp, Artificial Sequence
  Synthetic
gaaggagatataccatggaagttcaactggttgaatctggtggcggtttagttcaagccggtgatagccttcgtctgagctgcgccgcaagcggagattactgcatggattgctttttgggttggtttcgccaggcacctggtaaagaacgtgaatttgtggcagccattaccccctattcctttaagacctactatgccgattctgttaaaggtcgcttcactatttcatgcgatgatgcgcgtaataccgtgtacttacagatgaactcactgaaacctgaggataccgccgtttattattgtgcggcacccctcaatatcggcaccgcgacgattgccgactattggggtcagggcacacaagtcacggtctcaagcggcggaagctctggtgaacagaaactgatttcagaagccaa

SEQ ID NO: 1906 - protein, 7 aa, Artificial Sequence
  Synthetic
DYCMDCF

SEQ ID NO: 1907 - protein, 5 aa, Artificial Sequence
  Synthetic
PYSFK

SEQ ID NO: 1908 - protein, 10 aa, Artificial Sequence
  Synthetic
DSLILANSQW

SEQ ID NO: 1909 - protein, 121 aa, Artificial Sequence
  Synthetic
EVQLVESGGGLVQAGDSPRLSCAASGDYCMDCFMGWFRQAPGKEREFVAAITPYSFKTYYADSVKGRFTISRDDARNTVYLQMNSLKPEDTAVYYCAADSLILANSQWDYWGQGTQVTVSS

SEQ ID NO: 1910 - DNA, 421 bp, Artificial Sequence
  Synthetic
gaaggagatataccatggaagttcaactggttgaatctggtggcggtttagttcaagccggtgatagccctcgtctgagctgcgccgcaagcggagattactgcatggattgctttatgggttggtttcgccaggcacctggtaaagaacgtgaatttgtggcagccattaccccctattcctttaagacctactatgccgattctgttaaaggtcgcttcactatttcacgcgatgatgcgcgtaataccgtgtacttacagatgaactcactgaaacctgaggataccgccgtttattattgtgcggcagacagccttattttggctaattctcagtgggactattggggtcagggcacacaagtcacggtctcaagcggcggaagctctggtgaacagaaactgatttcagaagccaa

SEQ ID NO: 1911 - protein, 7 aa, Artificial Sequence
  Synthetic
DYCMDCF

SEQ ID NO: 1912 - protein, 5 aa, Artificial Sequence
  Synthetic
PYSFK

SEQ ID NO: 1913 - protein, 10 aa, Artificial Sequence
  Synthetic
PLNIGTATIA

SEQ ID NO: 1914 - protein, 121 aa, Artificial Sequence
  Synthetic
EVQLVESGGGLVQAGDSLRLSCAASGDYCMDCFMGWFRQAPGKEREFVAAITPYSFKTYYADSVKGRFTISRDDARNTVYLQMNSLKPEDTAVYYCAAPLNIGTATIADYWGHGTQVTVSS

SEQ ID NO: 1915 - DNA, 416 bp, Artificial Sequence
  Synthetic
agatataccatggaagttcaactggttgaatctggtggcggtttagttcaagccggtgatagccttcgtctgagctgcgccgcaagcggagattactgcatggattgctttatgggttggtttcgccaggcacctggtaaagaacgtgaatttgtggcagccattaccccctattcctttaagacctactatgccgattctgttaaaggtcgcttcactatttcacgcgatgatgcgcgtaataccgtgtacttacagatgaactcactgaaacctgaggataccgccgtttattattgtgcggcacccctcaatatcggcaccgcgacgattgccgactactggggtcatggcacacaagtcacggtctcaagcggcggaagctctgctgatcagaaactgatttcagaagccaa

SEQ ID NO: 1916 - protein, 7 aa, Artificial Sequence
  Synthetic
DYCMDCF

SEQ ID NO: 1917 - protein, 5 aa, Artificial Sequence
  Synthetic
PYSFK

SEQ ID NO: 1918 - protein, 10 aa, Artificial Sequence
  Synthetic
DSLILANSQW

SEQ ID NO: 1919 - protein, 121 aa, Artificial Sequence
  Synthetic
EVQLVESGGGLVQAGDSLRLSCAASGDYCMDCFMGWFRQAPGKEREFVAAITPYSFKTYYADSVKGRFTISRDDARNTVYLQMNSLKPEDTAVYYCATDSLILANSQWDYWGHGTQVTVSS

SEQ ID NO: 1920 - DNA, 420 bp, Artificial Sequence
  Synthetic
aaggagatataccatggaagttcaactggttgaatctggtggcggtttagttcaagccggtgatagccttcgtctgagctgcgccgcaagcggagattactgcatggattgctttatgggttggtttcgccaggcacctggtaaagaacgtgaatttgtggcagccattaccccctattcctttaagacctactatgccgattctgttaaaggtcgcttcactatttcacgcgatgatgcgcgtaataccgtgtacttacagatgaactcactgaaacctgaggataccgccgtttattattgtgcgacagacagccttattttggctaattctcagtgggactattggggtcatggcacacaagtcacggtctcaagcggcggaagctctggtgaacagaaactgatttcagaagccaa

SEQ ID NO: 1921 - protein, 7 aa, Artificial Sequence
  Synthetic
DYCMDCF

SEQ ID NO: 1922 - protein, 5 aa, Artificial Sequence
  Synthetic
PYSFK

SEQ ID NO: 1923 - protein, 10 aa, Artificial Sequence
  Synthetic
DSLILANSQW

SEQ ID NO: 1924 - protein, 121 aa, Artificial Sequence
  Synthetic
EVQLVESGGGLVQAGDSLRLSCAASGDYCMDCFMGWFRQAPGKEREFVAAITPYSFKTYYADSVKGRFTISRDDARNTVYLQMNSLKPEDTAVYYCAADSLILANSQWDYWGQGTQGTVSS

SEQ ID NO: 1925 - DNA, 414 bp, Artificial Sequence
  Synthetic
atataccatggaagttcaactggttgaatctggtggcggtttagttcaagccggtgatagccttcgtctgagctgcgccgcaagcggagattactgcatggattgctttatgggttggtttcgccaggcacctggtaaagaacgtgaatttgtggcagccattaccccctattcctttaagacctactatgccgattctgttaaaggtcgcttcactatttcacgcgatgatgcgcgtaataccgtgtacttacagatgaactcactgaaacctgaggataccgccgtttattattgtgcggcagacagccttattttggctaattctcagtgggactattggggtcagggcacacaaggcacggtctcaagcggcggaagctctggtgaacagaaactgatttcagaagccaa

SEQ ID NO: 1926 - protein, 7 aa, Artificial Sequence
  Synthetic
DYCMDCF

SEQ ID NO: 1927 - protein, 5 aa, Artificial Sequence
  Synthetic
PYSFK

SEQ ID NO: 1928 - protein, 10 aa, Artificial Sequence
  Synthetic
QVSLVTHGDL

SEQ ID NO: 1929 - protein, 121 aa, Artificial Sequence
  Synthetic
EVQLVESGGGLVQAGDSLRLSCAASGDYCMDCFMGWFCQAPGKEREFVAAITPYSFKTYYADSVKGRFTISRDDARNTVYLQMNSLKPEDTAVYYCAAQVSLVTHGDLDSWGQGTQVTVSS

SEQ ID NO: 1930 - DNA, 420 bp, Artificial Sequence
  Synthetic
aaggagatataccatggaagttcaactggttgaatctggtggcggtttagttcaagccggtgatagccttcgtctgagctgcgccgcaagcggagattactgcatggattgctttatgggttggttttgccaggcacctggtaaagaacgtgaatttgtggcagccattaccccctattcctttaagacctactatgccgattctgttaaaggtcgcttcactatttcacgcgatgatgcgcgtaataccgtgtacttacagatgaactcactgaaacctgaggataccgccgtttattattgtgcggcacaggtctcccttgttacccatggggatctggactcttggggtcagggcacacaagtcacggtctcaagcggcggaagctctggtgaacagaaactgatttcagaagccaa

SEQ ID NO: 1931 - protein, 7 aa, Artificial Sequence
  Synthetic
DSCMDCF

SEQ ID NO: 1932 - protein, 5 aa, Artificial Sequence
  Synthetic
PYSFK

SEQ ID NO: 1933 - protein, 10 aa, Artificial Sequence
  Synthetic
NPLDPNWTNS

SEQ ID NO: 1934 - protein, 121 aa, Artificial Sequence
  Synthetic
EVQLVESGGGLVQAGDSLRLSCAASGDSCMDCFMGWFRQAPGKEREFVAAITPYSFKTYYADSVKGRFTISRDDARNTVYLQMNSLKPEDTAVYYCAANPLDPNWTNSDYWGQGTQVTVSS

SEQ ID NO: 1935 - DNA, 412 bp, Artificial Sequence
  Synthetic
ataccatggaagttcaactggttgaatctggtggcggtttagttcaagccggtgatagccttcgtctgagctgcgccgcaagcggagattcctgcatggattgctttatgggttggtttcgccaggcacctggtaaagaacgtgaatttgtggcagccattaccccctattcctttaagacctactatgccgattctgttaaaggtcgcttcactatttcacgcgatgatgcgcgtaataccgtgtacttacagatgaactcactgaaacctgaggataccgccgtttattattgtgcggcaaaccctctggaccccaactggactaattctgactattggggtcagggcacacaagtcacggtctcaagcggcggaagctctggtgaacagaaactgatttcagaagccaa

SEQ ID NO: 1936 - protein, 7 aa, Artificial Sequence
  Synthetic
DYCMDCF

SEQ ID NO: 1937 - protein, 5 aa, Artificial Sequence
  Synthetic
PYSFK

SEQ ID NO: 1938 - protein, 10 aa, Artificial Sequence
  Synthetic
PLNIGTATIA

SEQ ID NO: 1939 - protein, 121 aa, Artificial Sequence
  Synthetic
EVQLVESGGGLVQAGDSLRLSCAASEDYCMDCFMGWFRQAPGKEREFVAAITPYSFKTYYADSVKGRFTISRDDARNTVYLQMNSLKPEDTAVYYCAAPLNIGTATIADYWGQGTQGTVSS

SEQ ID NO: 1940 - DNA, 410 bp, Artificial Sequence
  Synthetic
accatggaagttcaactggttgaatctggtggcggtttagttcaagccggtgatagccttcgtctgagctgcgccgcaagcgaagattactgcatggattgctttatgggttggtttcgccaggcacctggtaaagaacgtgaatttgtggcagccattaccccctattcctttaagacctactatgccgattctgttaaaggtcgcttcactatttcacgcgatgatgcgcgtaataccgtgtacttacagatgaactcactgaaacctgaggataccgccgtttattattgtgcggcacccctcaatatcggcaccgcgacgattgccgactattggggtcagggcacacaaggcacggtctcaagcggcggaagctctggtgaacagaaactgatttcagaagccaa

SEQ ID NO: 1941 - protein, 7 aa, Artificial Sequence
  Synthetic
DYCMDCF

SEQ ID NO: 1942 - protein, 5 aa, Artificial Sequence
  Synthetic
PYSFK

SEQ ID NO: 1943 - protein, 10 aa, Artificial Sequence
  Synthetic
NPLDPNWTNS

SEQ ID NO: 1944 - protein, 121 aa, Artificial Sequence
  Synthetic
EVQLVESGGGLVQAGDSLRLSCAAGGDYCMDCFMGWFRQAPGKEREFVAAITPYSFKTYYADSVKGRFTISRDDARNTVYLQMNSLKPEDTAVYYCAANPLDPNWTNSDYWGQGTQVMVSS

SEQ ID NO: 1945 - DNA, 420 bp, Artificial Sequence
  Synthetic
aaggagatataccatggaagttcaactggttgaatctggtggcggtttagttcaagccggtgatagccttcgtctgagctgcgccgcaggcggagattactgcatggattgctttatgggttggtttcgccaggcacctggtaaagaacgtgaatttgtggcagccattaccccctattcctttaagacctactatgccgattctgttaaaggtcgcttcactatttcacgcgatgatgcgcgtaataccgtgtacttacagatgaactcactgaaacctgaggataccgccgtttattattgtgcggcaaaccctctggaccccaactggactaattctgactattggggtcagggcacacaagtcatggtctcaagcggcggaagctctggtgaacagaaactgatttcagaagccaa

SEQ ID NO: 1946 - protein, 7 aa, Artificial Sequence
  Synthetic
DYCMDCF

SEQ ID NO: 1947 - protein, 5 aa, Artificial Sequence
  Synthetic
PYSFK

SEQ ID NO: 1948 - protein, 10 aa, Artificial Sequence
  Synthetic
NPLDPNWTNS

SEQ ID NO: 1949 - protein, 121 aa, Artificial Sequence
  Synthetic
EVQLVESGGGLVQAGDSLRLSCAASGDYCMDCFMGWFRQAPGKEREFVAAITPYSFKTYYADSVKGRFTISRDDARNTVYLQMNSLKPEDTAVYYCAANPLDPNWTNSDYWGQGTQGTVSS

SEQ ID NO: 1950 - DNA, 418 bp, Artificial Sequence
  Synthetic
ggagatataccatggaagttcaactggttgaatctggtggcggtttagttcaagccggtgatagccttcgtctgagctgcgccgcaagcggagattactgcatggattgctttatgggttggtttcgccaggcacctggtaaagaacgtgaatttgtggcagccattaccccctattcctttaagacctactatgccgattctgttaaaggtcgcttcactatttcacgcgatgatgcgcgtaataccgtgtacttacagatgaactcactgaaacctgaggataccgccgtttattattgtgcggcaaaccctctggaccccaactggactaattctgactattggggtcagggcacacaaggcacggtctcaagcggcggaagctctggtgaacagaaactgatttcagaagccaa

SEQ ID NO: 1951 - protein, 7 aa, Artificial Sequence
  Synthetic
DYCMDCF

SEQ ID NO: 1952 - protein, 5 aa, Artificial Sequence
  Synthetic
PYSFK

SEQ ID NO: 1953 - protein, 10 aa, Artificial Sequence
  Synthetic
NPLDPNWTNS

SEQ ID NO: 1954 - protein, 121 aa, Artificial Sequence
  Synthetic
EVQLFESGGGLVQAGDSLRLSCAASGDYCMDCFMGWFRQAPGKEREFVAAITPYSFKTYYADSVKGRFTISRDDARNTVYLQMNSLKPEDTAVYYCAANPLDPNWTNSDYWGQGTQGTVSS

SEQ ID NO: 1955 - DNA, 416 bp, Artificial Sequence
  Synthetic
agatataccatggaagttcaactgtttgaatctggtggcggtttagttcaagccggtgatagccttcgtctgagctgcgccgcaagcggagattactgcatggattgctttatgggttggtttcgccaggcacctggtaaagaacgtgaatttgtggcagccattaccccctattcctttaagacctactatgccgattctgttaaaggtcgcttcactatttcacgcgatgatgcgcgtaataccgtgtacttacagatgaactcactgaaacctgaggataccgccgtttattattgtgcggcaaaccctctggaccccaactggactaattctgactattggggtcagggcacacaaggcacggtctcaagcggcggaagctctggtgaacagaaactgatttcagaagccaa

SEQ ID NO: 1956 - protein, 7 aa, Artificial Sequence
  Synthetic
DYCMDCF

SEQ ID NO: 1957 - protein, 5 aa, Artificial Sequence
  Synthetic
PYSFK

SEQ ID NO: 1958 - protein, 10 aa, Artificial Sequence
  Synthetic
SANILHLSVI

SEQ ID NO: 1959 - protein, 121 aa, Artificial Sequence
  Synthetic
EVQLVESGGGLVQAGDSLRLSCAASGDYCMDCFMGWFRQAPGKEREFVAAITPYSFKTYYADSVKGRFTISRDDARNTVYLQMNSLKPEDTAVYYCAASANILHLSVINYWGQGTQGTVSS

SEQ ID NO: 1960 - DNA, 414 bp, Artificial Sequence
  Synthetic
atataccatggaagttcaactggttgaatctggtggcggtttagttcaagccggtgatagccttcgtctgagctgcgccgcaagcggagattactgcatggattgctttatgggttggtttcgccaggcacctggtaaagaacgtgaatttgtggcagccattaccccctattcctttaagacctactatgccgattctgttaaaggtcgcttcactatttcacgcgatgatgcgcgtaataccgtgtacttacagatgaactcactgaaacctgaggataccgccgtttattattgtgcggcaagcgcgaacattctccatttgtctgttatcaactattggggtcagggcacacaaggcacggtctcaagcggcggaagctctggtgaacagaaactgatttcagaagccaa

SEQ ID NO: 1961 - protein, 7 aa, Artificial Sequence
  Synthetic
DYCMDCF

SEQ ID NO: 1962 - protein, 5 aa, Artificial Sequence
  Synthetic
PYSFK

SEQ ID NO: 1963 - protein, 10 aa, Artificial Sequence
  Synthetic
WLTTQPFCGW

SEQ ID NO: 1964 - protein, 121 aa, Artificial Sequence
  Synthetic
EVQLVESGGGLVQAGDSLRLSCAASGDYCMDCFMGWFRQAPGKEREFVAAITPYSFKTYYADSVRGRFSISADSAKNTVYLQMNSLKPEDTAVYYCAAWLTTQPFCGWNYWGQGTQGTVSS

SEQ ID NO: 1965 - DNA, 410 bp, Artificial Sequence
  Synthetic
accatggaagttcaactggttgaatctggtggcggtttagttcaagccggtgatagccttcgtctgagctgcgccgcaagcggagattactgcatggattgctttatgggttggtttcgccaggcacctggtaaagaacgtgaatttgtggcagccattaccccctattcctttaagacctactatgccgattctgttcgtggtcgcttcagcatttcagcagattctgcgaagaataccgtgtacttacagatgaactcactgaaacctgaggataccgccgtttattattgtgcggcatggctgaccactcagccgttctgcggttggaactattggggtcagggcacacaaggcacggtctcaagcggcggaagctctggtgaacagaaactgatttcagaagccaa

SEQ ID NO: 1966 - protein, 7 aa, Artificial Sequence
  Synthetic
DYCMDCF

SEQ ID NO: 1967 - protein, 5 aa, Artificial Sequence
  Synthetic
PYSFK

SEQ ID NO: 1968 - protein, 10 aa, Artificial Sequence
  Synthetic
PLNIGTATIV

SEQ ID NO: 1969 - protein, 121 aa, Artificial Sequence
  Synthetic
EVQLVESGGGLVQAGDSLRLSCAASGDYCMDCFMGWFRQAPGKEREFVAAITPYSFKTYYADSVKGRFTISRDDARNTVYLQMNSLKPEDTAVYYCAAPLNIGTATIVDYWGQGTQVTVSS

SEQ ID NO: 1970 - DNA, 420 bp, Artificial Sequence
  Synthetic
aaggagatataccatggaagttcaactggttgaatctggtggcggtttagttcaagccggtgatagccttcgtctgagctgcgccgcaagcggagattactgcatggattgctttatgggttggtttcgccaggcacctggtaaagaacgtgaatttgtggcagccattaccccctattcctttaagacctactatgccgattctgttaaaggtcgcttcactatttcacgcgatgatgcgcgtaataccgtgtacttacagatgaactcactgaaacctgaggataccgccgtttattattgtgcggcacccctcaatatcggcaccgcgacgattgtcgactattggggtcagggcacacaagtcacggtctcaagcggcggaagctctggtgaacagaaactgatttcagaagccaa

SEQ ID NO: 1971 - protein, 7 aa, Artificial Sequence
  Synthetic
DYCMDCF

SEQ ID NO: 1972 - protein, 5 aa, Artificial Sequence
  Synthetic
PYSFK

SEQ ID NO: 1973 - protein, 10 aa, Artificial Sequence
  Synthetic
PLNIGTATIA

SEQ ID NO: 1974 - protein, 121 aa, Artificial Sequence
  Synthetic
EVQLVDSGGGLVQAGDSLRLSCAASGDYCMDCFMGWFRQAPGKEREFVAAITPYSFKTYYADSVKGRFTISRDDARNTVYLQMNSLKPEDTAVYYCAAPLNIGTATIADYWGQGTQGTVSS

SEQ ID NO: 1975 - DNA, 421 bp, Artificial Sequence
  Synthetic
gaaggagatataccatggaagttcaactggttgactctggtggcggtttagttcaagccggtgatagccttcgtctgagctgcgccgcaagcggagattactgcatggattgctttatgggttggtttcgccaggcacctggtaaagaacgtgaatttgtggcagccattaccccctattcctttaagacctactatgccgattctgttaaaggtcgcttcactatttcacgcgatgatgcgcgtaataccgtgtacttacagatgaactcactgaaacctgaggataccgccgtttattattgtgcggcacccctcaatatcggcaccgcgacgattgccgactattggggtcagggcacacaaggcacggtctcaagcggcggaagctctggtgaacagaaactgatttcagaagccaa

SEQ ID NO: 1976 - protein, 7 aa, Artificial Sequence
  Synthetic
DYCMDCF

SEQ ID NO: 1977 - protein, 5 aa, Artificial Sequence
  Synthetic
PYSFK

SEQ ID NO: 1978 - protein, 10 aa, Artificial Sequence
  Synthetic
NPLDPNWTNS

SEQ ID NO: 1979 - protein, 121 aa, Artificial Sequence
  Synthetic
EVQLVDSGGGLVQAGDRLRLSCAASGDYCMDCFMGWFRQAPGKEREFVAAITPYSFKTYYADSVKGRFTISRDDARNTVYLQMNSLKPEDTAVYYCAANPLDPNWTNSDYWGQGTQGTVSS

SEQ ID NO: 1980 - DNA, 421 bp, Artificial Sequence
  Synthetic
gaaggagatataccatggaagttcaactggttgactctggtggcggtttagttcaagccggtgatcgccttcgtctgagctgcgccgcaagcggagattactgcatggattgctttatgggttggtttcgccaggcacctggtaaagaacgtgaatttgtggcagccattaccccctattcctttaagacctactatgccgattctgttaaaggtcgcttcactatttcacgcgatgatgcgcgtaataccgtgtacttacagatgaactcactgaaacctgaggataccgccgtttattattgtgcggcaaaccctctggaccccaactggactaattctgactattggggtcagggcacacaaggcacggtctcaagcggcggaagctctggtgaacagaaactgatttcagaagccaa

SEQ ID NO: 1981 - protein, 7 aa, Artificial Sequence
  Synthetic
DYCMDCF

SEQ ID NO: 1982 - protein, 5 aa, Artificial Sequence
  Synthetic
PYSFK

SEQ ID NO: 1983 - protein, 10 aa, Artificial Sequence
  Synthetic
LLPLDGFETS

SEQ ID NO: 1984 - protein, 121 aa, Artificial Sequence
  Synthetic
EVQLVESGGGLVQAGDSLRLSCAASGDYCMDCFMGWFRQAPGKEREFVAAITPYSFKTYYADSVKGRFTISRDDARNTVYLQMNSLKPEDTAVYYCAALLPLDGFETSDYWGQGTQGTVSS

SEQ ID NO: 1985 - DNA, 414 bp, Artificial Sequence
  Synthetic
atataccatggaagttcaactggttgaatctggtggcggtttagttcaagccggtgatagccttcgtctgagctgcgccgcaagcggagattactgcatggattgctttatgggttggtttcgccaggcacctggtaaagaacgtgaatttgtggcagccattaccccctattcctttaagacctactatgccgattctgttaaaggtcgcttcactatttcacgcgatgatgcgcgtaataccgtgtacttacagatgaactcactgaaacctgaggataccgccgtttattattgtgcggcacttctccccctggatggttttgagacttcggactattggggtcagggcacacaaggcacggtctcaagcggcggaagctctggtgaacagaaactgatttcagaagccaa

SEQ ID NO: 1986 - protein, 7 aa, Artificial Sequence
  Synthetic
DYCMDCF

SEQ ID NO: 1987 - protein, 5 aa, Artificial Sequence
  Synthetic
PYSFK

SEQ ID NO: 1988 - protein, 10 aa, Artificial Sequence
  Synthetic
SMHLNNISIS

SEQ ID NO: 1989 - protein, 121 aa, Artificial Sequence
  Synthetic
EVQLVESGGGLVQAGDSLRLSCAASGDYCMDCFMGWFRQAPGKEREFVAAITPYSFKTYYADSVKGRFTISRDDARNTVYLQMNSLKPEDTAVYYCAASMHLNNISISDYWGQGTQGTVSS

SEQ ID NO: 1990 - DNA, 420 bp, Artificial Sequence
  Synthetic
aaggagatataccatggaagttcaactggttgaatctggtggcggtttagttcaagccggtgatagccttcgtctgagctgcgccgcaagcggagattactgcatggattgctttatgggttggtttcgccaggcacctggtaaagaacgtgaatttgtggcagccattaccccctattcctttaagacctactatgccgattctgttaaaggtcgcttcactatttcacgcgatgatgcgcgtaataccgtgtacttacagatgaactcactgaaacctgaggataccgccgtttattattgtgcggcatctatgcacctgaacaatatcagcattagtgactattggggtcagggcacacaaggcacggtctcaagcggcggaagctctggtgaacagaaactgatttcagaagccaa

SEQ ID NO: 1991 - protein, 7 aa, Artificial Sequence
  Synthetic
DYCMDCF

SEQ ID NO: 1992 - protein, 5 aa, Artificial Sequence
  Synthetic
PYSFK

SEQ ID NO: 1993 - protein, 10 aa, Artificial Sequence
  Synthetic
PFAPLTVLLA

SEQ ID NO: 1994 - protein, 121 aa, Artificial Sequence
  Synthetic
EVQLVESGGGLVQAGDSLRLSCAASGDYCMDCFMGWFRQAPGKEREFVAAITPYSFKTYYADSVKGRFTISRDDARNTVYLQMNSLKPEDTAVYYCAAPFAPLTVLLAEYWGQGTQGTVSS

SEQ ID NO: 1995 - DNA, 419 bp, Artificial Sequence
  Synthetic
aggagatataccatggaagttcaactggttgaatctggtggcggtttagttcaagccggtgatagccttcgtctgagctgcgccgcaagcggagattactgcatggattgctttatgggttggtttcgccaggcacctggtaaagaacgtgaatttgtggcagccattaccccctattcctttaagacctactatgccgattctgttaaaggtcgcttcactatttcacgcgatgatgcgcgtaataccgtgtacttacagatgaactcactgaaacctgaggataccgccgtttattattgtgcggcaccgttcgcgccccttaccgttcttctcgcggagtattggggtcagggcacacaaggcacggtctcaagcggcggaagctctggtgaacagaaactgatttcagaagccaa

SEQ ID NO: 1996 - protein, 7 aa, Artificial Sequence
  Synthetic
DYCMDCF

SEQ ID NO: 1997 - protein, 5 aa, Artificial Sequence
  Synthetic
PYSFK

SEQ ID NO: 1998 - protein, 10 aa, Artificial Sequence
  Synthetic
NPLDPNWTNS

SEQ ID NO: 1999 - protein, 121 aa, Artificial Sequence
  Synthetic
EVQLVESGGGLVQAGDSLRLSCAASGDYCMDCFMGWFRQAPGKEREFVAAITPYSFKTYYADSVKGRFTISRDDACNTVYLQMNSLKPEDTAVYYCAANPLDPNWTNSDYWGQGTQVTVSS

SEQ ID NO: 2000 - DNA, 421 bp, Artificial Sequence
  Synthetic
gaaggagatataccatggaagttcaactggttgaatctggtggcggtttagttcaagccggtgatagccttcgtctgagctgcgccgcaagcggagattactgcatggattgctttatgggttggtttcgccaggcacctggtaaagaacgtgaatttgtggcagccattaccccctattcctttaagacctactatgccgattctgttaaaggtcgcttcactatttcacgcgatgatgcgtgtaataccgtgtacttacagatgaactcactgaaacctgaggataccgccgtttattattgtgcggcaaaccctctggaccccaactggactaattctgactattggggtcagggcacacaagtcacggtctcaagcggcggaagctctggtgaacagaaactgatttcagaagccaa

SEQ ID NO: 2001 - protein, 7 aa, Artificial Sequence
  Synthetic
DYCMDCF

SEQ ID NO: 2002 - protein, 5 aa, Artificial Sequence
  Synthetic
PYSFK

SEQ ID NO: 2003 - protein, 10 aa, Artificial Sequence
  Synthetic
QVSLVTHGDL

SEQ ID NO: 2004 - protein, 121 aa, Artificial Sequence
  Synthetic
EVQLVESGGGLVQAGDSLRLSCATSGDYCMDCFMGWFRQAPGKEREFVAAITPYSFKTYYADSVKGRFTISRDDARNTVYLQMNSLKPEDTAVYYCAAQVSLVTHGDLDYWGQGTQVTVSS

SEQ ID NO: 2005 - DNA, 414 bp, Artificial Sequence
  Synthetic
atataccatggaagttcaactggttgaatctggtggcggtttagttcaagccggtgatagccttcgtctgagctgcgccacaagcggagattactgcatggattgctttatgggttggtttcgccaggcacctggtaaagaacgtgaatttgtggcagccattaccccctattcctttaagacctactatgccgattctgttaaaggtcgcttcactatttcacgcgatgatgcgcgtaataccgtgtacttacagatgaactcactgaaacctgaggataccgccgtttattattgtgcggcacaggtctcccttgttacccatggggatctggactattggggtcagggcacacaagtcacggtctcaagcggcggaagctctggtgaacagaaactgatttcagaagccaa

SEQ ID NO: 2006 - protein, 7 aa, Artificial Sequence
  Synthetic
DYCMDCF

SEQ ID NO: 2007 - protein, 5 aa, Artificial Sequence
  Synthetic
PYSFK

SEQ ID NO: 2008 - protein, 10 aa, Artificial Sequence
  Synthetic
DSLILANSQW

SEQ ID NO: 2009 - protein, 121 aa, Artificial Sequence
  Synthetic
EVQLVESGGGLVQAGDSLRLSCAASGDYCMDCFMDWFRQAPGKEREFVAAITPYSFKTYYADSVKGRFTISRDDARNTVYLQMNSLKPEDTAVYYCAADSLILANSQWDYWGQGTQGTVSS

SEQ ID NO: 2010 - DNA, 412 bp, Artificial Sequence
  Synthetic
ataccatggaagttcaactggttgaatctggtggcggtttagttcaagccggtgatagccttcgtctgagctgcgccgcaagcggagattactgcatggattgctttatggattggtttcgccaggcacctggtaaagaacgtgaatttgtggcagccattaccccctattcctttaagacctactatgccgattctgttaaaggtcgcttcactatttcacgcgatgatgcgcgtaataccgtgtacttacagatgaactcactgaaacctgaggataccgccgtttattattgtgcggcagacagccttattttggctaattctcagtgggactattggggtcagggcacacaaggcacggtctcaagcggcggaagctctggtgaacagaaactgatttcagaagccaa

SEQ ID NO: 2011 - protein, 7 aa, Artificial Sequence
  Synthetic
DYCMDCF

SEQ ID NO: 2012 - protein, 5 aa, Artificial Sequence
  Synthetic
PYSFK

SEQ ID NO: 2013 - protein, 10 aa, Artificial Sequence
  Synthetic
YTSHSDTAFL

SEQ ID NO: 2014 - protein, 121 aa, Artificial Sequence
  Synthetic
EVQLVESGGGLVQAGDSLRLSCAASGDYCMDCFMGWFRQAPGKEREFVAAITPYSFKTYYADSVKGRFTISRDDARNTVYLQMNSLKPEDTAVYYCAAYTSHSDTAFLNYWGQGTQVTVSS

SEQ ID NO: 2015 - DNA, 410 bp, Artificial Sequence
  Synthetic
accatggaagttcaactggttgaatctggtggcggtttagttcaagccggtgatagccttcgtctgagctgcgccgcaagcggagattactgcatggattgctttatgggttggtttcgccaggcacctggtaaagaacgtgaatttgtggcagccattaccccctattcctttaagacctactatgccgattctgttaaaggtcgcttcactatttcacgcgatgatgcgcgtaataccgtgtacttacagatgaactcactgaaacctgaggataccgccgtttattattgtgcggcatacaccagccactcggatacggcttttctgaactattggggtcagggcacacaagtcacggtctcaagcggcggaagctctggtgaacagaaactgatttcagaagccaa

SEQ ID NO: 2016 - protein, 7 aa, Artificial Sequence
  Synthetic
DYCMDCF

SEQ ID NO: 2017 - protein, 5 aa, Artificial Sequence
  Synthetic
PYSFK

SEQ ID NO: 2018 - protein, 10 aa, Artificial Sequence
  Synthetic
PLNIGTATIA

SEQ ID NO: 2019 - protein, 121 aa, Artificial Sequence
  Synthetic
EVQLFESGGGLVQAGDSLRLSCAASGDYCMDCFMGWFRQAPGKEREFVAAITPYSFKTYYADSVKGRFTISRDDARNTVYLQMNSLKPEDTAVYYCAAPLNIGTATIADYWGQGTQGTVSS

SEQ ID NO: 2020 - DNA, 416 bp, Artificial Sequence
  Synthetic
agatataccatggaagttcaactgtttgaatctggtggcggtttagttcaagccggtgatagccttcgtctgagctgcgccgcaagcggagattactgcatggattgctttatgggttggtttcgccaggcacctggtaaagaacgtgaatttgtggcagccattaccccctattcctttaagacctactatgccgattctgttaaaggtcgcttcactatttcacgcgatgatgcgcgtaataccgtgtacttacagatgaactcactgaaacctgaggataccgccgtttattattgtgcggcacccctcaatatcggcaccgcgacgattgccgactattggggtcagggcacacaaggcacggtctcaagcggcggaagctctggtgaaaagaaactgatttcagaagccaa

SEQ ID NO: 2021 - protein, 7 aa, Artificial Sequence
  Synthetic
DYCMDCF

SEQ ID NO: 2022 - protein, 5 aa, Artificial Sequence
  Synthetic
PYSFK

SEQ ID NO: 2023 - protein, 10 aa, Artificial Sequence
  Synthetic
SANILHLSVI

SEQ ID NO: 2024 - protein, 121 aa, Artificial Sequence
  Synthetic
EVQLVESGGGLVQAGDSLRLSCAASGDYCMDCFMGWFRQAPGKEREFVAAITPYSFKTYYADSVKGRFTISRDDVRNTVYLQMNSLKPEDTAVYYCAASANILHLSVINYWGQGTQVTVSS

SEQ ID NO: 2025 - DNA, 418 bp, Artificial Sequence
  Synthetic
ggagatataccatggaagttcaactggttgaatctggtggcggtttagttcaagccggtgatagccttcgtctgagctgcgccgcaagcggagattactgcatggattgctttatgggttggtttcgccaggcacctggtaaagaacgtgaatttgtggcagccattaccccctattcctttaagacctactatgccgattctgttaaaggtcgcttcactatttcacgcgatgatgtgcgtaataccgtgtacttacagatgaactcactgaaacctgaggataccgccgtttattattgtgcggcaagcgcgaacattctccatttgtctgttatcaactattggggtcagggcacacaagtcacggtctcaagcggcggaagctctggtgaacagaaactgatttcagaagccaa

SEQ ID NO: 2026 - protein, 7 aa, Artificial Sequence
  Synthetic
DYCMDCF

SEQ ID NO: 2027 - protein, 5 aa, Artificial Sequence
  Synthetic
PYSFK

SEQ ID NO: 2028 - protein, 10 aa, Artificial Sequence
  Synthetic
PFAPLTVLLA

SEQ ID NO: 2029 - protein, 121 aa, Artificial Sequence
  Synthetic
EVQLVESGGGLVQAGDSLRLSCAASGDYCMDCFMGWFRQAPGKEREFVAAITPYSFKTYYADSVKGRFTISRDDARNTVYLQMNSLKPEDTAVYYCAAPFAPLTVLLAEYWVQGTQGTVSS

SEQ ID NO: 2030 - DNA, 410 bp, Artificial Sequence
  Synthetic
accatggaagttcaactggttgaatctggtggcggtttagttcaagccggtgatagccttcgtctgagctgcgccgcaagcggagattactgcatggattgctttatgggttggtttcgccaggcacctggtaaagaacgtgaatttgtggcagccattaccccctattcctttaagacctactatgccgattctgttaaaggtcgcttcactatttcacgcgatgatgcgcgtaataccgtgtacttacagatgaactcactgaaacctgaggataccgccgtttattattgtgcggcaccgttcgcgccccttaccgttcttctcgcggagtattgggttcagggcacacaaggcacggtctcaagcggcggaagctctggtgaaaggaaaatgatttcagaagccaa

SEQ ID NO: 2031 - protein, 7 aa, Artificial Sequence
  Synthetic
AIVHVFA

SEQ ID NO: 2032 - protein, 5 aa, Artificial Sequence
  Synthetic
LDNDA

SEQ ID NO: 2033 - protein, 9 aa, Artificial Sequence
  Synthetic
FCYVPLATC

SEQ ID NO: 2034 - protein, 120 aa, Artificial Sequence
  Synthetic
EVQLVESGGGLVQAGDSLRLSCAASGAIVHVFAMGWFRQAPGKEREFVASINLDNDATNYADSVKGRFTISRDDARNTVYLQMNSLKPEDTAVYYCNAFCYVPLATCDYWGQGTQVTVSS

SEQ ID NO: 2035 - DNA, 405 bp, Artificial Sequence
  Synthetic
ataccatggaagttcaactggttgaatctggtggcggtttagttcaagccggtgatagccttcgtctgagctgcgccgcaagcggagccattgtgcatgtgttcgctatgggttggtttcgccaggcacctggtaaagaacgtgaatttgtggcatccattaaccttgacaacgacgctaccaactatgccgattctgttaaaggtcgcttcactatttcacgcgatgatgcgcgtaataccgtgtacttacagatgaactcactgaaacctgaggataccgccgtttattattgtaatgcattctgctacgtccctttggccacgtgtgactattggggtcagggcacacaagtcacggtctcaagcggcgtaagctctggtgaacagaaactgatttcagaag

SEQ ID NO: 2036 - protein, 7 aa, Artificial Sequence
  Synthetic
AIVHVFA

SEQ ID NO: 2037 - protein, 5 aa, Artificial Sequence
  Synthetic
LDNDA

SEQ ID NO: 2038 - protein, 9 aa, Artificial Sequence
  Synthetic
PFWINSSVV

SEQ ID NO: 2039 - protein, 120 aa, Artificial Sequence
  Synthetic
EVQLVESGGGLVQAGDSLRLSCAASGAIVHVFAMGWFRQAPGKEREFVASINLDNDATNYADSVKGRFTISRDDAHNTVYLQMNSLKPEDTAVYYCNAPFWINSSVVDYWGQGTQVTVSS

SEQ ID NO: 2040 - DNA, 407 bp, Artificial Sequence
  Synthetic
atataccatggaagttcaactggttgaatctggtggcggtttagttcaagccggtgatagccttcgtctgagctgcgccgcaagcggagccattgtgcatgtgttcgctatgggttggtttcgccaggcacctggtaaagaacgtgaatttgtggcatccattaaccttgacaacgacgctaccaactatgccgattctgttaaaggtcgcttcactatttcacgcgatgatgcgcataataccgtgtacttacagatgaactcactgaaacctgaggataccgccgtttattattgtaatgcacccttctggatcaatagttctgttgtggactattggggtcagggcacacaagtcacggtctcaagcggcggaagctctggtgaacagaaactgatttcagaag

SEQ ID NO: 2041 - protein, 7 aa, Artificial Sequence
  Synthetic
AIVHVFA

SEQ ID NO: 2042 - protein, 5 aa, Artificial Sequence
  Synthetic
LDNDA

SEQ ID NO: 2043 - protein, 9 aa, Artificial Sequence
  Synthetic
TIFMDSDLG

SEQ ID NO: 2044 - protein, 120 aa, Artificial Sequence
  Synthetic
EVQLVESGGGLVQAGDSLRLSCAASGAIVHVFAMGWFRQAPGKEREFVASINLDNDATNYADSVKGRFTISRDDARNTVYLQMNSLKPEDTAVYYCNATIFMDSDLGDYWGQGTQVTVSS

SEQ ID NO: 2045 - DNA, 412 bp, Artificial Sequence
  Synthetic
aggagatataccatggaagttcaactggttgaatctggtggcggtttagttcaagccggtgatagccttcgtctgagctgcgccgcaagcggagccattgtgcatgtgttcgctatgggttggtttcgccaggcacctggtaaagaacgtgaatttgtggcatccattaaccttgacaacgacgctaccaactatgccgattctgttaaaggtcgcttcactatttcacgcgatgatgcgcgtaataccgtgtacttacagatgaactcactgaaacctgaggataccgccgtttattattgtaatgcaaccatctttatggattccgatttgggtgactattggggtcagggcacacaagtcacggtctcaagcggcggaagctctggtgaacagaaactgatttcagaag

SEQ ID NO: 2046 - protein, 7 aa, Artificial Sequence
  Synthetic
AIVHVFA

SEQ ID NO: 2047 - protein, 5 aa, Artificial Sequence
  Synthetic
LDNDA

SEQ ID NO: 2048 - protein, 9 aa, Artificial Sequence
  Synthetic
PFWINSSVV

SEQ ID NO: 2049 - protein, 120 aa, Artificial Sequence
  Synthetic
EVQLIESGGGLVQAGDSLRLSCAASGAIVHVFAMGWFRQAPGKEREFVASINLDNDATNYADSVKGRFTISRDDAHNTVYLQMNSLKPEDTAVYYCNAPFWINSSVVDYWGQGTQVTVSS

SEQ ID NO: 2050 - DNA, 412 bp, Artificial Sequence
  Synthetic
aggagatataccatggaagttcaactgattgaatctggtggcggtttagttcaagccggtgatagccttcgtctgagctgcgccgcaagcggagccattgtgcatgtgttcgctatgggttggtttcgccaggcacctggtaaagaacgtgaatttgtggcatccattaaccttgacaacgacgctaccaactatgccgattctgttaaaggtcgcttcactatttcacgcgatgatgcgcataataccgtgtacttacagatgaactcactgaaacctgaggataccgccgtttattattgtaatgcacccttctggatcaatagttctgttgtggactattggggtcagggcacacaagtcacggtctcaagcggcggaagctctggtgaacagaaactgatttcagaag

SEQ ID NO: 2051 - protein, 7 aa, Artificial Sequence
  Synthetic
AIVHVFA

SEQ ID NO: 2052 - protein, 5 aa, Artificial Sequence
  Synthetic
LDNDA

SEQ ID NO: 2053 - protein, 9 aa, Artificial Sequence
  Synthetic
PFWINSSVV

SEQ ID NO: 2054 - protein, 120 aa, Artificial Sequence
  Synthetic
QVQLFESGGGLVQAGDSLRLSCAASGAIVHVFAMGWFRQAPGKEREFVASINLDNDATNYADSVKGRFTISRDDAHNTVYLQMNSLKPEDTAVYYCNAPFWINSSVVDYWGQGTQVTVSS

SEQ ID NO: 2055 - DNA, 407 bp, Artificial Sequence
  Synthetic
atataccatgcaggttcaactgtttgaatctggtggcggtttagttcaagccggtgatagccttcgtctgagctgcgccgcaagcggagccattgtgcatgtgttcgctatgggttggtttcgccaggcacctggtaaagaacgtgaatttgtggcatccattaaccttgacaacgacgctaccaactatgccgattctgttaaaggtcgcttcactatttcacgcgatgatgcgcataataccgtgtacttacagatgaactcactgaaacctgaggataccgccgtttattattgtaatgcacccttctggatcaatagttctgttgtggactattggggtcagggcacacaagtcacggtctcaagcggcggaagctctggtgaacagaaactgatttcagaag

SEQ ID NO: 2056 - protein, 7 aa, Artificial Sequence
  Synthetic
AIVHVFA

SEQ ID NO: 2057 - protein, 5 aa, Artificial Sequence
  Synthetic
LDNDA

SEQ ID NO: 2058 - protein, 9 aa, Artificial Sequence
  Synthetic
TIFMDSDLG

SEQ ID NO: 2059 - protein, 120 aa, Artificial Sequence
  Synthetic
EVQLFESGGGLVQAGDSLRLSCAASGAIVHVFAMGWFRQAPGKEREFVASINLDNDATNYADSVKGRFTISRDDARNTVYLQMNSLKPEDTAVYYCNATIFMDSDLGDYWGQGTQVTVSS

SEQ ID NO: 2060 - DNA, 409 bp, Artificial Sequence
  Synthetic
agatataccatggaagttcaactgtttgaatctggtggcggtttagttcaagccggtgatagccttcgtctgagctgcgccgcaagcggagccattgtgcatgtgttcgctatgggttggtttcgccaggcacctggtaaagaacgtgaatttgtggcatccattaaccttgacaacgacgctaccaactatgccgattctgttaaaggtcgcttcactatttcacgcgatgatgcgcgtaataccgtgtacttacagatgaactcactgaaacctgaggataccgccgtttattattgtaatgcaaccatctttatggattccgatttgggtgactattggggtcagggcacacaagtcacggtctcaagcggcggaagctctggtgaacagaaactgatttcagaag

SEQ ID NO: 2061 - protein, 7 aa, Artificial Sequence
  Synthetic
AIVHVFA

SEQ ID NO: 2062 - protein, 5 aa, Artificial Sequence
  Synthetic
LDNDA

SEQ ID NO: 2063 - protein, 9 aa, Artificial Sequence
  Synthetic
TIFMDSDLG

SEQ ID NO: 2064 - protein, 120 aa, Artificial Sequence
  Synthetic
EVQLVESGGGLVQAGDSLRLSCAASGAIVHVFAMGWFRQAPGKEREFVASINLDNDATNYADSVKGRFTISRDDARNTVYLQMNSLKPEDTAVYYCNATIFMDSDLGAYWGQGTQVTVSS

SEQ ID NO: 2065 - DNA, 413 bp, Artificial Sequence
  Synthetic
aaggagatataccatggaagttcaactggttgaatctggtggcggtttagttcaagccggtgatagccttcgtctgagctgcgccgcaagcggagccattgtgcatgtgttcgctatgggttggtttcgccaggcacctggtaaagaacgtgaatttgtggcatccattaaccttgacaacgacgctaccaactatgccgattctgttaaaggtcgcttcactatttcacgcgatgatgcgcgtaataccgtgtacttacagatgaactcactgaaacctgaggataccgccgtttattattgtaatgcaaccatctttatggattccgatttgggtgcctattggggtcagggcacacaagtcacggtctcaagcggcggaagctctggtgaacagaaactgatttcagaag

SEQ ID NO: 2066 - protein, 7 aa, Artificial Sequence
  Synthetic
AIVHVFA

SEQ ID NO: 2067 - protein, 5 aa, Artificial Sequence
  Synthetic
LDNDA

SEQ ID NO: 2068 - protein, 10 aa, Artificial Sequence
  Synthetic
TAISPISIVD

SEQ ID NO: 2069 - protein, 121 aa, Artificial Sequence
  Synthetic
EVQLVESGGGLVQAGDSLRLSCAASGAIVHVFAMGWFRQAPGKEREFVASINLDNDATNYADSVKGRFTISRDDARNTVYLQMNSLKPEDTAVYYCAATAISPISIVDEYWGQGTQVTVSS

SEQ ID NO: 2070 - DNA, 408 bp, Artificial Sequence
  Synthetic
ataccatggaagttcaactggttgaatctggtggcggtttagttcaagccggtgatagccttcgtctgagctgcgccgcaagcggagccattgtgcatgtgttcgctatgggttggtttcgccaggcacctggtaaagaacgtgaatttgtggcatccattaaccttgacaacgacgctaccaactatgccgattctgttaaaggtcgcttcactatttcacgcgatgatgcgcgtaataccgtgtacttacagatgaactcactgaaacctgaggataccgccgtttattattgtgcggcaacggctattagccctatctctattgtggatgagtattggggtcagggcacacaagtcacggtctcaagcggcggaagctctggtgaacagaaactgatttcagaag

SEQ ID NO: 2071 - protein, 7 aa, Artificial Sequence
  Synthetic
AIVHVFA

SEQ ID NO: 2072 - protein, 5 aa, Artificial Sequence
  Synthetic
LDNDA

SEQ ID NO: 2073 - protein, 9 aa, Artificial Sequence
  Synthetic
TIFMDSDLG

SEQ ID NO: 2074 - protein, 120 aa, Artificial Sequence
  Synthetic
EVQLVESGGGLVQAGDSLRLSCAASGAIVHVFAMGWFRQAPGKEREFVASINLDNDATNYADSVKGRFTISRDDARNTVYLQMNSLKPVDTAVYYCNATIFMDSDLGDYWGQGTQVTVSS

SEQ ID NO: 2075 - DNA, 407 bp, Artificial Sequence
  Synthetic
atataccatggaagttcaactggttgaatctggtggcggtttagttcaagccggtgatagccttcgtctgagctgcgccgcaagcggagccattgtgcatgtgttcgctatgggttggtttcgccaggcacctggtaaagaacgtgaatttgtggcatccattaaccttgacaacgacgctaccaactatgccgattctgttaaaggtcgcttcactatttcacgcgatgatgcgcgtaataccgtgtacttacagatgaactcactgaaacctgtggataccgccgtttattattgtaatgcaaccatctttatggattccgatttgggtgactattggggtcagggcacacaagtcacggtctcaagcggcggaagctctggtgaacagaaactgatttcagaag

SEQ ID NO: 2076 - protein, 7 aa, Artificial Sequence
  Synthetic
AIVHVFA

SEQ ID NO: 2077 - protein, 5 aa, Artificial Sequence
  Synthetic
LDNDA

SEQ ID NO: 2078 - protein, 9 aa, Artificial Sequence
  Synthetic
TIFMDSDLG

SEQ ID NO: 2079 - protein, 120 aa, Artificial Sequence
  Synthetic
EVQLVESGGGLVQAGDSLRLSCAASGAIVHVFAMGWFRQAPGKEREFVASINLDNDATNYADSVKGRFTISRDDARNTVYLQMNSLKPEDTAVYYCNATIFMDSDLGAYWGQDTQVTVSS

SEQ ID NO: 2080 - DNA, 403 bp, Artificial Sequence
  Synthetic
accatggaagttcaactggttgaatctggtggcggtttagttcaagccggtgatagccttcgtctgagctgcgccgcaagcggagccattgtgcatgtgttcgctatgggttggtttcgccaggcacctggtaaagaacgtgaatttgtggcatccattaaccttgacaacgacgctaccaactatgccgattctgttaaaggtcgcttcactatttcacgcgatgatgcgcgtaataccgtgtacttacagatgaactcgctgaaacctgaggataccgccgtttattattgtaatgcaaccatctttatggattccgatttgggtgcctattggggtcaggacacacaagtcacggtctcaagcggcggaagctctggtgaacagaaactgatttcagaag

SEQ ID NO: 2081 - protein, 7 aa, Artificial Sequence
  Synthetic
AIVHVFA

SEQ ID NO: 2082 - protein, 5 aa, Artificial Sequence
  Synthetic
LDNDA

SEQ ID NO: 2083 - protein, 9 aa, Artificial Sequence
  Synthetic
FCYVPLATC

SEQ ID NO: 2084 - protein, 120 aa, Artificial Sequence
  Synthetic
EVQLVESGGGLVQAGDSLRLSCAASGAIVHVFAMGWFRQAPGKEREFVASINLDNDATNYADSVKGRFTISRDDARNTVYLQMNSLKPEDTAVYYCNAFCYVPLATCDYLGQGTQVTVSS

SEQ ID NO: 2085 - DNA, 411 bp, Artificial Sequence
  Synthetic
ggagatataccatggaagttcaactggttgaatctggtggcggtttagttcaagccggtgatagccttcgtctgagctgcgccgcaagcggagccattgtgcatgtgttcgctatgggttggtttcgccaggcacctggtaaagaacgtgaatttgtggcatccattaaccttgacaacgacgctaccaactatgccgattctgttaaaggtcgcttcactatttcacgcgatgatgcgcgtaataccgtgtacttacagatgaactcactgaaacctgaggataccgccgtttattactgtaatgcattctgctacgtccctttggccacgtgtgactatttgggtcagggcacacaagtcacggtctcaagcggcggaagctctggtgaacagaaactgatttcagaag

SEQ ID NO: 2086 - protein, 7 aa, Artificial Sequence
  Synthetic
AIVHVFA

SEQ ID NO: 2087 - protein, 5 aa, Artificial Sequence
  Synthetic
LDSDA

SEQ ID NO: 2088 - protein, 10 aa, Artificial Sequence
  Synthetic
TAISPISIVD

SEQ ID NO: 2089 - protein, 121 aa, Artificial Sequence
  Synthetic
EVQLVESGGGLVQAGDSLRLSCAASGAIVHVFAMGWFRQAPGKEREFVASINLDSDATNYADSVKGRFTISRDDARNTVYLQMNSLKPEDTAVYYCAATAISPISIVDEYWGQGTQVTVSS

SEQ ID NO: 2090 - DNA, 416 bp, Artificial Sequence
  Synthetic
aaggagatataccatggaagttcaactggttgaatctggtggcggtttagttcaagccggtgatagccttcgtctgagctgcgccgcaagcggagccattgtgcatgtgttcgctatgggttggtttcgccaggcacctggtaaagaacgtgaatttgtggcatccattaaccttgacagcgacgctaccaactatgccgattctgttaaaggtcgcttcactatttcacgcgatgatgcgcgtaataccgtgtacttacagatgaactcactgaaacctgaggataccgccgtttattattgtgcggcaacggctattagccctatctctattgtggatgagtattggggtcagggcacacaagtcacggtctcaagcggcggaagctctggtgaacagaaactgatttcagaag

SEQ ID NO: 2091 - protein, 7 aa, Artificial Sequence
  Synthetic
AIVHVFA

SEQ ID NO: 2092 - protein, 5 aa, Artificial Sequence
  Synthetic
LDNDA

SEQ ID NO: 2093 - protein, 9 aa, Artificial Sequence
  Synthetic
PFWINSSVV

SEQ ID NO: 2094 - protein, 120 aa, Artificial Sequence
  Synthetic
EVQLVEYGGGLVQAGDSLRLSCAASGAIVHVFAMGWFRQAPGKEREFVASINLDNDATNYADSVKGRFTISRDDARNTVYLQMNSLKPEDTAVYYCNAPFWINSSVVDYWGQGTQVTVSS

SEQ ID NO: 2095 - DNA, 411 bp, Artificial Sequence
  Synthetic
ggagatataccatggaagttcaactggttgaatatggtggcggtttagttcaagccggtgatagccttcgtctgagctgcgccgcaagcggagccattgtgcatgtgttcgctatgggttggtttcgccaggcacctggtaaagaacgtgaatttgtggcatccattaaccttgacaacgacgctaccaactatgccgattctgttaaaggtcgcttcactatttcacgcgatgatgcgcgtaataccgtgtacttacagatgaactcactgaaacctgaggataccgccgtttattattgtaatgcacccttctggatcaatagttctgttgtggactattggggtcagggcacacaagtcacggtctcaagcggcggaagctctggtgaacagaaactgatttcagaag

SEQ ID NO: 2096 - protein, 7 aa, Artificial Sequence
  Synthetic
AIVHVFA

SEQ ID NO: 2097 - protein, 5 aa, Artificial Sequence
  Synthetic
LDNDA

SEQ ID NO: 2098 - protein, 9 aa, Artificial Sequence
  Synthetic
TIFMDSDLG

SEQ ID NO: 2099 - protein, 120 aa, Artificial Sequence
  Synthetic
QVQLVESGGGLVQAGDSLRLSCAASGAIVHVFAMGWFRQAPGKEREFVASINLDNDATNYADSVKGRFTISRDDARNTVYLQMNSLKPEDTAVYYCNATIFMDSDLGDYWGQGTQVTVSS

SEQ ID NO: 2100 - DNA, 411 bp, Artificial Sequence
  Synthetic
ggagatataccatgcaggttcaactggttgaatctggtggcggtttagttcaagccggtgatagccttcgtctgagctgcgccgcaagcggagccattgtgcatgtgttcgctatgggttggtttcgccaggcacctggtaaagaacgtgaatttgtggcatccattaaccttgacaacgacgctaccaactatgccgattctgttaaaggtcgcttcactatttcacgcgatgatgcgcgtaataccgtgtacttacagatgaactcactgaaacctgaggataccgccgtttattattgtaatgcaaccatctttatggattccgatttgggtgactattggggtcagggcacacaagtcacggtctcaagcggcggaagctctggtgaacagaaactgatttcagaag

SEQ ID NO: 2101 - protein, 7 aa, Artificial Sequence
  Synthetic
AIVHVFA

SEQ ID NO: 2102 - protein, 5 aa, Artificial Sequence
  Synthetic
LDNDA

SEQ ID NO: 2103 - protein, 9 aa, Artificial Sequence
  Synthetic
TIFMDSDLG

SEQ ID NO: 2104 - protein, 120 aa, Artificial Sequence
  Synthetic
EVQLVESGGGLVQAGDSLRLSCAASGAIVHVFAMGWFRQAPGKEREFVASINLDNDATNYADSVKGRFTISRDDVRNTVYLQMNSLKPEDTAVYYCNATIFMDSDLGDYWGQGTQVTVSS

SEQ ID NO: 2105 - DNA, 412 bp, Artificial Sequence
  Synthetic
aggagatataccatggaagttcaactggttgaatctggtggcggtttagttcaagccggtgatagccttcgtctgagctgcgccgcaagcggagccattgtgcatgtgttcgctatgggttggtttcgccaggcacctggtaaagaacgtgaatttgtggcatccattaaccttgacaacgacgctaccaactatgccgattctgttaaaggtcgcttcactatttcacgcgatgatgtgcgtaataccgtgtacttacagatgaactcactgaaacctgaggataccgccgtttattattgtaatgcaaccatctttatggattccgatttgggtgactattggggtcagggcacacaagtcacggtctcaagcggcggaagctctggtgaacagaaactgatttcagaag

SEQ ID NO: 2106 - protein, 7 aa, Artificial Sequence
  Synthetic
AIVHVFA

SEQ ID NO: 2107 - protein, 5 aa, Artificial Sequence
  Synthetic
LDNDA

SEQ ID NO: 2108 - protein, 9 aa, Artificial Sequence
  Synthetic
TIFMDSDLG

SEQ ID NO: 2109 - protein, 120 aa, Artificial Sequence
  Synthetic
EVQLVESGGGLVQAGDSLRLSCAASGAIVHVFAMGWFRQAPGKEREFVASINLDNDATNYADSVKGLFTISRDDARNTVYLQMNSLKPEDTAVYYCNATIFMDSDLGDYWGQGTQVTVSS

SEQ ID NO: 2110 - DNA, 414 bp, Artificial Sequence
  Synthetic
gaaggagatataccatggaagttcaactggttgaatctggtggcggtttagttcaagccggtgatagccttcgtctgagctgcgccgcaagcggagccattgtgcatgtgttcgctatgggttggtttcgccaggcacctggtaaagaacgtgaatttgtggcatccattaaccttgacaacgacgctaccaactatgccgattctgttaaaggtctcttcactatttcacgcgatgatgcgcgtaataccgtgtacttacagatgaactcactgaaacctgaggataccgccgtttattattgtaatgcaaccatctttatggattccgatttgggtgactattggggtcagggcacacaagtcacggtctcaagcggcggaagctctggtgaacagaaactgatttcagaag

SEQ ID NO: 2111 - protein, 7 aa, Artificial Sequence
  Synthetic
AIVHVFT

SEQ ID NO: 2112 - protein, 5 aa, Artificial Sequence
  Synthetic
LDNDA

SEQ ID NO: 2113 - protein, 9 aa, Artificial Sequence
  Synthetic
FCYVPLATC

SEQ ID NO: 2114 - protein, 120 aa, Artificial Sequence
  Synthetic
EVQLVESGGGLVQAGDSLRLSCAASGAIVHVFTMGWFRQAPGKEREFVASINLDNDATNYADSVKGRFTISRDDARNTVYLQMNSLKPEDTAVYYCNAFCYVPLATCDYWGQGTQDTVSS

SEQ ID NO: 2115 - DNA, 405 bp, Artificial Sequence
  Synthetic
ataccatggaagttcaactggttgaatctggtggcggtttagttcaagccggtgatagccttcgtctgagctgcgccgcaagcggagccattgtgcatgtgttcactatgggttggtttcgccaggcacctggtaaagaacgtgaatttgtggcatccattaaccttgacaacgacgctaccaactatgccgattctgttaaaggtcgcttcactatttcacgcgatgatgcgcgtaataccgtgtacttacagatgaactcactgaaacctgaggataccgccgtttattattgtaatgcattctgctacgtccctttggccacgtgtgactattggggtcagggcacacaagacacggtctcaagcggcggaagctctggtgaacagaaactgatttcagaag

SEQ ID NO: 2116 - protein, 7 aa, Artificial Sequence
  Synthetic
AIVHVFA

SEQ ID NO: 2117 - protein, 5 aa, Artificial Sequence
  Synthetic
LDNDA

SEQ ID NO: 2118 - protein, 10 aa, Artificial Sequence
  Synthetic
TAISPISIVD

SEQ ID NO: 2119 - protein, 121 aa, Artificial Sequence
  Synthetic
EVQLVESGGGLVQAGDSLRLSCAASGAIVHVFAMGWFRQAPGKEREFVASINLDNDATNYADSVKGRFTISRDDARNTVYLQMNSLKPEDTAVYCCAATAISPISIVDEYWGQGTQVTVSS

SEQ ID NO: 2120 - DNA, 408 bp, Artificial Sequence
  Synthetic
ataccatggaagttcaactggttgaatctggtggcggtttagttcaagccggtgatagccttcgtctgagctgcgccgcaagcggagccattgtgcatgtgttcgctatgggttggtttcgccaggcacctggtaaagaacgtgaatttgtggcatccattaaccttgacaacgacgctaccaactatgccgattctgttaagggtcgcttcactatttcacgcgatgatgcgcgtaataccgtgtacttacagatgaactcactgaaacctgaggataccgccgtttattgttgtgcggcaacggctattagccctatctctattgtggatgagtattggggtcagggcacacaagtcacggtctcaagcggcggaagctctggtgaacagaaactgatttcagaag

SEQ ID NO: 2121 - protein, 7 aa, Artificial Sequence
  Synthetic
AIVHVFA

SEQ ID NO: 2122 - protein, 5 aa, Artificial Sequence
  Synthetic
LDNDA

SEQ ID NO: 2123 - protein, 9 aa, Artificial Sequence
  Synthetic
TIFMDSDLG

SEQ ID NO: 2124 - protein, 120 aa, Artificial Sequence
  Synthetic
EVQLVESGGGLVQAGDSLRLSCAASGAIVHVFAMGWFRQAPGKEREFVASINLDNDATNYADSVKGRFTISRDDARYTVYLQMNSLKPEDTAVYYCNATIFMDSDLGDYWGQGTQVTVSS

SEQ ID NO: 2125 - DNA, 414 bp, Artificial Sequence
  Synthetic
gaaggagatataccatggaagttcaactggttgaatctggtggcggtttagttcaagccggtgatagccttcgtctgagctgcgccgcaagcggagccattgtgcatgtgttcgctatgggttggtttcgccaggcacctggtaaagaacgtgaatttgtggcatccattaaccttgacaacgacgctaccaactatgccgattctgttaaaggtcgcttcactatttcacgcgatgatgcgcgttataccgtgtacttacagatgaactcactgaaacctgaggataccgccgtttattattgtaatgcaaccatctttatggattccgatttgggtgactattggggtcagggcacacaagtcacggtctcaagcggcggaagctctggtgaacagaaactgatttcagaag

SEQ ID NO: 2126 - protein, 7 aa, Artificial Sequence
  Synthetic
AIVHVFA

SEQ ID NO: 2127 - protein, 5 aa, Artificial Sequence
  Synthetic
LDNDA

SEQ ID NO: 2128 - protein, 9 aa, Artificial Sequence
  Synthetic
TIFMDSDLG

SEQ ID NO: 2129 - protein, 120 aa, Artificial Sequence
  Synthetic
KVQLVESGGGLVQAGDSLRLSCAASGAIVHVFAMGWFRQAPGKEREFVASINLDNDATNYADSVKGRFTISRDDARNTVYLQMNSLKPEDTAVYYCNATIFMDSDLGDYWGQGTQVTVSS

SEQ ID NO: 2130 - DNA, 414 bp, Artificial Sequence
  Synthetic
gaaggagatataccatgaaagttcaactggttgaatctggtggcggtttagttcaagccggtgatagccttcgtctgagctgcgccgcaagcggagccattgtgcatgtgttcgctatgggttggtttcgccaggcacctggtaaagaacgtgaatttgtggcatccattaaccttgacaacgacgctaccaactatgccgattctgttaaaggtcgcttcactatttcacgcgatgatgcgcgtaataccgtgtacttacagatgaactcactgaaacctgaggataccgccgtttattattgtaatgcaaccatctttatggattccgatttgggtgactattggggtcagggcacacaagtcacggtctcaagcggcggaagctctggtgaacagaaactgatttcagaag

SEQ ID NO: 2131 - protein, 7 aa, Artificial Sequence
  Synthetic
AIVHVFA

SEQ ID NO: 2132 - protein, 5 aa, Artificial Sequence
  Synthetic
LDNDA

SEQ ID NO: 2133 - protein, 9 aa, Artificial Sequence
  Synthetic
TIFMDSDLG

SEQ ID NO: 2134 - protein, 120 aa, Artificial Sequence
  Synthetic
EVQLVESGGGLVQAGDSLRPSCAASGAIVHVFAMGWFRQAPGKEREFVASINLDNDATNYTDSVKGRFTISRDDARNTVYLQMNSLKPEDTAVYYCNATIFMDSDLGDYWGQGTQVTVSS

SEQ ID NO: 2135 - DNA, 411 bp, Artificial Sequence
  Synthetic
ggagatataccatggaagttcaactggttgaatctggtggcggtttagttcaagccggtgatagccttcgtccgagctgcgccgcaagcggagccattgtgcatgtgttcgctatgggttggtttcgccaggcacctggtaaagaacgtgaatttgtggcatccattaaccttgacaacgacgctaccaactataccgattctgttaaaggtcgcttcactatttcacgcgatgatgcgcgtaataccgtgtacttacagatgaactcactgaaacctgaggataccgccgtttattattgtaatgcaaccatctttatggattccgatttgggtgactattggggtcagggcacacaagtcacggtctcaagcggcggaagctctggtgaacagaaactgatttcagaag

SEQ ID NO: 2136 - protein, 7 aa, Artificial Sequence
  Synthetic
AIVHVFA

SEQ ID NO: 2137 - protein, 5 aa, Artificial Sequence
  Synthetic
LDNDA

SEQ ID NO: 2138 - protein, 9 aa, Artificial Sequence
  Synthetic
TIFMDSDLG

SEQ ID NO: 2139 - protein, 120 aa, Artificial Sequence
  Synthetic
EVQLVESGGGLVQAGDSLRLSCAASGAIVHVFAMGWFRQAPGKEREFVASINLDNDATNYADSVKGRFTISRDDARNTVYLQMNSLKPEDTAVYYCNATIFMDSDLGDYWGQGPQVTVSS

SEQ ID NO: 2140 - DNA, 413 bp, Artificial Sequence
  Synthetic
aaggagatataccatggaagttcaactggttgaatctggtggcggtttagttcaagccggtgatagccttcgtctgagctgcgccgcaagcggagccattgtgcatgtgttcgctatgggttggtttcgccaggcacctggtaaagaacgtgaatttgtggcatccattaaccttgacaacgacgctaccaactatgccgattctgttaaaggtcgcttcactatttcacgcgatgatgcgcgtaataccgtgtacttacagatgaactcactgaaacctgaggataccgccgtttattattgtaatgcaaccatctttatggattccgatttgggtgactattggggtcagggcccacaagtcacggtctcaagcggcggaagctctggtgaacagaaactgatttcagaag

SEQ ID NO: 2141 - protein, 7 aa, Artificial Sequence
  Synthetic
AIVHVFA

SEQ ID NO: 2142 - protein, 5 aa, Artificial Sequence
  Synthetic
LDNDA

SEQ ID NO: 2143 - protein, 9 aa, Artificial Sequence
  Synthetic
TIFMDSDLG

SEQ ID NO: 2144 - protein, 120 aa, Artificial Sequence
  Synthetic
EVQLVESGGGLVQAGDSLRLSCAASGAIVHVFAMGWFRQAPGKEREFVASINLDNDATNYADSVKGRFTISRYDARNTVYLQMNSLKPEDTAVYYCNATIFMDSDLGDYWGQGTQVTVSS

SEQ ID NO: 2145 - DNA, 409 bp, Artificial Sequence
  Synthetic
agatataccatggaagttcaactggttgaatctggtggcggtttagttcaagccggtgatagccttcgtctgagctgcgccgcaagcggagccattgtgcatgtgttcgctatgggttggtttcgccaggcacctggtaaagaacgtgaatttgtggcatccattaaccttgacaacgacgctaccaactatgccgattctgttaaaggtcgcttcactatttcacgctatgatgcgcgtaataccgtgtacttacagatgaactcactgaaacctgaggataccgccgtttattattgtaatgcaaccatctttatggattccgatttgggtgactattggggtcagggcacacaagtcacggtctcaagcggcggaagctctggtgaacagaaactgatttcagaag

SEQ ID NO: 2146 - protein, 7 aa, Artificial Sequence
  Synthetic
AIVHVFA

SEQ ID NO: 2147 - protein, 5 aa, Artificial Sequence
  Synthetic
LDNDA

SEQ ID NO: 2148 - protein, 10 aa, Artificial Sequence
  Synthetic
TAISPISIVD

SEQ ID NO: 2149 - protein, 121 aa, Artificial Sequence
  Synthetic
EVQLVESGGGLVQAGDSLRLSCAASGAIVHVFAMGWFRQAPGKEREFVASINLDNDATNYADSVKGRFTISRDDARNTVYLQMNSLKPEDTAVYYCVATAISPISIVDEYWGQGTQVTVSS

SEQ ID NO: 2150 - DNA, 414 bp, Artificial Sequence
  Synthetic
ggagatataccatggaagttcaactggttgaatctggtggcggtttagttcaagccggtgatagccttcgtctgagctgcgccgcaagcggagccattgtgcatgtgttcgctatgggttggtttcgccaggcacctggtaaagaacgtgaatttgtggcatccattaaccttgacaacgacgctaccaactatgccgattctgttaaaggtcgcttcactatttcacgcgatgatgcgcgtaataccgtgtacttacagatgaactcactgaaacctgaggataccgccgtttattattgtgtggcaacggctattagccctatctctattgtggatgagtattggggtcagggcacacaagtcacggtctcaagcggcggaagctctggtgaacagaaactgatttcagaag

SEQ ID NO: 2151 - protein, 7 aa, Artificial Sequence
  Synthetic
AIVHVFA

SEQ ID NO: 2152 - protein, 5 aa, Artificial Sequence
  Synthetic
LDNDA

SEQ ID NO: 2153 - protein, 9 aa, Artificial Sequence
  Synthetic
TIFMDSDLG

SEQ ID NO: 2154 - protein, 120 aa, Artificial Sequence
  Synthetic
EVQLVESGGGLVQAGDSLRQSCAASGAIVHVFAMGWFRQAPGKEREFVASINLDNDATNYADSVKGRFTISRDDARNTVYLQMNSLKPEDTAVYYCNATIFMDSDLGDYWGQGTQVTVSS

SEQ ID NO: 2155 - DNA, 411 bp, Artificial Sequence
  Synthetic
ggagatataccatggaagttcaactggttgaatctggtggcggtttagttcaagccggtgatagccttcgtcagagctgcgccgcaagcggagccattgtgcatgtgttcgctatgggttggtttcgccaggcacctggtaaagaacgtgaatttgtggcatccattaaccttgacaacgacgctaccaactatgccgattctgttaaaggtcgcttcactatttcacgcgatgatgcgcgtaataccgtgtacttacagatgaactcactgaaacctgaggataccgccgtttattattgtaatgcaaccatctttatggattccgatttgggtgactattggggtcagggcacacaagtcacggtctcaagcggcggaagctctggtgaacagaaactgatttcagaag

SEQ ID NO: 2156 - protein, 7 aa, Artificial Sequence
  Synthetic
AIVHVFA

SEQ ID NO: 2157 - protein, 5 aa, Artificial Sequence
  Synthetic
LDNDA

SEQ ID NO: 2158 - protein, 9 aa, Artificial Sequence
  Synthetic
TIFMDSDLG

SEQ ID NO: 2159 - protein, 120 aa, Artificial Sequence
  Synthetic
EVQLVESGGGLVQAGDSLRLSCAASGAIVHVFAMGWFRQAPGKEREFVASINLDNDATNYADSVKGRFTISRDDARNTMYLQMNSLKPEDTAVYYCNATIFMDSDLGDYWGQGTQVTVSS

SEQ ID NO: 2160 - DNA, 407 bp, Artificial Sequence
  Synthetic
atataccatggaagttcaactggttgaatctggtggcggtttagttcaagccggtgatagccttcgtctgagctgcgccgcaagcggagccattgtgcatgtgttcgctatgggttggtttcgccaggcacctggtaaagaacgtgaatttgtggcatccattaaccttgacaacgacgctaccaactatgccgattctgttaaaggtcgcttcactatttcacgcgatgatgcgcgtaataccatgtacttacagatgaactcactgaaacctgaggataccgccgtttattattgtaatgcaaccatctttatggattccgatttgggtgactattggggtcagggcacacaagtcacggtctcaagcggcggaagctctggtgaacagaaactgatttcagaag

SEQ ID NO: 2161 - protein, 7 aa, Artificial Sequence
  Synthetic
AIVHVFA

SEQ ID NO: 2162 - protein, 5 aa, Artificial Sequence
  Synthetic
LDNDA

SEQ ID NO: 2163 - protein, 13 aa, Artificial Sequence
  Synthetic
ACSDYTYGSHGVR

SEQ ID NO: 2164 - protein, 124 aa, Artificial Sequence
  Synthetic
EVQLVESGGGLVQAGDSLRLSCAASGAIVHVFAMGWFRQAPGKEREFVASINLDNDATNYADSVKGRFTISRDDARNTVYLQMNSLKPEDTAVYYCNAACSDYTYGSHGVRDSWGQGTQVTVSS

SEQ ID NO: 2165 - DNA, 424 bp, Artificial Sequence
  Synthetic
aggagatataccatggaagttcaactggttgaatctggtggcggtttagttcaagccggtgatagccttcgtctgagctgcgccgcaagcggagccattgtgcatgtgttcgctatgggttggtttcgccaggcacctggtaaagaacgtgaatttgtggcatccattaaccttgacaacgacgctaccaactatgccgattctgttaaaggtcgcttcactatttcacgcgatgatgcgcgtaataccgtgtacttacagatgaactcactgaaacctgaggataccgccgtttattattgtaatgcagcgtgttcggactatacgtatggctctcatggtgttcgggactcttggggtcagggcacacaagtcacggtctcaagcggcggaagctctggtgaacagaaactgatttcagaag

SEQ ID NO: 2166 - protein, 7 aa, Artificial Sequence
  Synthetic
AIVHVFA

SEQ ID NO: 2167 - protein, 5 aa, Artificial Sequence
  Synthetic
LDNDA

SEQ ID NO: 2168 - protein, 9 aa, Artificial Sequence
  Synthetic
TIFMDSDLG

SEQ ID NO: 2169 - protein, 120 aa, Artificial Sequence
  Synthetic
EVQLVESGGGLVQAGDSLRLSCAASGAIVHVFAMGWFRQAPGKEREFVASINLDNDATNYADSVKGRFTISRDDARNTVYLQMNSLKPEDTAVYYCNATIFMDSDLGDYWGQGKQVTVSS

SEQ ID NO: 2170 - DNA, 403 bp, Artificial Sequence
  Synthetic
accatggaagttcaactggttgaatctggtggcggtttagttcaagccggtgatagccttcgtctgagctgcgccgcaagcggagccattgtgcatgtgttcgctatgggttggtttcgccaggcacctggtaaagaacgtgaatttgtggcatccattaaccttgacaacgacgctaccaactatgccgattctgttaaaggtcgcttcactatttcacgcgatgatgcgcgtaataccgtgtacttacagatgaactcactgaaacctgaggataccgccgtttattattgtaatgcaaccatctttatggattccgatttgggtgactattggggtcagggcaaacaagtcacggtctcaagcggcggaagctctggtgaacagaaactgatttcagaag

SEQ ID NO: 2171 - protein, 7 aa, Artificial Sequence
  Synthetic
AIVHVFA

SEQ ID NO: 2172 - protein, 5 aa, Artificial Sequence
  Synthetic
LDNDA

SEQ ID NO: 2173 - protein, 10 aa, Artificial Sequence
  Synthetic
WSFTPSICTL

SEQ ID NO: 2174 - protein, 121 aa, Artificial Sequence
  Synthetic
EVQLVESGGGLVQAGDSLRLSCAASGAIVHVFAMGWFRQAPGKEREFVASINLDNDATNYADSVKGRFTISRDDARNTVYLQMNSLKPEDTAVYYCAAWSFTPSICTLEYWGQGTQVTVSS

SEQ ID NO: 2175 - DNA, 406 bp, Artificial Sequence
  Synthetic
accatggaagttcaactggttgaatctggtggcggtttagttcaagccggtgatagccttcgtctgagctgcgccgcaagcggagccattgtgcatgtgttcgctatgggttggtttcgccaggcacctggtaaagaacgtgaatttgtggcatccattaaccttgacaacgacgctaccaactatgccgattctgttaaaggtcgcttcactatttcacgcgatgatgcgcgtaataccgtgtacttacagatgaactcactgaaacctgaggataccgccgtttattattgtgcggcatggagtttcaccccttctatctgtaccttggagtattggggtcagggcacacaagtcacggtctcaagcggcggaagctctggtgaacagaaactgatttcagaag

SEQ ID NO: 2176 - protein, 7 aa, Artificial Sequence
  Synthetic
AIVHVFA

SEQ ID NO: 2177 - protein, 5 aa, Artificial Sequence
  Synthetic
LDNDA

SEQ ID NO: 2178 - protein, 9 aa, Artificial Sequence
  Synthetic
TIFMDSVLG

SEQ ID NO: 2179 - protein, 120 aa, Artificial Sequence
  Synthetic
EVQLVESGGGLVQAGDSLRLSCAASGAIVHVFAMGWFRQAPGKEREFVASINLDNDATNYADSVKGRFTISRDDARNTVYLQMNSLKPEDTAVYYCNATIFMDSVLGDYWGQGTQVTVSS

SEQ ID NO: 2180 - DNA, 403 bp, Artificial Sequence
  Synthetic
accatggaagttcaactggttgaatctggtggcggtttagttcaagccggtgatagccttcgtctgagctgcgccgcaagcggagccattgtgcatgtgttcgctatgggttggtttcgccaggcacctggtaaagaacgtgaatttgtggcatccattaaccttgacaacgacgctaccaactatgccgattctgttaaaggtcgcttcactatttcacgcgatgatgcgcgtaataccgtgtacttacagatgaactcactgaaacctgaggataccgccgtttattattgtaatgcaaccatctttatggattccgttttgggtgactattggggtcagggcacacaagtcacggtctcaagcggcggaagctctggtgaacagaaactgatttcagaag

SEQ ID NO: 2181 - protein, 7 aa, Artificial Sequence
  Synthetic
AIVHVFA

SEQ ID NO: 2182 - protein, 5 aa, Artificial Sequence
  Synthetic
LDNDA

SEQ ID NO: 2183 - protein, 9 aa, Artificial Sequence
  Synthetic
PFWINSSVV

SEQ ID NO: 2184 - protein, 120 aa, Artificial Sequence
  Synthetic
EVQLVESGGGLVQAGDSLRLSCAASGAIVHVFAMGWFRQAPGKEREFVASINLDNDATNYADSVKGRFTISRDDAHNTVYLQMNSLKPEDTAVYYCNAPFWINSSVVDYLGQGTQVTVSS

SEQ ID NO: 2185 - DNA, 409 bp, Artificial Sequence
  Synthetic
agatataccatggaagttcaactggttgaatctggtggcggtttagttcaagccggtgatagccttcgtctgagctgcgccgcaagcggagccattgtgcatgtgttcgctatgggttggtttcgccaggcacctggtaaagaacgtgaatttgtggcatccattaaccttgacaacgacgctaccaactatgccgattctgttaaaggtcgcttcactatttcacgcgatgatgcgcataataccgtgtacttacagatgaactcactgaaacctgaggataccgccgtttattattgtaatgcacccttctggatcaatagttctgttgtggactatttgggtcagggcacacaagtcacggtctcaagcggcggaagctctggtgaacagaaactgatttcagaag

SEQ ID NO: 2186 - protein, 7 aa, Artificial Sequence
  Synthetic
AIVHVFA

SEQ ID NO: 2187 - protein, 5 aa, Artificial Sequence
  Synthetic
LDNDA

SEQ ID NO: 2188 - protein, 9 aa, Artificial Sequence
  Synthetic
PFWINSSVV

SEQ ID NO: 2189 - protein, 120 aa, Artificial Sequence
  Synthetic
EVQLVESGGGLVQAGDSLRLSCAASGAIVHVFAMGWFRQAPGKEREFVASINLDNDATNYADSVKGRFTISRDDAHNTVYLQMNSLKPEDTAVYYCNAPFWINSSVVDYWGQGTQVTVSR

SEQ ID NO: 2190 - DNA, 413 bp, Artificial Sequence
  Synthetic
aaggagatataccatggaagttcaactggttgaatctggtggcggtttagttcaagccggtgatagccttcgtctgagctgcgccgcaagcggagccattgtgcatgtgttcgctatgggttggtttcgccaggcacctggtaaagaacgtgaatttgtggcatccattaaccttgacaacgacgctaccaactatgccgattctgttaaaggtcgcttcactatttcacgcgatgatgcgcataataccgtgtacttacagatgaactcactgaaacctgaggataccgccgtttattattgtaatgcacccttctggatcaatagttctgttgtggactattggggtcagggcacacaagtcacggtctcacgcggcggaagctctggtgaacagaaactgatttcagaag

SEQ ID NO: 2191 - protein, 7 aa, Artificial Sequence
  Synthetic
AIVHVFA

SEQ ID NO: 2192 - protein, 5 aa, Artificial Sequence
  Synthetic
LDNDA

SEQ ID NO: 2193 - protein, 9 aa, Artificial Sequence
  Synthetic
TIFMDSDLG

SEQ ID NO: 2194 - protein, 120 aa, Artificial Sequence
  Synthetic
EVQLVESGVGLVQAGDSLRLSCAASGAIVHVFAMGWFRQAPGKEREFVASINLDNDATNYADSVKGRFTISRDDARNTVYLQMNSLKPEDTAVYYCNATIFMDSDLGDYWGQGTQVTVSS

SEQ ID NO: 2195 - DNA, 412 bp, Artificial Sequence
  Synthetic
aggagatataccatggaagttcaactggttgaatctggtgtcggtttagttcaagccggtgatagccttcgtctgagctgcgccgcaagcggagccattgtgcatgtgttcgctatgggttggtttcgccaggcacctggtaaagaacgtgaatttgtggcatccattaaccttgacaacgacgctaccaactatgccgattctgttaaaggtcgcttcactatttcacgcgatgatgcgcgtaataccgtgtacttacagatgaactcactgaaacctgaggataccgccgtttattattgtaatgcaaccatctttatggattccgatttgggtgactattggggtcagggcacacaagtcacggtctcaagcggcggaagctctggtgaacagaaactgatttcagaag

SEQ ID NO: 2196 - protein, 7 aa, Artificial Sequence
  Synthetic
AIVHVFA

SEQ ID NO: 2197 - protein, 5 aa, Artificial Sequence
  Synthetic
LDNDA

SEQ ID NO: 2198 - protein, 9 aa, Artificial Sequence
  Synthetic
TIFMDSDLG

SEQ ID NO: 2199 - protein, 120 aa, Artificial Sequence
  Synthetic
EVQLVESGGGLVHAGDSLRLSCAASGAIVHVFAMGWFRQAPGKEREFVASINLDNDATNYADSVKGRFTISRDDARNTVYLQMNSLKPEDTAVYYCNATIFMDSDLGDYWGQGTQVTVSS

SEQ ID NO: 2200 - DNA, 414 bp, Artificial Sequence
  Synthetic
gaaggagatataccatggaagttcaactggttgaatctggtggcggtttagttcacgccggtgatagccttcgtctgagctgcgccgcaagcggagccattgtgcatgtgttcgctatgggttggtttcgccaggcacctggtaaagaacgtgaatttgtggcatccattaaccttgacaacgacgctaccaactatgccgattctgttaaaggtcgcttcactatttcacgcgatgatgcgcgtaataccgtgtacttacagatgaactcactgaaacctgaggataccgccgtttattattgtaatgcaaccatctttatggattccgatttgggtgactattggggtcagggcacacaagtcacggtctcaagcggcggaagctctggtgaacagaaactgatttcagaag

SEQ ID NO: 2201 - protein, 7 aa, Artificial Sequence
  Synthetic
AIVHVFA

SEQ ID NO: 2202 - protein, 5 aa, Artificial Sequence
  Synthetic
LDNDA

SEQ ID NO: 2203 - protein, 9 aa, Artificial Sequence
  Synthetic
TIFMDSDLG

SEQ ID NO: 2204 - protein, 120 aa, Artificial Sequence
  Synthetic
EVQLVDSGGGLVHAGDRLRLSCAASGAIVHVFAMGWFRQAPGKEREFVASINLDNDATNYADSVKGRFTISRDDARNTVYLQMNSLKPEDTAVYYCNATIFMDSDLGDYWGQGTQVTVSS

SEQ ID NO: 2205 - DNA, 414 bp, Artificial Sequence
  Synthetic
gaaggagatataccatggaagttcaactggttgactctggtggcggtttagttcacgccggtgatcgccttcgtctgagctgcgccgcaagcggagccattgtgcatgtgttcgctatgggttggtttcgccaggcacctggtaaagaacgtgaatttgtggcatccattaaccttgacaacgacgctaccaactatgccgattctgttaaaggtcgcttcactatttcacgcgatgatgcgcgtaataccgtgtacttacagatgaactcactgaaacctgaggataccgccgtttattattgtaatgcaaccatctttatggattccgatttgggtgactattggggtcagggcacacaagtcacggtctcaagcggcggaagctctggtgaacagaaactgatttcagaag

SEQ ID NO: 2206 - protein, 7 aa, Artificial Sequence
  Synthetic
AIVHVFA

SEQ ID NO: 2207 - protein, 5 aa, Artificial Sequence
  Synthetic
LDNDA

SEQ ID NO: 2208 - protein, 9 aa, Artificial Sequence
  Synthetic
TIFMDSDLG

SEQ ID NO: 2209 - protein, 120 aa, Artificial Sequence
  Synthetic
EVQLVESGGGLVQASDSLRLSCAASGAIVHVFAMGWFRQAPGKEREFVASINLDNDATNYADSVKGRFTISRDDARNTVYLQMNSLKPEDTAVYYCNATIFMDSDLGDYWGQGTQVTVSS

SEQ ID NO: 2210 - DNA, 413 bp, Artificial Sequence
  Synthetic
aaggagatataccatggaagttcaactggttgaatctggtggcggtttagttcaagccagtgatagccttcgtctgagctgcgccgcaagcggagccattgtgcatgtgttcgctatgggttggtttcgccaggcacctggtaaagaacgtgaatttgtggcatccattaaccttgacaacgacgctaccaactatgccgattctgttaaaggtcgcttcactatttcacgcgatgatgcgcgtaataccgtgtacttacagatgaactcactgaaacctgaggataccgccgtttattattgtaatgcaaccatctttatggattccgatttgggtgactattggggtcagggcacacaagtcacagtctcaagcggcggaagctctggtgaacagaaactgatttcagaag

SEQ ID NO: 2211 - protein, 7 aa, Artificial Sequence
  Synthetic
AIVHVFA

SEQ ID NO: 2212 - protein, 5 aa, Artificial Sequence
  Synthetic
LDNDA

SEQ ID NO: 2213 - protein, 10 aa, Artificial Sequence
  Synthetic
LENPHIASKY

SEQ ID NO: 2214 - protein, 121 aa, Artificial Sequence
  Synthetic
EVQLVESGGGLVQAGDSLRLSCAASGAIVHVFAMGWFRQAPGKEREFVASINLDNDATNYADSVKGRFTISRDDAHNTVYLQMNSLKPEDTAVYYCAALENPHIASKYDYWGQGTQVTVSS

SEQ ID NO: 2215 - DNA, 408 bp, Artificial Sequence
  Synthetic
ataccatggaagttcaactggttgaatctggtggcggtttagttcaagccggtgatagccttcgtctgagctgcgccgcaagcggagccattgtgcatgtgttcgctatgggttggtttcgccaggcacctggtaaagaacgtgaatttgtggcatccattaaccttgacaacgacgctaccaactatgccgattctgttaaaggtcgcttcactatttcacgcgatgatgcgcataataccgtgtacttacagatgaactcactgaaacctgaggataccgccgtttattattgtgcggcactcgagaacccccacattgcgtccaagtatgactattggggtcagggcacacaagtcacggtctcaagcggcggaagctctggtgaacagaaactgatttcagaag

SEQ ID NO: 2216 - protein, 7 aa, Artificial Sequence
  Synthetic
AIVHVFA

SEQ ID NO: 2217 - protein, 5 aa, Artificial Sequence
  Synthetic
LDNDA

SEQ ID NO: 2218 - protein, 9 aa, Artificial Sequence
  Synthetic
PFWINSSVV

SEQ ID NO: 2219 - protein, 120 aa, Artificial Sequence
  Synthetic
EVQLVESGGGLVQAGDSLRLRCAASGAIVHVFAMGWFRQAPGKEREFVASINLDNDATNYADSVKGRFTISRDDAHNTVYLQMNSLKPEDTAVYYCNAPFWINSSVVDYWGQGTQVTVSS

SEQ ID NO: 2220 - DNA, 412 bp, Artificial Sequence
  Synthetic
aggagatataccatggaagttcaactggttgaatctggtggcggtttagttcaagccggtgatagccttcgtctgcgctgcgccgcaagcggagccattgtgcatgtgttcgctatgggttggtttcgccaggcacctggtaaagaacgtgaatttgtggcatccattaaccttgacaacgacgctaccaactatgccgattctgttaaaggtcgcttcactatttcacgcgatgatgcgcataataccgtgtacttacagatgaactcactgaaacctgaggataccgccgtttattattgtaatgcacccttctggatcaatagttctgttgtggactattggggtcagggcacacaagtcacggtctcaagcggcggaagctctggtgaacagaaactgatttcagaag

SEQ ID NO: 2221 - protein, 7 aa, Artificial Sequence
  Synthetic
AIVHVFA

SEQ ID NO: 2222 - protein, 5 aa, Artificial Sequence
  Synthetic
LDNDA

SEQ ID NO: 2223 - protein, 9 aa, Artificial Sequence
  Synthetic
PFWINSSVV

SEQ ID NO: 2224 - protein, 120 aa, Artificial Sequence
  Synthetic
EVQLVESGGGLVQAGDSLRLSCAASGAIVHVFAMGWFRQAPGKEREFVASINLDNDATNYADSVKGRFTISRDDAHNTVFLQMNSLKPEDTAVYYCNAPFWINSSVVDDWGQGTQVTVSS

SEQ ID NO: 2225 - DNA, 414 bp, Artificial Sequence
  Synthetic
gaaggagatataccatggaagttcaactggttgaatctggtggcggtttagttcaagccggtgatagccttcgtctgagctgcgccgcaagcggagccattgtgcatgtgttcgctatgggttggtttcgccaggcacctggtaaagaacgtgaatttgtggcatccattaaccttgacaacgacgctaccaactatgccgattctgttaaaggtcgcttcactatttcacgcgatgatgcgcataataccgtgttcttacagatgaactcactgaaacctgaggataccgccgtttattattgtaatgctcccttctggatcaatagttctgttgtggacgattggggtcagggcacacaagtcacggtctcaagcggcgtaagctctggtgaatagaaactgatttcagaag

SEQ ID NO: 2226 - protein, 7 aa, Artificial Sequence
  Synthetic
AIVHVFA

SEQ ID NO: 2227 - protein, 5 aa, Artificial Sequence
  Synthetic
LDNDA

SEQ ID NO: 2228 - protein, 9 aa, Artificial Sequence
  Synthetic
TIFMDSDLG

SEQ ID NO: 2229 - protein, 120 aa, Artificial Sequence
  Synthetic
EVQLVESGGGLVQAGDSLRLSCAASGAIVHVFAMGWFRQAPGKEREFVASINLDNDATNYADSVKGRFTISRDDARNTVYLQMNSLKPEDTAVYYCNATIFMDSDLGEYWGQGTQVTVAS

SEQ ID NO: 2230 - DNA, 407 bp, Artificial Sequence
  Synthetic
atataccatggaagttcaactggttgaatctggtggcggtttagttcaagccggtgatagccttcgtctgagctgcgccgcaagcggagccattgtgcatgtgttcgctatgggttggtttcgccaggcacctggtaaagaacgtgaatttgtggcatccattaaccttgacaacgacgctaccaactatgccgattctgttaaaggtcgcttcactatttcacgcgatgatgcgcgtaataccgtgtacttacagatgaactcactgaaacctgaggataccgccgtttattattgtaatgcaaccatctttatggattccgatttgggtgaatattgggggcagggcacacaagtcacggtcgcaagcggcggaagctctggggaacagaaactgatttcagaag

SEQ ID NO: 2231 - protein, 7 aa, Artificial Sequence
  Synthetic
AIVHVFA

SEQ ID NO: 2232 - protein, 5 aa, Artificial Sequence
  Synthetic
LDNDA

SEQ ID NO: 2233 - protein, 10 aa, Artificial Sequence
  Synthetic
TAISPISIVD

SEQ ID NO: 2234 - protein, 121 aa, Artificial Sequence
  Synthetic
QVQLVESGGGLVQAGDSLRLSCAASGAIVHVFAMGWFRQAPGKEREFVASINLDNDATNYADSVKGRFTISRDDARNTVYLQMNSLKPEDTAVYYCAATAISPISIVDEYWGQGTQVTVSS

SEQ ID NO: 2235 - DNA, 414 bp, Artificial Sequence
  Synthetic
ggagatataccatgcaggttcaactggttgaatctggtggcggtttagttcaagccggtgatagccttcgtctgagctgcgccgcaagcggagccattgtgcatgtgttcgctatgggttggtttcgccaggcacctggtaaagaacgtgaatttgtggcatccattaaccttgacaacgacgctaccaactatgccgattctgttaaaggtcgcttcactatttcacgcgatgatgcgcgtaataccgtgtacttacagatgaactcactgaaacctgaggataccgccgtttattattgtgcggcaacggctattagccctatctctattgtggatgagtattggggtcagggcacacaagtcacggtctcaagcggcggaagctctggtgaacagaaactgatttcagaag

SEQ ID NO: 2236 - protein, 7 aa, Artificial Sequence
  Synthetic
AIVHVFA

SEQ ID NO: 2237 - protein, 5 aa, Artificial Sequence
  Synthetic
LDNDA

SEQ ID NO: 2238 - protein, 9 aa, Artificial Sequence
  Synthetic
TIFMDSDLG

SEQ ID NO: 2239 - protein, 120 aa, Artificial Sequence
  Synthetic
EVQLVESGGGLVQAGDSLRLSCAASGAIVHVFAMGWFRQAPGKEREFVASINLDNDATNYADSVKGRFTISRDDARNTVYLQMNSLKPEDTAVYYCNATIFMDSDLGDYGGQGTQVTVSS

SEQ ID NO: 2240 - DNA, 403 bp, Artificial Sequence
  Synthetic
accatggaagttcaactggttgaatctggtggcggtttagttcaagccggtgatagccttcgtctgagctgcgccgcaagcggagccattgtgcatgtgttcgctatgggttggtttcgccaggcacctggtaaagaacgtgaatttgtggcatccattaaccttgacaacgacgctaccaactatgccgattctgttaaaggtcgcttcactatttcacgcgatgatgcgcgtaataccgtgtacttacagatgaactcactgaaacctgaggataccgccgtttattattgtaatgcaaccatctttatggattccgatttgggtgactatgggggtcagggcacacaagtcacggtctcaagcggcggaagctctggggaacagaaactgatttcagaag

SEQ ID NO: 2241 - protein, 7 aa, Artificial Sequence
  Synthetic
AIVHVFA

SEQ ID NO: 2242 - protein, 5 aa, Artificial Sequence
  Synthetic
LDNDA

SEQ ID NO: 2243 - protein, 9 aa, Artificial Sequence
  Synthetic
TIFMDSDLG

SEQ ID NO: 2244 - protein, 120 aa, Artificial Sequence
  Synthetic
EVQLVESGGGLVQAGDSLRLSCAASGAIVHVFAMGWFRQAPGKEREFVASINLDNDATNYADSVKGRFTISRDDARNTVYLQMNSLKPEDTAVYYCNATIFMDSDLGDYWGQGTQVTVAS

SEQ ID NO: 2245 - DNA, 405 bp, Artificial Sequence
  Synthetic
ataccatggaagttcaactggttgaatctggtggcggtttagttcaagccggtgatagccttcgtctgagctgcgccgcaagcggagccattgtgcatgtgttcgctatgggttggtttcgccaggcacctggtaaagaacgtgaatttgtggcatccattaaccttgacaacgacgctaccaactatgccgattctgttaaaggtcgcttcactatttcacgcgatgatgcgcgtaataccgtgtacttacagatgaactcactgaaacctgaggataccgccgtttattattgtaatgcaaccatctttatggattccgatttgggtgactattgggggcagggcacacaagtcacggtcgcaagcggcggaagctctggggaacagaaactgatttcagaag

SEQ ID NO: 2246 - protein, 7 aa, Artificial Sequence
  Synthetic
AIVHVFA

SEQ ID NO: 2247 - protein, 5 aa, Artificial Sequence
  Synthetic
LDNDA

SEQ ID NO: 2248 - protein, 9 aa, Artificial Sequence
  Synthetic
TIFMDSDLG

SEQ ID NO: 2249 - protein, 120 aa, Artificial Sequence
  Synthetic
EVQLVESGGGLVQAGDSLRLSCAASGAIVHVFAMGWLRQAPGKEREFVASINLDNDATNYADSVKGRFTISRDDARNTVYLQMNSLKPEDTAVYYCNATIFMDSDLGDYWGQGTQVTVSS

SEQ ID NO: 2250 - DNA, 405 bp, Artificial Sequence
  Synthetic
ataccatggaagttcaactggttgaatctggtggcggtttagttcaagccggtgatagccttcgtctgagctgcgccgcaagcggagccattgtgcatgtgttcgctatgggttggcttcgccaggcacctggtaaagaacgtgaatttgtggcatccattaaccttgacaacgacgctaccaactatgccgattctgttaaaggtcgcttcactatttcacgcgatgatgcgcgtaataccgtgtacttacagatgaactcactgaaacctgaggataccgccgtttattattgtaatgcaaccatctttatggattccgatttgggtgactattggggtcagggcacacaagtcacggtctcaagcggcggaagctctggtgaacagaaactgatttcagaag

SEQ ID NO: 2251 - protein, 7 aa, Artificial Sequence
  Synthetic
AIVHVFA

SEQ ID NO: 2252 - protein, 5 aa, Artificial Sequence
  Synthetic
LDNDA

SEQ ID NO: 2253 - protein, 10 aa, Artificial Sequence
  Synthetic
TAISPISIVD

SEQ ID NO: 2254 - protein, 121 aa, Artificial Sequence
  Synthetic
EVQLVESGGGLVHAGDSLRLSCAASGAIVHVFAMGWFRQAPGKEREFVASINLDNDATNYADSVKGRFTISRDDARNTVYLQMNSLKPEDTAVYYCAATAISPISIVDEYWGQGTQVTVSS

SEQ ID NO: 2255 - DNA, 417 bp, Artificial Sequence
  Synthetic
gaaggagatataccatggaagttcaactggttgaatctggtggcggtttagttcacgccggtgatagccttcgtctgagctgcgccgcaagcggagccattgtgcatgtgttcgctatgggttggtttcgccaggcacctggtaaagaacgtgaatttgtggcatccattaaccttgacaacgacgctaccaactatgccgattctgttaaaggtcgcttcactatttcacgcgatgatgcgcgtaataccgtgtacttacagatgaactcactgaaacctgaggataccgccgtttattattgtgcggcaacggctattagccctatctctattgtggatgagtattggggtcagggcacacaagtcacggtctcaagcggcggaagctctggtgaacagaaactgatttcagaag

SEQ ID NO: 2256 - protein, 7 aa, Artificial Sequence
  Synthetic
AIVHVFA

SEQ ID NO: 2257 - protein, 5 aa, Artificial Sequence
  Synthetic
LDNDA

SEQ ID NO: 2258 - protein, 10 aa, Artificial Sequence
  Synthetic
WSFTPSICTL

SEQ ID NO: 2259 - protein, 121 aa, Artificial Sequence
  Synthetic
EVQLVESGGGLVQAGDSLRLSCAASGAIVHVFAMGWFRQAPGKEREFVASINLDNDATNYADSVKGRFTISRDDARNTVYLQMNSLKPEDTAVYYCAAWSFTPSICTLEYWGQGTQVTVSR

SEQ ID NO: 2260 - DNA, 412 bp, Artificial Sequence
  Synthetic
agatataccatggaagttcaactggttgaatctggtggcggtttagttcaagccggtgatagccttcgtctgagctgcgccgcaagcggagccattgtgcatgtgttcgctatgggttggtttcgccaggcacctggtaaagaacgtgaatttgtggcatccattaaccttgacaacgacgctaccaactatgccgattctgttaaaggtcgcttcactatttcacgcgatgatgcgcgtaataccgtgtacttacagatgaactcactgaaacctgaggataccgccgtttattattgtgcggcatggagtttcaccccttctatctgtaccttggagtattggggtcagggcacacaagtcacggtctcaaggggcggaagctctggtgaacagaaactgatttcagaag

SEQ ID NO: 2261 - protein, 7 aa, Artificial Sequence
  Synthetic
AIVHVFA

SEQ ID NO: 2262 - protein, 5 aa, Artificial Sequence
  Synthetic
LDNDA

SEQ ID NO: 2263 - protein, 9 aa, Artificial Sequence
  Synthetic
TIFMDSDLG

SEQ ID NO: 2264 - protein, 120 aa, Artificial Sequence
  Synthetic
EVQLVESGGGLVQAGDSLRLSCAASGAIVHVFAMGWFRQAPGKEREFVASINLDNDATNYADSVKGRFTNSRDDARNTVYLQMNSLKPEDTAVYYCNATIFMDSDLGDYWGQGTQVTVSS

SEQ ID NO: 2265 - DNA, 413 bp, Artificial Sequence
  Synthetic
aaggagatataccatggaagttcaactggttgaatctggtggcggtttagttcaagccggtgatagccttcgtctgagctgcgccgcaagcggagccattgtgcatgtgttcgctatgggttggtttcgccaggcacctggtaaagaacgtgaatttgtggcatccattaaccttgacaacgacgctaccaactatgccgattctgttaaaggtcgcttcactaattcacgcgatgatgcgcgtaataccgtgtacttacagatgaactcactgaaacctgaggataccgccgtttattattgtaatgcaaccatctttatggattccgatttgggtgactattggggtcagggcacacaagtcacggtctcaagcggcggaagctctggtgaacagaaactgatttcagaag

SEQ ID NO: 2266 - protein, 7 aa, Artificial Sequence
  Synthetic
AIVHVFA

SEQ ID NO: 2267 - protein, 5 aa, Artificial Sequence
  Synthetic
LDNDA

SEQ ID NO: 2268 - protein, 9 aa, Artificial Sequence
  Synthetic
FCYVPLATC

SEQ ID NO: 2269 - protein, 120 aa, Artificial Sequence
  Synthetic
EVQLVESGGGLVQAGDSLRLSCAASGAIVHVFAMGWFRQAPGKEREFVASINLDNDATNYADSVKGRFTISRDDARNTVYLQMNSLKPEDTAVYYCNAFCYVPLATCAYWGQGTQVTVSS

SEQ ID NO: 2270 - DNA, 405 bp, Artificial Sequence
  Synthetic
ataccatggaagttcaactggttgaatctggtggcggtttagttcaagccggtgatagccttcgtctgagctgcgccgcaagcggagccattgtgcatgtgttcgctatgggttggtttcgccaggcacctggtaaagaacgtgaatttgtggcatccattaaccttgacaacgacgctaccaactatgccgattctgttaaaggtcgcttcactatttcacgcgatgatgcgcgtaataccgtgtacttacagatgaactcactgaaacctgaggataccgccgtttattattgtaatgcattctgctacgtccctttggccacgtgtgcctattggggtcagggcacacaagtcacggtctcaagcggcggaagctctggtgaacagaaactgatttcagaag

SEQ ID NO: 2271 - protein, 7 aa, Artificial Sequence
  Synthetic
AIVHVFA

SEQ ID NO: 2272 - protein, 5 aa, Artificial Sequence
  Synthetic
LDNDA

SEQ ID NO: 2273 - protein, 13 aa, Artificial Sequence
  Synthetic
ACSDYTYGSHGVR

SEQ ID NO: 2274 - protein, 124 aa, Artificial Sequence
  Synthetic
EVQLVESGGGLVQAGDSLRLSCAASGAIVHVFAMGWFRQAPGKERKFVASINLDNDATNYADSVKGRFTISRDDARNTVYLQMNSLKPEDTAVYYCNAACSDYTYGSHGVRDSWGQGTQVTVSS

SEQ ID NO: 2275 - DNA, 415 bp, Artificial Sequence
  Synthetic
accatggaagttcaactggttgaatctggtggcggtttagttcaagccggtgatagccttcgtctgagctgcgccgcaagcggagccattgtgcatgtgttcgctatgggttggtttcgccaggcacctggtaaagaacgtaaatttgtggcatccattaaccttgacaacgacgctaccaactatgccgattctgttaaaggtcgcttcactatttcacgcgatgatgcgcgtaataccgtgtacttacagatgaactcactgaaacctgaggataccgccgtttattattgtaatgcagcgtgttcggactatacgtatggctctcatggtgttcgggactcttggggtcagggcacacaagtcacggtctcaagcggcggaagctctggtgaacagaaactgatttcagaag

SEQ ID NO: 2276 - protein, 7 aa, Artificial Sequence
  Synthetic
AIAHVFA

SEQ ID NO: 2277 - protein, 5 aa, Artificial Sequence
  Synthetic
LDNDA

SEQ ID NO: 2278 - protein, 9 aa, Artificial Sequence
  Synthetic
TIFMDSDLG

SEQ ID NO: 2279 - protein, 120 aa, Artificial Sequence
  Synthetic
EVQLVESGGGLVQAGDSLRLSCAASGAIAHVFAMGWFRQAPGKEREFVASINLDNDATNYADSVKGRFTISRDDARNTVYLQMNSLKPEDTAVYYCNATIFMDSDLGDYWGQGTQVTVSS

SEQ ID NO: 2280 - DNA, 411 bp, Artificial Sequence
  Synthetic
ggagatataccatggaagttcaactggttgaatctggtggcggtttagttcaagccggtgatagccttcgtctgagctgcgccgcaagcggagccattgcgcatgtgttcgctatgggttggtttcgccaggcacctggtaaagaacgtgaatttgtggcatccattaaccttgacaacgacgctaccaactatgccgattctgttaaaggtcgcttcactatttcacgcgatgatgcgcgtaataccgtgtacttacagatgaactcactgaaacctgaggataccgccgtttattattgtaatgcaaccatctttatggattccgatttgggtgactattggggtcagggcacacaagtcacggtctcaagcggcggaagctctggtgaacagaaactgatttcagaag

SEQ ID NO: 2281 - protein, 7 aa, Artificial Sequence
  Synthetic
AIVHVFA

SEQ ID NO: 2282 - protein, 5 aa, Artificial Sequence
  Synthetic
LDNDA

SEQ ID NO: 2283 - protein, 9 aa, Artificial Sequence
  Synthetic
TIFMDSDLG

SEQ ID NO: 2284 - protein, 120 aa, Artificial Sequence
  Synthetic
EVQLVESGGGLVQAGDSLRLSCAASGAIVHVFAMGWFRQAPGKEREFVASINLDNDATNYADSVKGRFTISRDDARNTVYLQMNSLKPEDTAVYYCNATIFMDSDLGDYWGHGTQVTVSS

SEQ ID NO: 2285 - DNA, 403 bp, Artificial Sequence
  Synthetic
accatggaagttcaactggttgaatctggtggcggtttagttcaagccggtgatagccttcgtctgagctgcgccgcaagcggagccattgtgcatgtgttcgctatgggttggtttcgccaggcacctggtaaagaacgtgaatttgtggcatccattaaccttgacaacgacgctaccaactatgccgattctgttaaaggtcgcttcactatttcacgcgatgatgcgcgtaataccgtgtacttacagatgaactcactgaaacctgaggataccgccgtttattattgtaatgcaaccatctttatggattccgatttgggtgactattggggtcatggcacacaagtcacggtctcaagcggcggaagctctggtgaacagaaactgatttcagaag

SEQ ID NO: 2286 - protein, 7 aa, Artificial Sequence
  Synthetic
AIVHVFA

SEQ ID NO: 2287 - protein, 5 aa, Artificial Sequence
  Synthetic
LDNDA

SEQ ID NO: 2288 - protein, 9 aa, Artificial Sequence
  Synthetic
TIFMDSDLG

SEQ ID NO: 2289 - protein, 120 aa, Artificial Sequence
  Synthetic
EVQLVESGGGLVPAGDSLRLSCAASGAIVHVFAMGWFRQAPGKEREFVASINLDNDATNYADSVKGRFTISRDDARNTVYLQMNSLKPEDTAVYYCNATIFMDSDLGDYWGQGTQVTVSS

SEQ ID NO: 2290 - DNA, 411 bp, Artificial Sequence
  Synthetic
ggagatataccatggaagttcaactggttgaatctggtggcggtttagttccagccggtgatagccttcgtctgagctgcgccgcaagcggagccattgtgcatgtgttcgctatgggttggtttcgccaggcacctggtaaagaacgtgaatttgtggcatccattaaccttgacaacgacgctaccaactatgccgattctgttaaaggtcgcttcactatttcacgcgatgatgcgcgtaataccgtgtacttacagatgaactcactgaaacctgaggataccgccgtttattattgtaatgcaaccatctttatggattccgatttgggtgactattggggtcagggcacacaagtcacggtctcaagcggcggaagctctggtgaacagaaactgatttcagaag

SEQ ID NO: 2291 - protein, 7 aa, Artificial Sequence
  Synthetic
AIVHVFA

SEQ ID NO: 2292 - protein, 5 aa, Artificial Sequence
  Synthetic
LDNDA

SEQ ID NO: 2293 - protein, 9 aa, Artificial Sequence
  Synthetic
PFWINSSVV

SEQ ID NO: 2294 - protein, 120 aa, Artificial Sequence
  Synthetic
EVQLVESGGGLVQAGDSLRLSCAASGAIVHVFAMGWFRQAPGKEREFVASINLDNDATNYADSVKGRFTISRDDARNTVYLQMNSLKPEDTAVYYCNAPFWINSSVVDYWGQGTQVTVSS

SEQ ID NO: 2295 - DNA, 412 bp, Artificial Sequence
  Synthetic
aggagatataccatggaagttcaactggttgaatctggtggcggtttagttcaagccggtgatagccttcgtctgagctgcgccgcaagcggagccattgtgcatgtgttcgctatgggttggtttcgccaggcacctggtaaagaacgtgaatttgtggcatccattaaccttgacaacgacgctaccaactatgccgattctgttaaaggtcgcttcactatttcacgcgatgatgcgcgtaataccgtgtacttacagatgaactcactgaaacctgaggataccgccgtttattattgtaatgcacccttctggatcaatagttctgttgtggactattggggtcagggcacacaagtcacggtctcaagcggcggaagctctggtgaacagaaactgatttcagaag

SEQ ID NO: 2296 - protein, 7 aa, Artificial Sequence
  Synthetic
AIVHVFA

SEQ ID NO: 2297 - protein, 5 aa, Artificial Sequence
  Synthetic
LDNDA

SEQ ID NO: 2298 - protein, 9 aa, Artificial Sequence
  Synthetic
PFWINSSVV

SEQ ID NO: 2299 - protein, 120 aa, Artificial Sequence
  Synthetic
EVQLVESGGGLVQAGDSLRLSCAASGAIVHVFAMGWFRQAPGKEREFVSSINLDNDATNYADSVKGRFTISRDDAHNTVYLQMNSLKLEDTPVYYCNAPFWINSSVVDYWGQGTQVTVSR

SEQ ID NO: 2300 - DNA, 414 bp, Artificial Sequence
  Synthetic
gaaggagagataccatggaagttcaactggttgaatctggtggcggtttagttcaagccggtgatagccttcgtctgagctgcgccgcaagcggagccattgtgcatgtgttcgctatgggttggtttcgccaggcacctggtaaagaacgtgaatttgtgtcatccattaaccttgacaacgacgctaccaactatgccgattctgttaaaggtcgcttcactatttcacgcgatgatgcgcataataccgtgtacttacagatgaactcactgaaacttgaggatacccccgtttattattgcaatgcccccttctggatcaatagttctgttgtggactattggggtcagggcacacaagtcacggtctcacgcggcggaagctctggtgaacagaaactgatttcagaag

SEQ ID NO: 2301 - protein, 7 aa, Artificial Sequence
  Synthetic
AIVHVFA

SEQ ID NO: 2302 - protein, 5 aa, Artificial Sequence
  Synthetic
LDNDA

SEQ ID NO: 2303 - protein, 9 aa, Artificial Sequence
  Synthetic
TIFMDSDLG

SEQ ID NO: 2304 - protein, 120 aa, Artificial Sequence
  Synthetic
EVQLVESGGGLVQAGDSLRLSCAASGAIVHVFAMGWFRQAPGKEREFVASINLDNDATNYADSVKGRFTISRDDARNTVYLQMNSLKPEDTAVYYCNATIFMDSDLGDYWFQGTQVTVSR

SEQ ID NO: 2305 - DNA, 412 bp, Artificial Sequence
  Synthetic
aggagatataccatggaagttcaactggttgaatctggtggcggtttagttcaagccggtgatagccttcgtctgagctgcgccgcaagcggagccattgtgcatgtgttcgctatgggttggtttcgccaggcacctggtaaagaacgtgaatttgtggcatccattaaccttgacaacgacgctaccaactatgccgattctgttaaaggtcgcttcactatttcacgcgatgatgcgcgtaataccgtgtacttacagatgaactcactgaaacctgaggataccgccgtttattattgtaatgcaaccatctttatggattccgatttgggtgactattggtttcagggcacacaagtcacggtctcacgcggcggaagctctggtgaacagaaactgatttcagaag

SEQ ID NO: 2306 - protein, 7 aa, Artificial Sequence
  Synthetic
AIVHVFA

SEQ ID NO: 2307 - protein, 5 aa, Artificial Sequence
  Synthetic
LDNDA

SEQ ID NO: 2308 - protein, 9 aa, Artificial Sequence
  Synthetic
TIFMDSDLG

SEQ ID NO: 2309 - protein, 120 aa, Artificial Sequence
  Synthetic
EVQLVESGGGLVQAGDSLRLSCAASGAIVHVFAMGWFRQAPGKEREFVASINLDNDATNYADSVKGRFTISRDDARNTVYLQMNSLKPEDTTVYYCNATIFMDSDLGDYWGQGTQVTVSS

SEQ ID NO: 2310 - DNA, 407 bp, Artificial Sequence
  Synthetic
atataccatggaagttcaactggttgaatctggtggcggtttagttcaagccggtgatagccttcgtctgagctgcgccgcaagcggagccattgtgcatgtgttcgctatgggttggtttcgccaggcacctggtaaagaacgtgaatttgtggcatccattaaccttgacaacgacgctaccaactatgccgattctgttaaaggtcgcttcactatttcacgcgatgatgcgcgtaataccgtgtacttacagatgaactcactgaaacctgaggataccaccgtttattattgtaatgcaaccatctttatggattccgatttgggtgactattggggtcagggcacacaagtcacggtctcaagcggcggaagctctggtgaacagaaactgatttcagaag

SEQ ID NO: 2311 - protein, 7 aa, Artificial Sequence
  Synthetic
AIVHVFA

SEQ ID NO: 2312 - protein, 5 aa, Artificial Sequence
  Synthetic
LDNDA

SEQ ID NO: 2313 - protein, 9 aa, Artificial Sequence
  Synthetic
TIFMDSDLG

SEQ ID NO: 2314 - protein, 120 aa, Artificial Sequence
  Synthetic
EVQLVESGGGLVQAGDSLRLSCAASGAIVHVFAMGWFRQAPGKEREFVASINLDNDATNYADSVKGRFTISRDDARNTVYLQMNSLKPEDTAVYYCNATIFMDSDLGDYWGQGTHVTVSS

SEQ ID NO: 2315 - DNA, 409 bp, Artificial Sequence
  Synthetic
agatataccatggaagttcaactggttgaatctggtggcggtttagttcaagccggtgatagccttcgtctgagctgcgccgcaagcggagccattgtgcatgtgttcgctatgggttggtttcgccaggcacctggtaaagaacgtgaatttgtggcatccattaaccttgacaacgacgctaccaactatgccgattctgttaaaggtcgcttcactatttcacgcgatgatgcgcgtaataccgtgtacttacagatgaactcactgaaacctgaggataccgccgtttattattgtaatgcaaccatctttatggattccgatttgggtgactattggggtcagggcacacatgtcacggtctcaagcggcggaagctctggtgaacagaaactgatttcagaag

SEQ ID NO: 2316 - protein, 7 aa, Artificial Sequence
  Synthetic
AIVHVFA

SEQ ID NO: 2317 - protein, 5 aa, Artificial Sequence
  Synthetic
LDNDA

SEQ ID NO: 2318 - protein, 9 aa, Artificial Sequence
  Synthetic
PFWINSSVV

SEQ ID NO: 2319 - protein, 120 aa, Artificial Sequence
  Synthetic
EVQLVESGGGLVQAGDSLRLSCAASGAIVHVFAMGWFRQAPGKEREFVAPINLDNDATNYADSVKGRFTISRDDAHNTVYLQMNSLKPEDTAVYYCNAPFWINSSVVDYWGQGTQVTVSS

SEQ ID NO: 2320 - DNA, 411 bp, Artificial Sequence
  Synthetic
ggagatataccatggaagttcaactggttgaatctggtggcggtttagttcaagccggtgatagccttcgtctgagctgcgccgcaagcggagccattgtgcatgtgttcgctatgggttggtttcgccaggcacctggtaaagaacgtgaatttgtggcacccattaaccttgacaacgacgctaccaactatgccgattctgttaaaggtcgcttcactatttcacgcgatgatgcgcataataccgtgtacttacagatgaactcactgaaacctgaggataccgccgtttattattgtaatgcacccttctggatcaatagttctgttgtggactattggggtcagggcacacaagtcacggtctcaagcggcggaagctcttgtgaacagacactgatttcagaag

SEQ ID NO: 2321 - protein, 7 aa, Artificial Sequence
  Synthetic
AIVHVFA

SEQ ID NO: 2322 - protein, 5 aa, Artificial Sequence
  Synthetic
LDNDA

SEQ ID NO: 2323 - protein, 9 aa, Artificial Sequence
  Synthetic
TIFMDSDLG

SEQ ID NO: 2324 - protein, 120 aa, Artificial Sequence
  Synthetic
EVQLVESGGGLVQAGDSLRLSCAASGAIVHVFAMGWFRQAPGKEREFVASINLDNDATNYADSVKGRFTISRDDARNTVYLQMNSLKPEDTAVYYCNATIFMDSDLGDYWGQGTQVTVSR

SEQ ID NO: 2325 - DNA, 413 bp, Artificial Sequence
  Synthetic
aaggagatataccatggaagttcaactggttgaatctggtggcggtttagttcaagccggtgatagccttcgtctgagctgcgccgcaagcggagccattgtgcatgtgttcgctatgggttggtttcgccaggcacctggtaaagaacgtgaatttgtggcatccattaaccttgacaacgacgctaccaactatgccgattctgttaaaggtcgcttcactatttcacgcgatgatgcgcgtaataccgtgtacttacagatgaactcactgaaacctgaggataccgccgtttattattgtaatgcaaccatctttatggattccgatttgggtgactattggggtcagggcacacaagtcacggtctcacgcggcggaagctctggtgaacagaaactgatttcagaag

SEQ ID NO: 2326 - protein, 7 aa, Artificial Sequence
  Synthetic
AIVHVFA

SEQ ID NO: 2327 - protein, 5 aa, Artificial Sequence
  Synthetic
LDNDA

SEQ ID NO: 2328 - protein, 9 aa, Artificial Sequence
  Synthetic
TIFMDSDLG

SEQ ID NO: 2329 - protein, 120 aa, Artificial Sequence
  Synthetic
EVQLVESGGGLVQAGDSLRLSCAASGAIVHVFAMGWFRRAPGKEREFVASINLDNDATNYADSVKGRFTISRDDARNTVYLQMNSLKPEDTAVYYCNATIFMDSDLGDYWGQGTQVTVSS

SEQ ID NO: 2330 - DNA, 409 bp, Artificial Sequence
  Synthetic
agatataccatggaagttcaactggttgaatctggtggcggtttagttcaagccggtgatagccttcgtctgagctgcgccgcaagcggagccattgtgcatgtgttcgctatgggttggtttcgccgggcacctggtaaagaacgtgaatttgtggcatccattaaccttgacaacgacgctaccaactatgccgattctgttaaaggtcgcttcactatttcacgcgatgatgcgcgtaataccgtgtacttacagatgaactcactgaaacctgaggataccgccgtttattattgtaatgcaaccatctttatggattccgatttgggtgactattggggtcagggcacacaagtcacggtctcaagcggcggaagctctggtgaacagaaactgatttcagaag

SEQ ID NO: 2331 - protein, 7 aa, Artificial Sequence
  Synthetic
AIVHVFA

SEQ ID NO: 2332 - protein, 5 aa, Artificial Sequence
  Synthetic
LDNDA

SEQ ID NO: 2333 - protein, 10 aa, Artificial Sequence
  Synthetic
ISLSLDSCLQ

SEQ ID NO: 2334 - protein, 121 aa, Artificial Sequence
  Synthetic
EVQMVESGGGLVQAGDSLRLSCAASGAIVHVFAMGWFRQAPGKEREFVASINLDNDATNYADSVKGRFTISRDDARNTVYLQMNSLKPEDTAVYYCARISLSLDSCLQEYWGQGTQVTVSS

SEQ ID NO: 2335 - DNA, 412 bp, Artificial Sequence
  Synthetic
agatataccatggaagttcaaatggttgaatctggtggcggtttagttcaagccggtgatagccttcgtctgagctgcgccgcaagcggagccattgtgcatgtgttcgctatgggttggtttcgccaggcacctggtaaagaacgtgaatttgtggcatccattaaccttgacaacgacgctaccaactatgccgattctgttaaaggtcgcttcactatttcacgcgatgatgcgcgtaataccgtgtacttacagatgaactcactgaaacctgaggataccgccgtttattattgtgcgcgtatttctttgagcctggattcctgtctgcaggagtattggggtcagggcacacaagtcacggtctcaagcggcggaagctctggtgaacagaaactgatttcagaag

SEQ ID NO: 2336 - protein, 7 aa, Artificial Sequence
  Synthetic
AIVHVFA

SEQ ID NO: 2337 - protein, 5 aa, Artificial Sequence
  Synthetic
LDNDA

SEQ ID NO: 2338 - protein, 9 aa, Artificial Sequence
  Synthetic
PFWINSSVV

SEQ ID NO: 2339 - protein, 120 aa, Artificial Sequence
  Synthetic
EVQLVESGGGLVQAGDSLRLSCAASGAIVHVFAMGWFRQAPGKEREFVASINLDNDATNYADSVKGRFTISRDDAHNTMYLQMNSLKPEDTAVYYCNAPFWINSSVVDYWGQGTQVTVSS

SEQ ID NO: 2340 - DNA, 409 bp, Artificial Sequence
  Synthetic
agatataccatggaagttcaactggttgaatctggtggcggtttagttcaagccggtgatagccttcgtctgagctgcgccgcaagcggagccattgtgcatgtgttcgctatgggttggtttcgccaggcacctggtaaagaacgtgaatttgtggcatccattaaccttgacaacgacgctaccaactatgccgattctgttaaaggtcgcttcactatttcacgcgatgatgcgcataataccatgtacttacagatgaactcactgaaacctgaggataccgccgtttattattgtaatgcacccttctggatcaatagttctgttgtggactattggggtcagggcacacaagtcacggtctcaagcggcggaagctctggtgaacagaaactgatttcagaag

SEQ ID NO: 2341 - protein, 7 aa, Artificial Sequence
  Synthetic
AIVHVFA

SEQ ID NO: 2342 - protein, 5 aa, Artificial Sequence
  Synthetic
LDNDA

SEQ ID NO: 2343 - protein, 9 aa, Artificial Sequence
  Synthetic
PFWINSSVV

SEQ ID NO: 2344 - protein, 120 aa, Artificial Sequence
  Synthetic
EVQLVESGGGLVQAGDSLRLSCAASGAIVHVFAMGWLRQAPGKEREFVASINLDNDATNYADSVKGRFTISRDDAHNTVYLQMNSLKPEDTAVYYCNAPFWINSSVVDYCGQGTQVTVSS

SEQ ID NO: 2345 - DNA, 403 bp, Artificial Sequence
  Synthetic
accatggaagttcaactggttgaatctggtggcggtttagttcaagccggtgatagccttcgtctgagctgcgccgcaagcggagccattgtgcatgtgttcgctatgggttggcttcgccaggcacctggtaaagaacgtgaatttgtggcatccattaaccttgacaacgacgctaccaactatgccgattctgttaaaggtcgcttcactatttcacgcgatgatgcgcataataccgtgtacttacagatgaactcactgaaacctgaggataccgccgtttattattgtaatgcacccttctggatcaatagttctgttgtggactattgtggtcagggcacacaagtcacggtctcaagcggcggaagctctggtgaacagaaactgatttcagaag

SEQ ID NO: 2346 - protein, 7 aa, Artificial Sequence
  Synthetic
AIVHVFA

SEQ ID NO: 2347 - protein, 5 aa, Artificial Sequence
  Synthetic
LDNDA

SEQ ID NO: 2348 - protein, 9 aa, Artificial Sequence
  Synthetic
TIFMDSDLG

SEQ ID NO: 2349 - protein, 120 aa, Artificial Sequence
  Synthetic
EVQLVESGGGLVQAGDSLRLSCAASGAIVHVFAMGWFRQAPGKEHEFVASINLDNDATNYADSVKGRFTISRDDARNTVYLQMNSLKPEDTAVYYCNATIFMDSDLGDYWGQGTQVTVSS

SEQ ID NO: 2350 - DNA, 409 bp, Artificial Sequence
  Synthetic
agatataccatggaagttcaactggttgaatctggtggcggtttagttcaagccggtgatagccttcgtctgagctgcgccgcaagcggagccattgtgcatgtgttcgctatgggttggtttcgccaggcacctggtaaagaacatgaatttgtggcatccattaaccttgacaacgacgctaccaactatgccgattctgttaaaggtcgcttcactatttcacgcgatgatgcgcgtaataccgtgtacttacagatgaactcactgaaacctgaggataccgccgtttattattgtaatgcaaccatctttatggattccgatttgggtgactattggggtcagggcacacaagtcacggtctcaagcggcggaagctctggtgaacagaaactgatttcagaag

SEQ ID NO: 2351 - protein, 7 aa, Artificial Sequence
  Synthetic
DIVHVFA

SEQ ID NO: 2352 - protein, 5 aa, Artificial Sequence
  Synthetic
LDNDA

SEQ ID NO: 2353 - protein, 9 aa, Artificial Sequence
  Synthetic
TIFMDSDLG

SEQ ID NO: 2354 - protein, 120 aa, Artificial Sequence
  Synthetic
EVQLVESGGGLVQAGDSLRLSCAASGDIVHVFAMGWFRQAPGKEREFVASINLDNDATNYADSVKGRFTISRDDARNTVYLQMNSLKPEDTAVYYCNATIFMDSDLGDYWGQGTQVTVSS

SEQ ID NO: 2355 - DNA, 403 bp, Artificial Sequence
  Synthetic
accatggaagttcaactggttgaatctggtggcggtttagttcaagccggtgatagccttcgtctgagctgcgccgcaagcggagacattgtgcatgtgttcgctatgggttggtttcgccaggcacctggtaaagaacgtgaatttgtggcatccattaaccttgacaacgacgctaccaactatgccgattctgttaaaggtcgcttcactatttcacgcgatgatgcgcgtaataccgtgtacttacagatgaactcactgaaacctgaggataccgccgtttattattgtaatgcaaccatctttatggattccgatttgggtgactattggggtcagggcacacaagtcacggtctcaagcggcggaagctctggtgaacagaaactgatttcagaag

SEQ ID NO: 2356 - protein, 7 aa, Artificial Sequence
  Synthetic
AIVHVFA

SEQ ID NO: 2357 - protein, 5 aa, Artificial Sequence
  Synthetic
LDNDA

SEQ ID NO: 2358 - protein, 9 aa, Artificial Sequence
  Synthetic
TIFMDSDLG

SEQ ID NO: 2359 - protein, 120 aa, Artificial Sequence
  Synthetic
EVQLVESGGGLVQDGDSLRLSCAASGAIVHVFAMGWFRQAPGKEREFVASINLDNDATNYADSVKGRFTISRDDARNTVYLQMNSLKPEDTAVYYCNATIFMDSDLGDYWGQGTQVTVSS

SEQ ID NO: 2360 - DNA, 407 bp, Artificial Sequence
  Synthetic
atataccatggaagttcaactggttgaatctggtggcggtttagttcaagacggtgatagccttcgtctgagctgcgccgcaagcggagccattgtgcatgtgttcgctatgggttggtttcgccaggcacctggtaaagaacgtgaatttgtggcatccattaaccttgacaacgacgctaccaactatgccgattctgttaaaggtcgcttcactatttcacgcgatgatgcgcgtaataccgtgtacttacagatgaactcactgaaacctgaggataccgccgtttattattgtaatgcaaccatctttatggattccgatttgggtgactattggggtcagggcacacaagtcacggtctcaagcggcggaagctctggtgaacagaaactgatttcagaag

SEQ ID NO: 2361 - protein, 7 aa, Artificial Sequence
  Synthetic
AIVHVFA

SEQ ID NO: 2362 - protein, 5 aa, Artificial Sequence
  Synthetic
LDTDA

SEQ ID NO: 2363 - protein, 9 aa, Artificial Sequence
  Synthetic
TIFMDSDLG

SEQ ID NO: 2364 - protein, 120 aa, Artificial Sequence
  Synthetic
EVQLVESGGGLVQAGDSLRLSCAASGAIVHVFAMGWFRQAPGKEREFVASINLDTDATNYADSVKGRFTISRDDARNTVYLQMNSLKPEDTAVYYCNATIFMDSDLGDYWGQGTQVTVSS

SEQ ID NO: 2365 - DNA, 407 bp, Artificial Sequence
  Synthetic
atataccatggaagttcaactggttgaatctggtggcggtttagttcaagccggtgatagccttcgtctgagctgcgccgcaagcggagccattgtgcatgtgttcgctatgggttggtttcgccaggcacctggtaaagaacgtgaatttgtggcatccattaaccttgacaccgacgctaccaactatgccgattctgttaaaggtcgcttcactatttcacgcgatgatgcgcgtaataccgtgtacttacagatgaactcactgaaacctgaggataccgccgtttattattgtaatgcaaccatctttatggattccgatttgggtgactattggggtcagggcacacaagtcacggtctcaagcggcggaagctctggtgaacagaaactgatttcagaag

SEQ ID NO: 2366 - protein, 7 aa, Artificial Sequence
  Synthetic
AIVHVFA

SEQ ID NO: 2367 - protein, 5 aa, Artificial Sequence
  Synthetic
LDNDA

SEQ ID NO: 2368 - protein, 9 aa, Artificial Sequence
  Synthetic
TIFMDSDLG

SEQ ID NO: 2369 - protein, 120 aa, Artificial Sequence
  Synthetic
EVQLVESGGGLVQAGDSLRLSCAASGAIVHVFAMGWFRQAPGKEREFVASINLDNDATNYADSVKGRFTISRDDARNTVYLQMNPLKPEDTAVYYCNATIFMDSDLGDYWGQGTQVTVSS

SEQ ID NO: 2370 - DNA, 403 bp, Artificial Sequence
  Synthetic
accatggaagttcaactggttgaatctggtggcggtttagttcaagccggtgatagccttcgtctgagctgcgccgcaagcggagccattgtgcatgtgttcgctatgggttggtttcgccaggcacctggtaaagaacgtgaatttgtggcatccattaaccttgacaacgacgctaccaactatgccgattctgttaaaggtcgcttcactatttcacgcgatgatgcgcgtaataccgtgtacttacagatgaacccactgaaacctgaggataccgccgtttattattgtaatgcaaccatctttatggattccgatttgggtgactattggggtcagggcacacaagtcacggtctcaagcggcggaagctctggtgaacagaaactgatttcagaag

SEQ ID NO: 2371 - protein, 7 aa, Artificial Sequence
  Synthetic
AIVHVFA

SEQ ID NO: 2372 - protein, 5 aa, Artificial Sequence
  Synthetic
LDNDA

SEQ ID NO: 2373 - protein, 9 aa, Artificial Sequence
  Synthetic
TIFMDSDLG

SEQ ID NO: 2374 - protein, 120 aa, Artificial Sequence
  Synthetic
EVQLVESGGGLVQAGDSLSLSCAASGAIVHVFAMGWFRQAPGKEREFVASINLDNDATNYADSVKGRFTISRDDARNTVYLQMNSLKPEDTAVYYCNATIFMDSDLGDYWGQGTQVTVSS

SEQ ID NO: 2375 - DNA, 413 bp, Artificial Sequence
  Synthetic
aaggagatataccatggaagttcaactggttgaatctggtggcggtttagttcaagccggtgatagccttagtctgagctgcgccgcaagcggagccattgtgcatgtgttcgctatgggttggtttcgccaggcacctggtaaagaacgtgaatttgtggcatccattaaccttgacaacgacgctaccaactatgccgattctgttaaaggtcgcttcactatttcacgcgatgatgcgcgtaataccgtgtacttacagatgaactcactgaaacctgaggataccgccgtttattattgtaatgcaaccatctttatggattccgatttgggtgactattggggtcagggcacacaagtcacggtctcaagcggcggaagctctggtgaacagaaactgatttcagaag

SEQ ID NO: 2376 - protein, 7 aa, Artificial Sequence
  Synthetic
AIVHVFA

SEQ ID NO: 2377 - protein, 5 aa, Artificial Sequence
  Synthetic
LDNDA

SEQ ID NO: 2378 - protein, 9 aa, Artificial Sequence
  Synthetic
TIFMDSDLG

SEQ ID NO: 2379 - protein, 120 aa, Artificial Sequence
  Synthetic
EVQLVESGGGLVQAGDSLRLSCAASGAIVHVFAMGWFRQAPGKEREFVASINLDNDATNYADSVKGRFTISRDDAHNTVYLQMNSLKPEDTAVYYCNATIFMDSDLGDYWGQGTQVTVSS

SEQ ID NO: 2380 - DNA, 403 bp, Artificial Sequence
  Synthetic
accatggaagttcaactggttgaatctggtggcggtttagttcaagccggtgatagccttcgtctgagctgcgccgcaagcggagccattgtgcatgtgttcgctatgggttggtttcgccaggcacctggtaaagaacgtgaatttgtggcatccattaaccttgacaacgacgctaccaactatgccgattctgttaaaggtcgcttcactatttcacgcgatgatgcgcataataccgtgtacttacagatgaactcactgaaacctgaggataccgccgtttattattgtaatgcaaccatctttatggattccgatttgggtgactattggggtcagggcacacaagtcacggtctcaagcggcggaagctctggtgaacagaaactgatttcagaag

SEQ ID NO: 2381 - protein, 7 aa, Artificial Sequence
  Synthetic
AIVHVLA

SEQ ID NO: 2382 - protein, 5 aa, Artificial Sequence
  Synthetic
LDNDA

SEQ ID NO: 2383 - protein, 9 aa, Artificial Sequence
  Synthetic
TIFMDSDLG

SEQ ID NO: 2384 - protein, 120 aa, Artificial Sequence
  Synthetic
EVQLVESGGGLVQAGDSLRLSCAASGAIVHVLAMGWFRQAPGKEREFVASINLDNDATNYADSVKGRFTISRDDARNTVYLQMNSLKPEDTAVYYCNATIFMDSDLGDYWGQGTQVTVSS

SEQ ID NO: 2385 - DNA, 405 bp, Artificial Sequence
  Synthetic
ataccatggaagttcaactggttgaatctggtggcggtttagttcaagccggtgatagccttcgtctgagctgcgccgcaagcggagccattgtgcatgtgttagctatgggttggtttcgccaggcacctggtaaagaacgtgaatttgtggcatccattaaccttgacaacgacgctaccaactatgccgattctgttaaaggtcgcttcactatttcacgcgatgatgcgcgtaataccgtgtacttacagatgaactcactgaaacctgaggataccgccgtttattattgtaatgcaaccatctttatggattccgatttgggtgactattggggtcagggcacacaagtcacggtctcaagcggcggaagctctggtgaacaggaactgatttcagaag

SEQ ID NO: 2386 - protein, 7 aa, Artificial Sequence
  Synthetic
AIVHVFA

SEQ ID NO: 2387 - protein, 5 aa, Artificial Sequence
  Synthetic
LDNDA

SEQ ID NO: 2388 - protein, 6 aa, Artificial Sequence
  Synthetic
ESTSYF

SEQ ID NO: 2389 - protein, 117 aa, Artificial Sequence
  Synthetic
EVQLVESGGGLVQAGDSLRLSCAASGAIVHVFAMGWFRQAPGKEREFVASINLDNDATNYADSVKGRFTISRDDARNTVYLQMNSLKPEDTAVYYCAVESTSYFGYWGQGTQVTVSS

SEQ ID NO: 2390 - DNA, 404 bp, Artificial Sequence
  Synthetic
aaggagatataccatggaagttcaactggttgaatctggtggcggtttagttcaagccggtgatagccttcgtctgagctgcgccgcaagcggagccattgtgcatgtgttcgctatgggttggtttcgccaggcacctggtaaagaacgtgaatttgtggcatccattaaccttgacaacgacgctaccaactatgccgattctgttaaaggtcgcttcactatttcacgcgatgatgcgcgtaataccgtgtacttacagatgaactcactgaaacctgaggataccgccgtttattattgtgcggttgagagtacgagttattttggctattggggtcagggcacacaagtcacggtctcaagcggcggaagctctggtgaacagaaactgatttcagaag

SEQ ID NO: 2391 - protein, 7 aa, Artificial Sequence
  Synthetic
AIVHVFA

SEQ ID NO: 2392 - protein, 5 aa, Artificial Sequence
  Synthetic
LDNDA

SEQ ID NO: 2393 - protein, 9 aa, Artificial Sequence
  Synthetic
PFWINSSVV

SEQ ID NO: 2394 - protein, 120 aa, Artificial Sequence
  Synthetic
QVQLVESGGGLVQAGDSLRLSCASSGAIVHVFAMGWFRQAPGKEREFVASINLDNDATNYADSVKGRFTISRDDAHNTVYLQMNSLKPEDTAVYYCNAPFWINSSVVDYWGQGTQVTVSS

SEQ ID NO: 2395 - DNA, 412 bp, Artificial Sequence
  Synthetic
aggagatataccatgcaggttcaactggttgaatctggtggcggtttagttcaagccggtgatagccttcgtctgagctgcgcctcaagcggagccattgtgcatgtgttcgctatgggttggtttcgccaggcacctggtaaagaacgtgaatttgtggcatccattaaccttgacaacgacgctaccaactatgccgattctgttaaaggtcgcttcactatttcacgcgatgatgcgcataataccgtgtacttacagatgaactcactgaaacctgaggataccgccgtttattattgtaatgcacccttctggatcaatagttctgttgtggactattggggtcagggcacacaagtcacggtctcaagcggcggaagctctggtgaacagaaactgatttcagaag

SEQ ID NO: 2396 - protein, 7 aa, Artificial Sequence
  Synthetic
AIVHVFA

SEQ ID NO: 2397 - protein, 5 aa, Artificial Sequence
  Synthetic
LDNDA

SEQ ID NO: 2398 - protein, 9 aa, Artificial Sequence
  Synthetic
FCYVPLATC

SEQ ID NO: 2399 - protein, 120 aa, Artificial Sequence
  Synthetic
EVQLVESGGGLVQAGDSLRLSCAASGAIVHVFAMGWFRQAPGKEREFVASINLDNDATNYADSVKGRFTISRDDARNTVYLQMNSLKPEDTAVYYCNAFCYVPLATCDYWGQDTQVTVSS

SEQ ID NO: 2400 - DNA, 411 bp, Artificial Sequence
  Synthetic
ggagatataccatggaagttcaactggttgaatctggtggcggtttagttcaagccggtgatagccttcgtctgagctgcgccgcaagcggagccattgtgcatgtgttcgctatgggttggtttcgccaggcacctggtaaagaacgtgaatttgtggcatccattaaccttgacaacgacgctaccaactatgccgattctgttaaaggtcgcttcactatttcacgcgatgatgcgcgtaataccgtgtacttacagatgaactcactgaaacctgaggataccgccgtttattattgtaatgcattctgctacgtccctttggccacgtgtgactattggggtcaggacacacaagtcacggtctcaagcggcggaagctctggtgaacagaaactgatttcagaag

SEQ ID NO: 2401 - protein, 7 aa, Artificial Sequence
  Synthetic
AIVHVFA

SEQ ID NO: 2402 - protein, 5 aa, Artificial Sequence
  Synthetic
LDNDA

SEQ ID NO: 2403 - protein, 9 aa, Artificial Sequence
  Synthetic
PFWINSSVV

SEQ ID NO: 2404 - protein, 120 aa, Artificial Sequence
  Synthetic
EVQLVESGGGLVQAGDSLRLSCAASGAIVHVFAMGWFRQAPGKEREFVASINLDNDATNYADSVKGRFTISRDDAHNTVYLQMNSLKPQDTAVYYCNAPFWINSSVVDYWGQGTQVTVSS

SEQ ID NO: 2405 - DNA, 412 bp, Artificial Sequence
  Synthetic
aggagatataccatggaagttcaactggttgaatctggtggcggtttagttcaagccggtgatagccttcgtctgagctgcgccgcaagcggagccattgtgcatgtgttcgctatgggttggtttcgccaggcacctggtaaagaacgtgaatttgtggcatccattaaccttgacaacgacgctaccaactatgccgattctgttaaaggtcgcttcactatttcacgcgatgatgcgcataataccgtgtacttacagatgaactcactgaaacctcaggataccgccgtttattattgtaatgcacccttctggatcaatagttctgttgtggactattggggtcagggcacacaagtcacggtctcaagcggcggaagctctggtgaacagaaactgctttcagaag

SEQ ID NO: 2406 - protein, 7 aa, Artificial Sequence
  Synthetic
AIVHVFA

SEQ ID NO: 2407 - protein, 5 aa, Artificial Sequence
  Synthetic
LDNDA

SEQ ID NO: 2408 - protein, 9 aa, Artificial Sequence
  Synthetic
TIFMDSDLG

SEQ ID NO: 2409 - protein, 120 aa, Artificial Sequence
  Synthetic
EVQLVESGGGLVQAGDSLRLSCAASGAIVHVFAMGWFRQAPGKEREFVASINLDNDATNYADSVKGRFTISRDDACNTVYLQMNSLKPEDTAVYYCNATIFMDSDLGDYWGQGTQVTVSS

SEQ ID NO: 2410 - DNA, 412 bp, Artificial Sequence
  Synthetic
aggagatataccatggaagttcaactggttgaatctggtggcggtttagttcaagccggtgatagccttcgtctgagctgcgccgcaagcggagccattgtgcatgtgttcgctatgggttggtttcgccaggcacctggtaaagaacgtgaatttgtggcatccattaaccttgacaacgacgctaccaactatgccgattctgttaaaggtcgcttcactatttcacgcgatgatgcgtgtaataccgtgtacttacagatgaactcactgaaacctgaggataccgccgtttattattgtaatgcaaccatctttatggattccgatttgggtgactattggggtcagggcacacaagtcacggtctcaagcggcggaagctctggtgaacagaaactgatttcagaag

SEQ ID NO: 2411 - protein, 7 aa, Artificial Sequence
  Synthetic
AIVHVFA

SEQ ID NO: 2412 - protein, 5 aa, Artificial Sequence
  Synthetic
LDNDA

SEQ ID NO: 2413 - protein, 9 aa, Artificial Sequence
  Synthetic
TIFMDSDLG

SEQ ID NO: 2414 - protein, 120 aa, Artificial Sequence
  Synthetic
EVQLVESGGGLVQAGDSLRLSCAASGAIVHVFAMGWFRQAPGKEREFVASINLDNDATNYVDSVKGRFTISRDDARNTVYLQMNSLKPEDTAVYYCNATIFMDSDLGDYWVQGTQVTVSS

SEQ ID NO: 2415 - DNA, 412 bp, Artificial Sequence
  Synthetic
aggagatataccatggaagttcaactggttgaatctggtggcggtttagttcaagccggtgatagccttcgtctgagctgcgccgcaagcggagccattgtgcatgtgttcgctatgggctggtttcgccaggcacctggtaaagaacgtgaatttgtggcatccattaaccttgacaacgacgctaccaactatgtcgattctgttaaaggtcgcttcactatttcacgcgatgatgcgcgtaataccgtgtacttacagatgaactcactgaaacctgaggataccgccgtttattattgtaatgcaaccatctttatggattccgatttgggtgactattgggttcagggcacacaagtcacggtctcaagcggcggaagctctgttgaacagaaactgatttcagaag

SEQ ID NO: 2416 - protein, 7 aa, Artificial Sequence
  Synthetic
AIVHVFA

SEQ ID NO: 2417 - protein, 5 aa, Artificial Sequence
  Synthetic
LDNDA

SEQ ID NO: 2418 - protein, 9 aa, Artificial Sequence
  Synthetic
TIFMDSDLG

SEQ ID NO: 2419 - protein, 120 aa, Artificial Sequence
  Synthetic
EVQLVESGGGLVQAGDSLRLSCAASGAIVHVFAMGWFRQAPGKEREFVASINLDNDATNYADSVKGRFTISRDDARNTVYLQMNSLKPEDTAVYYCNATIFMDSDLGDYWGQSTQVTVSS

SEQ ID NO: 2420 - DNA, 412 bp, Artificial Sequence
  Synthetic
aggagatataccatggaagttcaactggttgaatctggtggcggtttagttcaagccggtgatagccttcgtctgagctgcgccgcaagcggagccattgtgcatgtgttcgctatgggttggtttcgccaggcacctggtaaagaacgtgaatttgtggcatccattaaccttgacaacgacgctaccaactatgccgattctgttaagggtcgcttcactatttcacgcgatgatgcgcgtaataccgtgtacttacagatgaactcactgaaacctgaggataccgccgtttattattgtaatgcaaccatctttatggattccgatttgggtgactattggggtcagagcacacaagtcacggtctcaagcggcggaagctctggtgaacagaaactgatttcagaag

SEQ ID NO: 2421 - protein, 7 aa, Artificial Sequence
  Synthetic
AIVHVFA

SEQ ID NO: 2422 - protein, 5 aa, Artificial Sequence
  Synthetic
LDNDA

SEQ ID NO: 2423 - protein, 9 aa, Artificial Sequence
  Synthetic
PFWINSSVV

SEQ ID NO: 2424 - protein, 120 aa, Artificial Sequence
  Synthetic
EVQLVESGGGLVQAGDSLRLSCAASGAIVHVFAMGWFRQAPGKEREFVASVNLDNDATNYADSVKGRFTISRDDAHNTVYLQMNSLKPEDTAVYYCNAPFWINSSVVDYWGQGTQVTVSS

SEQ ID NO: 2425 - DNA, 413 bp, Artificial Sequence
  Synthetic
aaggagatataccatggaagttcaactggttgaatctggtggcggtttagttcaagccggtgatagccttcgtctgagctgcgccgcaagcggagccattgtgcatgtgttcgctatgggttggtttcgccaggcacctggtaaagaacgtgaatttgtggcatccgttaaccttgacaacgacgctaccaactatgccgattctgttaaaggtcgcttcactatttcacgcgatgatgcgcataataccgtgtacttacagatgaactcactgaaacctgaggataccgccgtttattattgtaatgcacccttctggatcaatagttctgttgtggactattggggtcagggcacacaagtcacggtctcaagcggcggaagctctggtgaacagaaactgatttcagaag

SEQ ID NO: 2426 - protein, 7 aa, Artificial Sequence
  Synthetic
AIVHVFA

SEQ ID NO: 2427 - protein, 5 aa, Artificial Sequence
  Synthetic
LDNDA

SEQ ID NO: 2428 - protein, 9 aa, Artificial Sequence
  Synthetic
TIFMDSDLG

SEQ ID NO: 2429 - protein, 120 aa, Artificial Sequence
  Synthetic
EVQLFESGGGLVQAGDSLRLSCAASGAIVHVFAMGWFRQAPGKEREFVASINLDNDATNYADSVKGRFTISRDDARNTVYLQMNSLKPEDTAVYYCNATIFMDSDLGDYWVQGTQVTVSS

SEQ ID NO: 2430 - DNA, 407 bp, Artificial Sequence
  Synthetic
atataccatggaagttcaactgtttgaatctggtggcggtttagttcaagccggtgatagccttcgtctgagctgcgccgcaagcggagccattgtgcatgtgttcgctatgggttggtttcgccaggcacctggtaaagaacgtgaatttgtggcatccattaaccttgacaacgacgctaccaactatgccgattctgttaaaggtcgcttcactatttcacgcgatgatgcgcgtaataccgtgtacttacagatgaactcactgaaacctgaggataccgccgtttattattgtaatgcaaccatctttatggattccgatttgggtgactattgggttcagggcacacaagtcacggtctcaagcggcggaagctctggtgaacagaaactgatttcagaag

SEQ ID NO: 2431 - protein, 7 aa, Artificial Sequence
  Synthetic
AIVHVFA

SEQ ID NO: 2432 - protein, 5 aa, Artificial Sequence
  Synthetic
LDNDA

SEQ ID NO: 2433 - protein, 9 aa, Artificial Sequence
  Synthetic
TIFMDSDLG

SEQ ID NO: 2434 - protein, 120 aa, Artificial Sequence
  Synthetic
EVQLVESGGGLVQAGDSLRLSCAASGAIVHVFAMGWFRQEPGKEREFVASINLDNDATNYADSVKGRFTISRDDARNTVYLQMNSLKPEDTAVYYCNATIFMDSDLGDYWGQGTQVTVSS

SEQ ID NO: 2435 - DNA, 409 bp, Artificial Sequence
  Synthetic
agatataccatggaagttcaactggttgaatctggtggcggtttagttcaagccggtgatagccttcgtctgagctgcgccgcaagcggagccattgtgcatgtgttcgctatgggttggtttcgccaggaacctggtaaagaacgtgagtttgtggcatccattaaccttgacaacgacgctaccaactatgccgattctgttaaaggtcgcttcactatttcacgcgatgatgcgcgtaataccgtgtacttacagatgaactcactgaaacctgaggataccgccgtttattattgtaatgcaaccatctttatggattccgatttgggtgactattggggtcagggcacacaagtcacggtctcaagcggcggaagctctggtgaacagaaactgatttcagaag

SEQ ID NO: 2436 - protein, 7 aa, Artificial Sequence
  Synthetic
AIVHVFA

SEQ ID NO: 2437 - protein, 5 aa, Artificial Sequence
  Synthetic
LDNDA

SEQ ID NO: 2438 - protein, 9 aa, Artificial Sequence
  Synthetic
PFWINSSVV

SEQ ID NO: 2439 - protein, 120 aa, Artificial Sequence
  Synthetic
EVQLVESGGGLVQAGDSLRLSCAASGAIVHVFAMGWFRQAPGKEREFVTSINLDNDATNYADSVKGRFTISRDDAHNTVYLQMNSLKPEDTAVYYCNAPFWINSSVVDYWGQGTQVTVSS

SEQ ID NO: 2440 - DNA, 405 bp, Artificial Sequence
  Synthetic
ataccatggaagttcaactggttgaatctggtggcggtttagttcaagccggtgatagccttcgtctgagctgcgccgcaagcggagccattgtgcatgtgttcgctatgggttggtttcgccaggcacctggtaaagaacgtgaatttgtgacatccattaaccttgacaacgacgctaccaactatgccgattctgttaaaggtcgcttcactatttcacgcgatgatgcgcataataccgtgtacttacagatgaactcactgaaacctgaggataccgccgtttattattgtaatgcacccttctggatcaatagttctgttgtggactattggggtcagggcacacaagtcacggtctcaagcggcggaagctctggtgaacagaaactgatttcagaag

SEQ ID NO: 2441 - protein, 7 aa, Artificial Sequence
  Synthetic
AIVHVFA

SEQ ID NO: 2442 - protein, 5 aa, Artificial Sequence
  Synthetic
LDNDA

SEQ ID NO: 2443 - protein, 9 aa, Artificial Sequence
  Synthetic
TIFMDSDLG

SEQ ID NO: 2444 - protein, 120 aa, Artificial Sequence
  Synthetic
EVQLVESGGGLVQAGDTLRLSCAASGAIVHVFAMGWFRQAPGKEREFVASINLDNDATNYADSVKGRFTISRDDARNTVYLQMNSLKPEDTAVYYCNATIFMDSDLGDYWGQGTQVTVSS

SEQ ID NO: 2445 - DNA, 413 bp, Artificial Sequence
  Synthetic
aaggagatataccatggaagttcaactggttgaatctggtggcggtttagttcaagccggtgatacccttcgtctgagctgcgccgcaagcggagccattgtgcatgtgttcgctatgggttggtttcgccaggcacctggtaaagaacgtgaatttgtggcatccattaaccttgacaacgacgctaccaactatgccgattctgttaaaggtcgcttcactatttcacgcgatgatgcgcgtaataccgtgtacttacagatgaactcactgaaacctgaggataccgccgtttattattgtaatgcaaccatctttatggattccgatttgggtgactattggggtcagggcacacaagtcacggtctcaagcggcggaagctctggtgaacagaaactgatttcagaag

SEQ ID NO: 2446 - protein, 7 aa, Artificial Sequence
  Synthetic
AIVHVFA

SEQ ID NO: 2447 - protein, 5 aa, Artificial Sequence
  Synthetic
LDNDA

SEQ ID NO: 2448 - protein, 10 aa, Artificial Sequence
  Synthetic
TAISPISIVD

SEQ ID NO: 2449 - protein, 121 aa, Artificial Sequence
  Synthetic
EVQLVESGGGLVQAGDSLRLSWAASGAIVHVFAMGWFRQAPGKEREFVASINLDNDATNYADSVKGRFTISRDDARNTVYLQMNSLKPEDTAVYYCAATAISPISIVDEYWGQGTQVTVSS

SEQ ID NO: 2450 - DNA, 410 bp, Artificial Sequence
  Synthetic
atataccatggaagttcaactggttgaatctggtggcggtttagttcaagccggtgatagccttcgtctgagctgggccgcaagcggagccattgtgcatgtgttcgctatgggttggtttcgccaggcacctggtaaagaacgtgaatttgtggcatccattaaccttgacaacgacgctaccaactatgccgattctgttaaaggtcgcttcactatttcacgcgatgatgcgcgtaataccgtgtacttacagatgaactcactgaaacctgaggataccgccgtttattattgtgcggcaacggctattagccctatctctattgtggatgagtattggggtcagggcacacaagtcacggtctcaagcggcggaagctctggtgaacagaaactgatttcagaag

SEQ ID NO: 2451 - protein, 7 aa, Artificial Sequence
  Synthetic
AIVHVFA

SEQ ID NO: 2452 - protein, 5 aa, Artificial Sequence
  Synthetic
LDNDA

SEQ ID NO: 2453 - protein, 10 aa, Artificial Sequence
  Synthetic
TAISPISIVD

SEQ ID NO: 2454 - protein, 121 aa, Artificial Sequence
  Synthetic
EVQLVESGGGLVQAGDSLRLSCAASGAIVHVFAMGWFCQAPGKEREFVASINLDNDATNYADSVKGRFTISRDDARNTVYLQMNSLKPEDTAVYYCAATAISPISIVDEYWGQGTQVTVSS

SEQ ID NO: 2455 - DNA, 410 bp, Artificial Sequence
  Synthetic
atataccatggaagttcaactggttgaatctggtggcggtttagttcaagccggtgatagccttcgtctgagctgcgccgcaagcggagccattgtgcatgtgttcgctatgggttggttttgccaggcacctggtaaagaacgtgaatttgtggcatccattaaccttgacaacgacgctaccaactatgccgattctgttaaaggtcgcttcactatttcacgcgatgatgcgcgtaataccgtgtacttacagatgaactcactgaaacctgaggataccgccgtttattattgtgcggcaacggctattagccctatctctattgtggatgagtattggggtcagggcacacaagtcacggtctcaagcggcggaagctctggtgaacagaaactgatttcagaag

SEQ ID NO: 2456 - protein, 7 aa, Artificial Sequence
  Synthetic
AIVHVFA

SEQ ID NO: 2457 - protein, 5 aa, Artificial Sequence
  Synthetic
LDNDA

SEQ ID NO: 2458 - protein, 10 aa, Artificial Sequence
  Synthetic
TAISPISIVD

SEQ ID NO: 2459 - protein, 121 aa, Artificial Sequence
  Synthetic
EVQLVESGGGLVQAGDSLRLSCAASGAIVHVFAMGWFRQAPGKEREFVASINLDNDATNYADSVKGRFTISRDDARNTVYLQMNSLKPEDTAVYYCAATAISPISIVDEYWVQGTQVTVSS

SEQ ID NO: 2460 - DNA, 406 bp, Artificial Sequence
  Synthetic
accatggaagttcaactggttgaatctggtggcggtttagttcaagccggtgatagccttcgtctgagctgcgccgcaagcggagccattgtgcatgtgttcgctatgggttggtttcgccaggcacctggtaaagaacgtgaatttgtggcatccattaaccttgacaacgacgctaccaactatgccgattctgttaaaggtcgcttcactatttcacgcgatgatgcgcgtaataccgtgtacttacagatgaactcactgaaacctgaggataccgccgtttattattgtgcggcaacggctattagccctatctctattgtggatgagtattgggttcagggcacacaagtcacggtctcaagcggcggaagctctgttgaacagaaactgatttcagaag

SEQ ID NO: 2461 - protein, 7 aa, Artificial Sequence
  Synthetic
AIVHVFA

SEQ ID NO: 2462 - protein, 5 aa, Artificial Sequence
  Synthetic
LDNDA

SEQ ID NO: 2463 - protein, 9 aa, Artificial Sequence
  Synthetic
TIFMDSNLG

SEQ ID NO: 2464 - protein, 120 aa, Artificial Sequence
  Synthetic
EVQLVESGGGLVQAGDSLRLSCAASGAIVHVFAMGWFRQAPGKEREFVASINLDNDATNYADSVKGRFTISRDDARNTVYLQMNSLKPEDTAVYYCNATIFMDSNLGDYWGQGTQVTVSS

SEQ ID NO: 2465 - DNA, 407 bp, Artificial Sequence
  Synthetic
atataccatggaagttcaactggttgaatctggtggcggtttagttcaagccggtgatagccttcgcctgagctgcgccgcaagcggagccattgtgcatgtgttcgctatgggttggtttcgccaggcacctggtaaagaacgtgaatttgtggcatccattaaccttgacaacgacgctaccaactatgccgattctgttaaaggtcgcttcactatttcacgcgatgatgcgcgtaataccgtgtacttacagatgaactcactgaaacctgaggataccgccgtttattattgtaatgcaaccatctttatggattccaatttgggtgactattggggtcagggcacacaagtcacggtctcaagcggcggaagctctggtgaacagaaactgatttcagaag

SEQ ID NO: 2466 - protein, 7 aa, Artificial Sequence
  Synthetic
AIVHVFA

SEQ ID NO: 2467 - protein, 5 aa, Artificial Sequence
  Synthetic
LDNDA

SEQ ID NO: 2468 - protein, 9 aa, Artificial Sequence
  Synthetic
TIFMDSDLG

SEQ ID NO: 2469 - protein, 120 aa, Artificial Sequence
  Synthetic
EVQLVESGGGLVQAGDSLRLSCAASGAIVHVFAMGWFRQAPGKEREFVASINLDNDATNYADSVKGRFTISRDDARNTVYLQMNSLKPEDTAVYYCNATIFMDSDLGDYWSQGTQVTVSS

SEQ ID NO: 2470 - DNA, 412 bp, Artificial Sequence
  Synthetic
aggagatataccatggaagttcaactggttgaatctggtggcggtttagttcaagccggtgatagccttcgtctgagctgcgccgcaagcggagccattgtgcatgtgttcgctatgggttggtttcgccaggcacctggtaaagaacgtgaatttgtggcatccattaaccttgacaacgacgctaccaactatgccgattctgttaaaggtcgcttcactatttcacgcgatgatgcgcgtaataccgtgtacttacagatgaactcactgaaacctgaggataccgccgtttactattgtaatgcaaccatctttatggattccgatttgggtgactattggagtcagggcacacaagtcacggtctcaagcggcggaagctctggtgaacagaaactgatttcagaag

SEQ ID NO: 2471 - protein, 7 aa, Artificial Sequence
  Synthetic
AIVHVFA

SEQ ID NO: 2472 - protein, 5 aa, Artificial Sequence
  Synthetic
LDNDA

SEQ ID NO: 2473 - protein, 10 aa, Artificial Sequence
  Synthetic
TLYHTIREAR

SEQ ID NO: 2474 - protein, 121 aa, Artificial Sequence
  Synthetic
EVQLVESGGGLVQAGDSLRLSCAASGAIVHVFAMGWFRQAPGKEREFVASINLDNDATNYADSVKGRSTISRDDARNTVYLQMNSLKPEDTAVYYCATTLYHTIREARDYWGQGTQVTVSS

SEQ ID NO: 2475 - DNA, 417 bp, Artificial Sequence
  Synthetic
gaaggagatataccatggaagttcaactggttgaatctggtggcggtttagttcaagccggtgatagccttcgtctgagctgcgccgcaagcggagccattgtgcatgtgttcgctatgggttggtttcgccaggcacctggtaaagaacgtgaatttgtggcatccattaaccttgacaacgacgctaccaactatgccgattctgttaaaggtcgctccactatttcacgcgatgatgcgcgtaataccgtgtacttacagatgaactcactgaaacctgaggataccgccgtttattattgtgcgacaactctgtaccatacgattcgggaggcccgcgactattggggtcagggcacacaagtcacggtctcaagcggcggaagctctggtgaacagaaactgatttcagaag

SEQ ID NO: 2476 - protein, 7 aa, Artificial Sequence
  Synthetic
AIVHVFA

SEQ ID NO: 2477 - protein, 5 aa, Artificial Sequence
  Synthetic
LDNDA

SEQ ID NO: 2478 - protein, 10 aa, Artificial Sequence
  Synthetic
TAISPISIVD

SEQ ID NO: 2479 - protein, 121 aa, Artificial Sequence
  Synthetic
EVQLVESGGGLVQAGDSLRLSCAASGAIVHVFAMGWFRQAPGKEREFVASINLDNDATNYANSVKGRFTISRDDARNTVYLQMNSLKPEDTAVYYCAATAISPISIVDEYWGQGTQVTVSS

SEQ ID NO: 2480 - DNA, 417 bp, Artificial Sequence
  Synthetic
gaaggagatataccatggaagttcaactggttgaatctggtggcggtttagttcaagccggtgatagccttcgtctgagctgcgccgcaagcggagccattgtgcatgtgttcgctatgggttggtttcgccaggcacctggtaaagaacgtgaatttgtggcatccattaaccttgacaacgacgctaccaactatgccaattctgttaaaggtcgcttcactatttcacgcgatgatgcgcgtaataccgtgtacttacagatgaactcactgaaacctgaggataccgccgtttattattgtgcggcaacggctattagccctatctctattgtggatgagtattggggtcagggcacacaagtcacggtctcaagcggcggaagctctggtgaacagaaactgatttcagaag

SEQ ID NO: 2481 - protein, 7 aa, Artificial Sequence
  Synthetic
AIVHVFA

SEQ ID NO: 2482 - protein, 5 aa, Artificial Sequence
  Synthetic
LDNDA

SEQ ID NO: 2483 - protein, 9 aa, Artificial Sequence
  Synthetic
TIFMDSDLG

SEQ ID NO: 2484 - protein, 120 aa, Artificial Sequence
  Synthetic
EVQLVVSGGGLVQAGDSLRLSCAASGAIVHVFAMGWFRQAPGKEREFVASINLDNDATNYADSVKGRFTISRDDARNTVYLQMNSLKPEDTAVYYCNATIFMDSDLGDYWGQGTQVTVSS

SEQ ID NO: 2485 - DNA, 411 bp, Artificial Sequence
  Synthetic
ggagatataccatggaagttcaactggttgtatctggtggcggtttagttcaagccggtgatagccttcgtctgagctgcgccgcaagcggagccattgtgcatgtgttcgctatgggttggtttcgccaggcacctggtaaagaacgtgaatttgtggcatccattaaccttgacaacgacgctaccaactatgccgattctgttaaaggtcgcttcactatttcacgcgatgatgcgcgtaataccgtgtacttacagatgaactcactgaaacctgaggataccgccgtttattattgtaatgcaaccatctttatggattccgatttgggtgactattggggtcagggcacacaagtcacggtctcaagcggcggaagctctggtgaacagaaactgatttcagaag

SEQ ID NO: 2486 - protein, 7 aa, Artificial Sequence
  Synthetic
AIVHVFA

SEQ ID NO: 2487 - protein, 5 aa, Artificial Sequence
  Synthetic
LDNDA

SEQ ID NO: 2488 - protein, 9 aa, Artificial Sequence
  Synthetic
TIFMDSDLG

SEQ ID NO: 2489 - protein, 120 aa, Artificial Sequence
  Synthetic
QVQLVESGGGLVQAGDSLRLSCAASGAIVHVFAMGWFRQAPGKEREFVASINLDNDATNYADSVKGRFTISRDDARNTVYLQMNSLKPEDTAVYYCNATIFMDSDLGDYWGQDTQVTVSS

SEQ ID NO: 2490 - DNA, 409 bp, Artificial Sequence
  Synthetic
agatataccatgcaggttcaactggttgaatctggtggcggtttagttcaagccggtgatagccttcgtctgagctgcgccgcaagcggagccattgtgcatgtgttcgctatgggttggtttcgccaggcacctggtaaagaacgtgaatttgtggcatccattaaccttgacaacgacgctaccaactatgccgattctgttaaaggtcgcttcactatttcacgcgatgatgcgcgtaataccgtgtacttacagatgaactcactgaaacctgaggataccgccgtttattattgtaatgcaaccatctttatggattccgatttgggtgactattggggtcaggacacacaagtcacggtctcaagcggcggaagctctggtgaacagaaactgatttcagaag

SEQ ID NO: 2491 - protein, 7 aa, Artificial Sequence
  Synthetic
AIVHVFA

SEQ ID NO: 2492 - protein, 5 aa, Artificial Sequence
  Synthetic
LDNDA

SEQ ID NO: 2493 - protein, 10 aa, Artificial Sequence
  Synthetic
TAISPISIVD

SEQ ID NO: 2494 - protein, 121 aa, Artificial Sequence
  Synthetic
EVQLVESGGGLVQAGDSLRLSCAASGAIVHVFAMGWFRQAPGKEREFVASINLDNDATNYADSVKGRFTISRDDARNTVYLQMNSLKPEDTAVYYCAATAISPISIVDEYWGQGTRVTVSS

SEQ ID NO: 2495 - DNA, 415 bp, Artificial Sequence
  Synthetic
aggagatataccatggaagttcaactggttgaatctggtggcggtttagttcaagccggtgatagccttcgtctgagctgcgccgcaagcggagccattgtgcatgtgttcgctatgggttggtttcgccaggcacctggtaaagaacgtgaatttgtggcatccattaaccttgacaacgacgctaccaactatgccgattctgttaaaggtcgcttcactatttcacgcgatgatgcgcgtaataccgtgtacttacagatgaactcactgaaacctgaggataccgccgtttattattgtgcggcaacggctattagccctatctctattgtggatgagtattggggtcagggcacacgagtcacggtctcaagcggcggaagctctggtgaacagaaactgatttcagaag

SEQ ID NO: 2496 - protein, 7 aa, Artificial Sequence
  Synthetic
AIVHVFA

SEQ ID NO: 2497 - protein, 5 aa, Artificial Sequence
  Synthetic
LDNDA

SEQ ID NO: 2498 - protein, 9 aa, Artificial Sequence
  Synthetic
PFWINSSVV

SEQ ID NO: 2499 - protein, 120 aa, Artificial Sequence
  Synthetic
EVQLVESGGGLVQAGDSLRLSCAASGAIVHVFAMGWFRQAPGKEHEFVASINLDNDATNYADSVKGRFTISRDDARNTVYLQMNSLKPEDTAVYYCNAPFWINSSVVDYWGQGTQVTVSS

SEQ ID NO: 2500 - DNA, 413 bp, Artificial Sequence
  Synthetic
aaggagatataccatggaagttcaactggttgaatctggtggcggtttagttcaagccggtgatagccttcgtctgagctgcgccgcaagcggagccattgtgcatgtgttcgctatgggttggtttcgccaggcacctggtaaagaacatgaatttgtggcatccattaaccttgacaacgacgctaccaactatgccgattctgttaaaggtcgcttcactatttcacgcgatgatgcgcgtaataccgtgtacttacagatgaactcactgaaacctgaggataccgccgtttattattgtaatgcacccttctggatcaatagttctgttgtggactattggggtcagggcacacaagtcacggtctcaagcggcggaagctctggtgaacagaaactgatttcagaag

SEQ ID NO: 2501 - protein, 7 aa, Artificial Sequence
  Synthetic
AIVHVFA

SEQ ID NO: 2502 - protein, 5 aa, Artificial Sequence
  Synthetic
LDNDA

SEQ ID NO: 2503 - protein, 13 aa, Artificial Sequence
  Synthetic
ACSDYTYGSHGVR

SEQ ID NO: 2504 - protein, 124 aa, Artificial Sequence
  Synthetic
EVQLVESGGGLVQAGDSLRLSCAASGAIVHVFAMGWFRQAPGKEREFVASINLDNDATNYADSVKGRFTISRDDARNTVYLQMNSLKPEDTAVYYCNAACSDYTYGSHGVRASWGQGTQVTVSS

SEQ ID NO: 2505 - DNA, 419 bp, Artificial Sequence
  Synthetic
atataccatggaagttcaactggttgaatctggtggcggtttagttcaagccggtgatagccttcgtctgagctgcgccgcaagcggagccattgtgcatgtgttcgctatgggttggtttcgccaggcacctggtaaagaacgtgaatttgtggcatccattaaccttgacaacgacgctaccaactatgccgattctgttaaaggtcgcttcactatttcacgcgatgatgcgcgtaataccgtgtacttacagatgaactcactgaaacctgaggataccgccgtttattattgtaatgcagcgtgttcggactatacgtatggctctcatggtgttcgggcctcttggggtcagggcacacaagtcacggtctcaagcggcggaagctctggtgaacagaaactgatttcagaag

SEQ ID NO: 2506 - protein, 7 aa, Artificial Sequence
  Synthetic
AIVHVFA

SEQ ID NO: 2507 - protein, 5 aa, Artificial Sequence
  Synthetic
LDNDA

SEQ ID NO: 2508 - protein, 9 aa, Artificial Sequence
  Synthetic
TIFMDSDLG

SEQ ID NO: 2509 - protein, 120 aa, Artificial Sequence
  Synthetic
EVQLVESGGGLVKAGDSLRLSCAASGAIVHVFAMGWFRQAPGKEREFVASINLDNDATNYADSVKGRFTISRDDARNTVYLQMNSLKPEDTAVYYCNATIFMDSDLGDYWGQGTQVTVSS

SEQ ID NO: 2510 - DNA, 416 bp, Artificial Sequence
  Synthetic
aggagatataccatggaagttcaactggttgaatctggtggcggtttagttaaagccggtgatagccttcgtctgagctgcgccgcaagcggagccattgtgcatgtgttcgctatgggttggtttcgccaggcacctggtaaagaacgtgaatttgtggcatccattaaccttgacaacgacgctaccaactatgccgattctgttaaaggtcgcttcactatttcacgcgatgatgcgcgtaataccgtgtacttacagatgaactcactgaaacctgaggataccgccgtttattattgtaatgcaaccatctttatggattccgatttgggtgactattggggtcagggcacacaagtcacggtctcaagcggcggaagctctggtgaacagaaactgatttcagaagccaa

SEQ ID NO: 2511 - protein, 7 aa, Artificial Sequence
  Synthetic
AIVHVFA

SEQ ID NO: 2512 - protein, 5 aa, Artificial Sequence
  Synthetic
LDNDA

SEQ ID NO: 2513 - protein, 10 aa, Artificial Sequence
  Synthetic
WSFTPSICTL

SEQ ID NO: 2514 - protein, 121 aa, Artificial Sequence
  Synthetic
QVQLQESGGGLVQAGDSLRLSCAASGAIVHVFAMGWFRQAPGKEREFVASINLDNDATNYADSVKGRFTISRDDARNTVYLQMNSLKPEDTAVYYCAAWSFTPSICTLEYWGQGTQVTVSS

SEQ ID NO: 2515 - DNA, 414 bp, Artificial Sequence
  Synthetic
atataccatgcaggttcaactgcaagaatctggtggcggtttagttcaagccggtgatagccttcgtctgagctgcgccgcaagcggagccattgtgcatgtgttcgctatgggttggtttcgccaggcacctggtaaagaacgtgaatttgtggcatccattaaccttgacaacgacgctaccaactatgccgattctgttaaaggtcgcttcactatttcacgcgatgatgcgcgtaataccgtgtacttacagatgaactcactgaaacctgaggataccgccgtttattattgtgcggcatggagtttcaccccttctatctgtaccttggagtattggggtcagggcacacaagtcacggtctcaagcggcggaagctctggtgaacagaaactgatttcagaagccaa

SEQ ID NO: 2516 - protein, 7 aa, Artificial Sequence
  Synthetic
AIVHVFA

SEQ ID NO: 2517 - protein, 5 aa, Artificial Sequence
  Synthetic
LDNDA

SEQ ID NO: 2518 - protein, 9 aa, Artificial Sequence
  Synthetic
TIFMDSDLG

SEQ ID NO: 2519 - protein, 120 aa, Artificial Sequence
  Synthetic
EVQLVESGGGLVQAGDSLRLSCAASGAIVHVFAMGWFRQAPGKEREFVASINLDNDATNYADSVKGRFTISCDDARNTVYLQMNSLKPEDTAVYYCNATIFMDSDLGDYWGQGTQVTVSS

SEQ ID NO: 2520 - DNA, 413 bp, Artificial Sequence
  Synthetic
agatataccatggaagttcaactggttgaatctggtggcggtttagttcaagccggtgatagccttcgtctgagctgcgccgcaagcggagccattgtgcatgtgttcgctatgggttggtttcgccaggcacctggtaaagaacgtgaatttgtggcatccattaaccttgacaacgacgctaccaactatgccgattctgttaaaggtcgcttcactatttcatgcgatgatgcgcgtaataccgtgtacttacagatgaactcactgaaacctgaggataccgccgtttattattgtaatgcaaccatctttatggattccgatttgggtgactattggggtcagggcacacaagtcacggtctcaagcggcggaagctctggtgaacagaaactgatttcagaagccaa

SEQ ID NO: 2521 - protein, 7 aa, Artificial Sequence
  Synthetic
AIVHVFA

SEQ ID NO: 2522 - protein, 5 aa, Artificial Sequence
  Synthetic
LDNDA

SEQ ID NO: 2523 - protein, 9 aa, Artificial Sequence
  Synthetic
PFWINSSVV

SEQ ID NO: 2524 - protein, 120 aa, Artificial Sequence
  Synthetic
EVQLVESGGGLVQAGDSLRLSCAASGAIVHVFAMGWFRQAPGKEREFVASINLDNDATNYADSVKGRFTISREDARNTVYLQMNSLKPEDTAVYYCNAPFWINSSVVDYWGQGTQVTVSS

SEQ ID NO: 2525 - DNA, 416 bp, Artificial Sequence
  Synthetic
aggagatataccatggaagttcaactggttgaatctggtggcggtttagttcaagccggtgatagccttcgtctgagctgcgccgcaagcggagccattgtgcatgtgttcgctatgggttggtttcgccaggcacctggtaaagaacgtgaatttgtggcatccattaaccttgacaacgacgctaccaactatgccgattctgttaaaggtcgcttcactatttcacgcgaggatgcgcgtaataccgtgtacttacagatgaactcactgaaacctgaggataccgccgtttattattgtaatgcacccttctggatcaatagttctgttgtggactattggggtcagggcacacaagtcacggtctcaagcggcggaagctctggtgaacagaaactgatttcagaagccaa

SEQ ID NO: 2526 - protein, 7 aa, Artificial Sequence
  Synthetic
AIVHVFA

SEQ ID NO: 2527 - protein, 5 aa, Artificial Sequence
  Synthetic
LDNDA

SEQ ID NO: 2528 - protein, 9 aa, Artificial Sequence
  Synthetic
TIFMDSDLG

SEQ ID NO: 2529 - protein, 120 aa, Artificial Sequence
  Synthetic
EVQLVESGGGLVQAGDSLRLSCAASGAIVHVFAMGWFRQAPGKEREFVASINLDNDATNYADSVKGRFTISRDDARNTVYLQLNSLKPEDTAVYYCNATIFMDSDLGDYWGQGTQVTVSS

SEQ ID NO: 2530 - DNA, 416 bp, Artificial Sequence
  Synthetic
aggagatataccatggaagttcaactggttgaatctggtggcggtttagttcaagccggtgatagccttcgtctgagctgcgccgcaagcggagccattgtgcatgtgttcgctatgggttggtttcgccaggcacctggtaaagaacgtgaatttgtggcatccattaaccttgacaacgacgctaccaactatgccgattctgttaaaggtcgcttcactatttcacgcgatgatgcgcgtaataccgtgtacttacagttgaactcactgaaacctgaggataccgccgtttattattgtaatgcaaccatctttatggattccgatttgggtgactattggggtcagggcacacaagtcacggtctcaagcggcggaagctctggtgaacagaaactgatttcagaagccaa

SEQ ID NO: 2531 - protein, 7 aa, Artificial Sequence
  Synthetic
AIVHVFA

SEQ ID NO: 2532 - protein, 5 aa, Artificial Sequence
  Synthetic
LDNDA

SEQ ID NO: 2533 - protein, 9 aa, Artificial Sequence
  Synthetic
TIFMDSHLG

SEQ ID NO: 2534 - protein, 120 aa, Artificial Sequence
  Synthetic
EVQLVESGGGLVQAGDSLRLSCAASGAIVHVFAMGWFRQAPGKEREFVASINLDNDATNYADSVKGRFTISRDDARNTVYLQMNSLKPEDTAVYYCNATIFMDSHLGDYWGQGTQVTVSS

SEQ ID NO: 2535 - DNA, 407 bp, Artificial Sequence
  Synthetic
accatggaagttcaactggttgaatctggtggcggtttagttcaagccggtgatagccttcgtctgagctgcgccgcaagcggagccattgtgcatgtgttcgctatgggttggtttcgccaggcacctggtaaagaacgtgaatttgtggcatccattaaccttgacaacgacgctaccaactatgccgattctgttaaaggtcgcttcactatttcacgcgatgatgcgcgtaataccgtgtacttacagatgaactcactgaaacctgaggataccgccgtttattattgtaatgcaaccatctttatggattcccatttgggtgactattggggtcagggcacacaagtcacggtctcaagcggcggaagctctggtgaacagaaactgatttcagaagccaa

SEQ ID NO: 2536 - protein, 7 aa, Artificial Sequence
  Synthetic
AIVHVFA

SEQ ID NO: 2537 - protein, 5 aa, Artificial Sequence
  Synthetic
LDNDA

SEQ ID NO: 2538 - protein, 9 aa, Artificial Sequence
  Synthetic
TIFMDSDLG

SEQ ID NO: 2539 - protein, 120 aa, Artificial Sequence
  Synthetic
EVQLVESGGGLVQAGDSLRLSCAASGAIVHVFAMGWFRQAPGKEREFVASINLDNDATNYADSVKGRFTISRDDARNTVYLQMNSLKPEDTAVYYCNATIFMDSDLGDYWGQGTQGTVSS

SEQ ID NO: 2540 - DNA, 409 bp, Artificial Sequence
  Synthetic
ataccatggaagttcaactggttgaatctggtggcggtttagttcaagccggtgatagccttcgtctgagctgcgccgcaagcggagccattgtgcatgtgttcgctatgggttggtttcgccaggcacctggtaaagaacgtgaatttgtggcatccattaaccttgacaacgacgctaccaactatgccgattctgttaaaggtcgcttcactatttcacgcgatgatgcgcgtaataccgtgtacttacagatgaactcactgaaacctgaggataccgccgtttattattgtaatgcaaccatctttatggattccgatttgggtgactattggggtcagggcacacaaggcacggtctcaagcggcggaagctctggtgaacagaaactgatttcagaagccaa

SEQ ID NO: 2541 - protein, 7 aa, Artificial Sequence
  Synthetic
AIVHVFA

SEQ ID NO: 2542 - protein, 5 aa, Artificial Sequence
  Synthetic
LDNDA

SEQ ID NO: 2543 - protein, 9 aa, Artificial Sequence
  Synthetic
PFWINSSVV

SEQ ID NO: 2544 - protein, 120 aa, Artificial Sequence
  Synthetic
EVQLVESGGGLVQVGDSLRLSCAASGAIVHVFAMGWFRQAPGKEREFVASINLDNDATNYADSVKGRFTISRDDAHNTVYLQMNSLKPEDTAVYYCNAPFWINSSVVDYWGQGTQVTVSS

SEQ ID NO: 2545 - DNA, 407 bp, Artificial Sequence
  Synthetic
accatggaagttcaactggttgaatctggtggcggtttagttcaagtcggtgatagccttcgtctgagctgcgccgcaagcggagccattgtgcatgtgttcgctatgggttggtttcgccaggcacctggtaaagaacgtgaatttgtggcatccattaaccttgacaacgacgctaccaactatgccgattctgttaaaggtcgcttcactatttcacgtgatgatgcgcataataccgtgtacttacagatgaactcactgaaacctgaggataccgccgtttattattgtaatgcacccttctggatcaatagttctgttgtggactattggggtcagggcacacaagtcacggtctcaagcggcggaagctctggtgaacagaaactgatttcagaagccaa

SEQ ID NO: 2546 - protein, 7 aa, Artificial Sequence
  Synthetic
AIVHVFA

SEQ ID NO: 2547 - protein, 5 aa, Artificial Sequence
  Synthetic
LDNDA

SEQ ID NO: 2548 - protein, 9 aa, Artificial Sequence
  Synthetic
TIFMDSDLG

SEQ ID NO: 2549 - protein, 120 aa, Artificial Sequence
  Synthetic
EVQLVESGGGLVQAGDSLRLSCAASGAIVHVFAMGWFRQAPGKEREFVASINLDNDATNYADSVKGRFTISRDDARNTVYLQMNSLKPEDTAVHYCNATIFMDSDLGDYWGQGTQVTVSS

SEQ ID NO: 2550 - DNA, 409 bp, Artificial Sequence
  Synthetic
ataccatggaagttcaactggttgaatctggtggcggtttagttcaagccggtgatagccttcgtctgagctgcgccgcaagcggagccattgtgcatgtgttcgctatgggttggtttcgccaggcacctggtaaagaacgtgaatttgtggcatccattaaccttgacaacgacgctaccaactatgccgattctgttaaaggtcgcttcactatttcacgcgatgatgcgcgtaataccgtgtacttacagatgaactcactgaaacctgaggataccgccgttcattattgtaatgcaaccatctttatggattccgatttgggtgactattggggtcagggcacacaagtcacggtctcaagcggcggaagctctggtgaacagaaactgatttcagaagccaa

SEQ ID NO: 2551 - protein, 7 aa, Artificial Sequence
  Synthetic
AIVHVFA

SEQ ID NO: 2552 - protein, 5 aa, Artificial Sequence
  Synthetic
LDNDA

SEQ ID NO: 2553 - protein, 9 aa, Artificial Sequence
  Synthetic
TIFMDSDLG

SEQ ID NO: 2554 - protein, 120 aa, Artificial Sequence
  Synthetic
EVQLVESGGGLVQAGDSLRLSCAASGAIVHVFAMGWFRQAPGKEREFVASINLDNDATNYVDSVKGRFTISRDDARNTVYLQMNSLKPEDTAVYYCNATIFMDSDLGDYWGQGTQVTVSS

SEQ ID NO: 2555 - DNA, 417 bp, Artificial Sequence
  Synthetic
aaggagatataccatggaagttcaactggttgaatctggtggcggtttagttcaagccggtgatagccttcgtctgagctgcgccgcaagcggagccattgtgcatgtgttcgctatgggttggtttcgccaggcacctggtaaagaacgtgaatttgtggcatccattaaccttgacaacgacgctaccaactatgtcgattctgttaaaggtcgcttcactatttcacgcgatgatgcgcgtaataccgtgtacttacagatgaactcactgaaacctgaggataccgccgtttattattgtaatgcaaccatctttatggattccgatttgggtgactattggggtcagggcacacaagtcacggtctcaagcggcggaagctctggtgaacagaaactgatttcagaagccaa

SEQ ID NO: 2556 - protein, 7 aa, Artificial Sequence
  Synthetic
AIVHVFA

SEQ ID NO: 2557 - protein, 5 aa, Artificial Sequence
  Synthetic
LDNDA

SEQ ID NO: 2558 - protein, 9 aa, Artificial Sequence
  Synthetic
PFWINSSVV

SEQ ID NO: 2559 - protein, 120 aa, Artificial Sequence
  Synthetic
EVQLVESGGGLVQAGDSLRLSCAASGAIVHVFAMAWFRQAPGKEREFVASINLDNDATNYADSVKGRFTISRDDAHNTVYLQMNSLKPEDTAVYYCNAPFWINSSVVDYWGQGTQVTVSS

SEQ ID NO: 2560 - DNA, 411 bp, Artificial Sequence
  Synthetic
atataccatggaagttcaactggttgaatctggtggcggtttagttcaagccggtgatagccttcgtctgagctgcgccgcaagcggagccattgtgcatgtgttcgctatggcttggtttcgccaggcacctggtaaagaacgtgaatttgtggcatccattaaccttgacaacgacgctaccaactatgccgattctgttaaaggtcgcttcactatttcacgcgatgatgcgcataataccgtgtacttacagatgaactcactgaaacctgaggataccgccgtttattattgtaatgcacccttctggatcaatagttctgttgtggactattggggtcagggcacacaagtcacagtctcaagcggcggaagctctggtgaacagaaactgatttcagaagccaa

SEQ ID NO: 2561 - protein, 7 aa, Artificial Sequence
  Synthetic
AIVHVFA

SEQ ID NO: 2562 - protein, 5 aa, Artificial Sequence
  Synthetic
LDNDA

SEQ ID NO: 2563 - protein, 9 aa, Artificial Sequence
  Synthetic
PFWINSSVV

SEQ ID NO: 2564 - protein, 120 aa, Artificial Sequence
  Synthetic
EVQLVESGGGLVQAGGSLRLSCAASGAIVHVFAMGWFRQAPGKEREFVASINLDNDATNYADSVKGRFTISRDDAHNTVYLQMNSLKPEDTAVYYCNAPFWINSSVVDYWGQGTQVTVSS

SEQ ID NO: 2565 - DNA, 418 bp, Artificial Sequence
  Synthetic
gaaggagatataccatggaagttcaactggttgaatctggtggcggtttagttcaagccggtggtagccttcgtctgagctgcgccgcaagcggagccattgtgcatgtgttcgctatgggttggtttcgccaggcacctggtaaagaacgtgaatttgtggcatccattaaccttgacaacgacgctaccaactatgccgattctgttaaaggtcgcttcactatttcacgcgatgatgcgcataataccgtgtacttacagatgaactcactgaaacctgaggataccgccgtttattattgtaatgcacccttctggatcaatagttctgttgtggactattggggtcagggcacacaagtcacggtctcaagcggcggaagctctggtgaacagaaactgatttcagaagccaa

SEQ ID NO: 2566 - protein, 7 aa, Artificial Sequence
  Synthetic
AIVHVFA

SEQ ID NO: 2567 - protein, 5 aa, Artificial Sequence
  Synthetic
LDNDA

SEQ ID NO: 2568 - protein, 9 aa, Artificial Sequence
  Synthetic
TIFMDSDLG

SEQ ID NO: 2569 - protein, 120 aa, Artificial Sequence
  Synthetic
EVQLVESGGGLVQAGDRLRLSCAASGAIVHVFAMGWFRQAPGKEREFVASINLDNDATNYADSVKGRFTISRDDARNTVYLQMNSLKPEDTAVYYCNATIFMDSDLGDYWGQGTQVTVSS

SEQ ID NO: 2570 - DNA, 418 bp, Artificial Sequence
  Synthetic
gaaggagatataccatggaagttcaactggttgaatctggtggcggtttagttcaagccggtgatcgccttcgtctgagctgcgccgcaagcggagccattgtgcatgtgttcgctatgggttggtttcgccaggcacctggtaaagaacgtgaatttgtggcatccattaaccttgacaacgacgctaccaactatgccgattctgttaaaggtcgcttcactatttcacgcgatgatgcgcgtaataccgtgtacttacagatgaactcactgaaacctgaggataccgccgtttattattgtaatgcaaccatctttatggattccgatttgggtgactattggggtcagggcacacaagtcacggtctcaagcggcggaagctctggtgaacagaaactgatttcagaagccaa

SEQ ID NO: 2571 - protein, 7 aa, Artificial Sequence
  Synthetic
PIVHVFA

SEQ ID NO: 2572 - protein, 5 aa, Artificial Sequence
  Synthetic
LDNDA

SEQ ID NO: 2573 - protein, 9 aa, Artificial Sequence
  Synthetic
TIFMDSDLG

SEQ ID NO: 2574 - protein, 120 aa, Artificial Sequence
  Synthetic
EVQLVESGGGLVQAGDSLRLSCAASGPIVHVFAMGWFRQAPGKEREFVASINLDNDATNYADSVKGRFTISRDDARNTVYLQMNSLKPEDTAVYYCNATIFMDSDLGDYWGQGTQVTVSS

SEQ ID NO: 2575 - DNA, 418 bp, Artificial Sequence
  Synthetic
gaatgcgatataccatggaagttcaactggttgaatctggtggcggtttagttcaagccggtgatagccttcgtctgagctgcgccgcaagcggacccattgtgcatgtgttcgctatgggttggtttcgccaggcacctggtaaagaacgtgaatttgtggcatccattaaccttgacaacgacgctaccaactatgccgattctgttaaaggtcgcttcactatttcacgcgatgatgcgcgtaataccgtgtacttacagatgaactcactgaaacctgaggataccgccgtttattattgtaatgcaaccatctttatggattccgatttgggtgactattggggtcagggcacacaagtcacggtctcaagcggcggaagctctggtgaacagaaactgatttcagaagccaa

SEQ ID NO: 2576 - protein, 7 aa, Artificial Sequence
  Synthetic
AIVHVFA

SEQ ID NO: 2577 - protein, 5 aa, Artificial Sequence
  Synthetic
LDNDA

SEQ ID NO: 2578 - protein, 9 aa, Artificial Sequence
  Synthetic
TIFMDSDLG

SEQ ID NO: 2579 - protein, 120 aa, Artificial Sequence
  Synthetic
EVQLVESGGGLVQAGDSLRLSCATSGAIVHVFAMGWFRQAPGKEREFVASINLDNDATNYADSVKGRFTISRDDARNTVYLQMNSLKPEDTAVYYCNATIFMDSDLGDYWGQGTQVTVSS

SEQ ID NO: 2580 - DNA, 407 bp, Artificial Sequence
  Synthetic
accatggaagttcaactggttgaatctggtggtggtttagttcaagccggtgatagccttcgtctgagctgcgccacaagcggagccattgtgcatgtgttcgctatgggttggtttcgccaggcacctggtaaagaacgtgaatttgtggcatccattaaccttgacaacgacgctaccaactatgccgattctgttaaaggtcgcttcactatttcacgcgatgatgcgcgtaataccgtgtacttacagatgaactcactgaaacctgaggataccgccgtttattattgtaatgcaaccatctttatggattccgatttgggtgactattggggtcagggcacacaagtcacggtctcaagcggcggaagctctggtgaacagaaactgatttcagaagccaa

SEQ ID NO: 2581 - protein, 7 aa, Artificial Sequence
  Synthetic
AIVHVFA

SEQ ID NO: 2582 - protein, 5 aa, Artificial Sequence
  Synthetic
LDNDA

SEQ ID NO: 2583 - protein, 10 aa, Artificial Sequence
  Synthetic
TLYHTIREAR

SEQ ID NO: 2584 - protein, 121 aa, Artificial Sequence
  Synthetic
EVQLVESGGGLVQAGDSLRLSCAASGAIVHVFAMGWFRQAPGKEREFVASINLDNDATNYADSVKGRFTISRDDARNTVYLQMNSLKPEDTAVYYCATTLYHTIREARDYWGQGTQVTVSS

SEQ ID NO: 2585 - DNA, 419 bp, Artificial Sequence
  Synthetic
aggagatataccatggaagttcaactggttgaatctggtggcggtttagttcaagccggtgatagccttcgtctgagctgcgccgcaagcggagccattgtgcatgtgttcgctatgggttggtttcgccaggcacctggtaaagaacgtgaatttgtggcatccattaaccttgacaacgacgctaccaactatgccgattctgttaaaggtcgcttcactatttcacgcgatgatgcgcgtaataccgtgtacttacagatgaactcactgaaacctgaggataccgccgtttattattgtgcgacaactctgtaccatacgattcgggaggcccgcgactattggggtcagggcacacaagtcacggtctcaagcggcggaagctctggtgaacagaaactgatttcagaagccaa

SEQ ID NO: 2586 - protein, 7 aa, Artificial Sequence
  Synthetic
AIVHVFA

SEQ ID NO: 2587 - protein, 5 aa, Artificial Sequence
  Synthetic
LDNDA

SEQ ID NO: 2588 - protein, 10 aa, Artificial Sequence
  Synthetic
PAYHLASMVT

SEQ ID NO: 2589 - protein, 121 aa, Artificial Sequence
  Synthetic
EVQLFESGGGLVQAGDSLRLSCAASGAIVHVFAMGWFRQAPGKEREFVASINLDNDATNYADSVKGRFTISRDDARNTVYLQMNSLKPEDTAVYYCAAPAYHLASMVTDYWGQGTQVTVSS

SEQ ID NO: 2590 - DNA, 414 bp, Artificial Sequence
  Synthetic
atataccatggaagttcaactgtttgaatctggtggcggtttagttcaagccggtgatagccttcgtctgagctgcgccgcaagcggagccattgtgcatgtgttcgctatgggttggtttcgccaggcacctggtaaagaacgtgaatttgtggcatccattaaccttgacaacgacgctaccaactatgccgattctgttaaaggtcgcttcactatttcacgcgatgatgcgcgtaataccgtgtacttacagatgaactcactgaaacctgaggataccgccgtttattattgtgcggcacctgcctaccatctcgcctctatggttaccgactattggggtcagggcacacaagtcacggtctcaagcggcggaagctctggtgaacagaaactgatttcagaagccaa

SEQ ID NO: 2591 - protein, 7 aa, Artificial Sequence
  Synthetic
AIVNVFA

SEQ ID NO: 2592 - protein, 5 aa, Artificial Sequence
  Synthetic
LDNDA

SEQ ID NO: 2593 - protein, 9 aa, Artificial Sequence
  Synthetic
TIFMDSDLG

SEQ ID NO: 2594 - protein, 120 aa, Artificial Sequence
  Synthetic
EVQLVESGGGLVQAGDSLRLSCAASGAIVNVFAMGWFRQAPGKEREFVASINLDNDATNYADSVKGRFTISRDDARNTVYLQMNSLKPEDTAVYYCNATIFMDSDLGDYWGQGTQVTVSS

SEQ ID NO: 2595 - DNA, 411 bp, Artificial Sequence
  Synthetic
atataccatggaagttcaactggttgaatctggtggcggtttagttcaagccggtgatagccttcgtctgagctgcgccgcaagcggagccattgtgaatgtgttcgctatgggttggtttcgccaggcacctggtaaagaacgtgaatttgtggcatccattaaccttgacaacgacgctaccaactatgccgattctgttaaaggtcgcttcactatttcacgcgatgatgcgcgtaataccgtgtacttacagatgaactcactgaaacctgaggataccgccgtttattattgtaatgcaaccatctttatggattccgatttgggtgactattggggtcagggcacacaagtcacggtctcaagcggcggaagctctggtgaacagaaactgatttcagaagccaa

SEQ ID NO: 2596 - protein, 7 aa, Artificial Sequence
  Synthetic
AIVHVFA

SEQ ID NO: 2597 - protein, 5 aa, Artificial Sequence
  Synthetic
LDNDA

SEQ ID NO: 2598 - protein, 10 aa, Artificial Sequence
  Synthetic
TAISPISIVD

SEQ ID NO: 2599 - protein, 121 aa, Artificial Sequence
  Synthetic
EVQLVESGGGLVQAGDSLRLSCAASGAIVHVFAMGWFRQAPGKEREFVASINLDNDATNYADSIKGRFTISRDDARNTVYLQMNSLKPEDTAVYYCAATAISPISIVDEYWGQGTQVTVSS

SEQ ID NO: 2600 - DNA, 416 bp, Artificial Sequence
  Synthetic
agatataccatggaagttcaactggttgaatctggtggcggtttagttcaagccggggatagccttcgtctgagctgcgccgcaagcggagccattgtgcatgtgttcgctatgggttggtttcgccaggcacctggtaaagaacgtgaatttgtggcatccattaaccttgacaacgacgctaccaactatgccgattctattaaaggtcgcttcactatttcacgcgatgatgcgcgtaataccgtgtacttacagatgaactcactgaaacctgaggataccgccgtttattattgtgcggcaacggctattagccctatctctattgtggatgagtattggggtcagggcacacaagtcacggtctcaagcggcggaagctctggtgaacagaaactgatttcagaagccaa

SEQ ID NO: 2601 - protein, 7 aa, Artificial Sequence
  Synthetic
AIVHVFA

SEQ ID NO: 2602 - protein, 5 aa, Artificial Sequence
  Synthetic
LDNDA

SEQ ID NO: 2603 - protein, 9 aa, Artificial Sequence
  Synthetic
TIFMDSDLG

SEQ ID NO: 2604 - protein, 120 aa, Artificial Sequence
  Synthetic
EVQLVESGGGLVQVGDSLRLSCAASGAIVHVFAMGWFRQAPGKEREFVASINLDNDATNYADSVKGRFTISRDDARNTVYLQMNSLKPEDTAVYYCNATIFMDSDLGDYWGQGTQVTVSS

SEQ ID NO: 2605 - DNA, 407 bp, Artificial Sequence
  Synthetic
accatggaagttcaactggttgaatctggtggcggtttagttcaagtcggtgatagccttcgtctgagctgcgccgcaagcggagccattgtgcatgtgttcgctatgggttggtttcgccaggcacctggtaaagaacgtgaatttgtggcatccattaaccttgacaacgacgctaccaactatgccgattctgttaaaggtcgcttcactatttcacgcgatgatgcgcgtaataccgtgtacttacagatgaactcactgaaacctgaggataccgccgtttattattgtaatgcaaccatctttatggattccgatttgggtgactattggggtcagggcacacaagtcacggtctcaagcggcggaagctctggtgaacagaaactgatttcagaagccaa

SEQ ID NO: 2606 - protein, 7 aa, Artificial Sequence
  Synthetic
AIVHVFA

SEQ ID NO: 2607 - protein, 5 aa, Artificial Sequence
  Synthetic
LDNDA

SEQ ID NO: 2608 - protein, 9 aa, Artificial Sequence
  Synthetic
PFWINSSVV

SEQ ID NO: 2609 - protein, 120 aa, Artificial Sequence
  Synthetic
EVQLVESGGGLVQAGDSLRLSCAASGAIVHVFAMGWFRQAPGKEREFVASINLDNDASNYADSVKGRFTISRDDARNTVYLQMNSLKPEDTAVYYCNAPFWINSSVVDYWGQGTQVTVSS

SEQ ID NO: 2610 - DNA, 409 bp, Artificial Sequence
  Synthetic
ataccatggaagttcaactggttgaatctggtggcggtttagttcaagccggtgatagccttcgtctgagctgcgccgcaagcggagccattgtgcatgtgttcgctatgggttggtttcgccaggcacctggtaaagaacgtgaatttgtggcatccattaaccttgacaacgacgcttccaactatgccgattctgttaaaggtcgcttcactatttcacgcgatgatgcgcgtaataccgtgtacttacagatgaactcactgaaacctgaggataccgccgtttattattgtaatgcacccttctggatcaatagttctgttgtggactattggggtcagggcacacaagtcacggtctcaagcggcggaagctctggtgaacagaaactgatttcagaagccaa

SEQ ID NO: 2611 - protein, 7 aa, Artificial Sequence
  Synthetic
AIVHVFA

SEQ ID NO: 2612 - protein, 5 aa, Artificial Sequence
  Synthetic
LDNDA

SEQ ID NO: 2613 - protein, 9 aa, Artificial Sequence
  Synthetic
TIFIDSDLG

SEQ ID NO: 2614 - protein, 120 aa, Artificial Sequence
  Synthetic
EVQLVESGGGLVQGGDSLRLSCAASGAIVHVFAMGWFRQAPGKEREFVASINLDNDATNYADSVKGRFTISRDDARNTVYLQMNSLKPEDTAVYYCNATIFIDSDLGDYWGQGTQVTVSS

SEQ ID NO: 2615 - DNA, 411 bp, Artificial Sequence
  Synthetic
atataccatggaagttcaactggttgaatctggtggcggtttagttcaaggcggtgatagccttcgtctgagctgcgccgcaagcggagccattgtgcatgtgttcgctatgggttggtttcgccaggcacctggtaaagaacgtgaatttgtggcatccattaaccttgacaacgacgctaccaactatgccgattctgttaaaggtcgcttcactatttcacgcgatgatgcacgtaataccgtgtacttacagatgaactcactgaaacctgaggataccgccgtttattattgtaatgcaaccatctttatagattccgatttgggtgactattggggtcagggcacacaagtcacggtctcaagcggcggaagctctggtgaacagaaactgatttcagaagccaa

SEQ ID NO: 2616 - protein, 7 aa, Artificial Sequence
  Synthetic
AIVHVFA

SEQ ID NO: 2617 - protein, 5 aa, Artificial Sequence
  Synthetic
LDNDA

SEQ ID NO: 2618 - protein, 9 aa, Artificial Sequence
  Synthetic
PFWINSSVV

SEQ ID NO: 2619 - protein, 120 aa, Artificial Sequence
  Synthetic
EVQLVESGGGLVHAGDRLRLSCAASGAIVHVFAMGWFRQAPGKEREFVASINLDNDATNYADSVKGRFTISRDDAHNTVYLQMNSLKPEDTAVYYCNAPFWINSSVVDYWGQGTQVTVSS

SEQ ID NO: 2620 - DNA, 418 bp, Artificial Sequence
  Synthetic
gaaggagatataccatggaagttcaactggttgaatctggtggcggtttagttcacgccggtgatcgccttcgtctgagctgcgccgcaagcggagccattgtgcatgtgttcgctatgggttggtttcgccaggcacccggtaaagaacgtgaatttgtggcatccattaaccttgacaacgacgctaccaactatgccgattctgttaaaggtcgcttcactatttcacgcgatgatgcgcataataccgtgtacttacagatgaactcactgaaacctgaggataccgccgtttattattgtaatgcacccttctggatcaatagttctgttgtggactattggggtcagggcacacaagtcacggtctcaagcggcggaagctctggtgaacagaaactgatttcagaagccaa

SEQ ID NO: 2621 - protein, 7 aa, Artificial Sequence
  Synthetic
AIVHVFA

SEQ ID NO: 2622 - protein, 5 aa, Artificial Sequence
  Synthetic
LDNDA

SEQ ID NO: 2623 - protein, 9 aa, Artificial Sequence
  Synthetic
TIFMDSDLG

SEQ ID NO: 2624 - protein, 120 aa, Artificial Sequence
  Synthetic
EVQLVESGGGLIQAGDSLRLSCAASGAIVHVFAMGWFRQAPGKEREFVASINLDNDATNYADSVKGRFTISRDDARNTVYLQMNSLKPEDTAVYYCNATIFMDSDLGDYWGQGTQVTVSS

SEQ ID NO: 2625 - DNA, 418 bp, Artificial Sequence
  Synthetic
gaaggagatataccatggaagttcaactggttgaatctggtggcggtttaattcaagccggtgatagcctacgtctgagctgcgccgcaagcggagccattgtgcatgtgttcgctatgggttggtttcgccaggcacctggtaaagaacgtgaatttgtggcatccattaaccttgacaacgacgctaccaactatgccgattctgttaaaggtcgcttcactatttcacgcgatgatgcgcgtaataccgtgtacttacagatgaactcactgaaacctgaggataccgccgtttattattgtaatgcaaccatctttatggattccgatttgggtgactattggggtcagggcacacaagtcacggtctcaagcggcggaagctctggtgaacagaaactgatttcagaagccaa

SEQ ID NO: 2626 - protein, 7 aa, Artificial Sequence
  Synthetic
AIVHVFA

SEQ ID NO: 2627 - protein, 5 aa, Artificial Sequence
  Synthetic
LDNDA

SEQ ID NO: 2628 - protein, 9 aa, Artificial Sequence
  Synthetic
FCYVPLATC

SEQ ID NO: 2629 - protein, 120 aa, Artificial Sequence
  Synthetic
EVQLVESGGGLVQAGDSLRLSCAASGAIVHVFAMGWFRQAPGKEREFVASINLDNDATNYVDSVKGRFTISRDDARNTVYLQMNSLKPEDTAVYYCNAFCYVPLATCDYLGQGTQVTVSS

SEQ ID NO: 2630 - DNA, 413 bp, Artificial Sequence
  Synthetic
agatataccatggaagttcaactggttgaatctggtggcggtttagttcaagccggtgatagccttcgtctgagctgcgccgcaagcggagccattgtgcatgtgttcgctatgggttggtttcgccaggcacctggtaaagaacgtgaatttgtggcatccattaaccttgacaacgacgctaccaactatgtcgattctgttaaaggtcgcttcactatttcacgcgatgatgcgcgtaataccgtgtacttacagatgaactcactgaaacctgaggataccgccgtttattactgtaatgcattctgctacgtccctttggccacgtgtgactatttgggtcagggcacacaagtcacggtctcaagcggcggaagctctggtgaaaagaaactgatttcagaagccaa

SEQ ID NO: 2631 - protein, 7 aa, Artificial Sequence
  Synthetic
AIVHVFA

SEQ ID NO: 2632 - protein, 5 aa, Artificial Sequence
  Synthetic
LDNDA

SEQ ID NO: 2633 - protein, 9 aa, Artificial Sequence
  Synthetic
PFWINSSVV

SEQ ID NO: 2634 - protein, 120 aa, Artificial Sequence
  Synthetic
EVRLVESGGGLVQAGDSLRLSCAASGAIVHVFAMGWFRQAPGKEREFVASINLDNDATNYADSVKGRFTISRDDAHNTVYLQMNSLKPEDTAVYYCNAPFWINSSVVDYWGQGTQVTVSS

SEQ ID NO: 2635 - DNA, 413 bp, Artificial Sequence
  Synthetic
agatataccatggaagttcgactggttgaatctggtggcggtttagttcaagccggtgatagccttcgtctgagctgcgccgcaagcggagccattgtgcatgtgttcgctatgggttggtttcgccaggcacctggtaaagaacgtgaatttgtggcatccattaaccttgacaacgacgctaccaactatgccgattctgttaaaggtcgcttcactatttcacgcgatgatgcgcataataccgtgtacttacagatgaactcactgaaacctgaggataccgccgtttattattgtaatgcacccttctggatcaatagttctgttgtggactattggggtcagggcacacaagtcacggtctcaagcggcggaagctctggtgaacagaaactgatttcagaagccaa

SEQ ID NO: 2636 - protein, 7 aa, Artificial Sequence
  Synthetic
AIVHVFA

SEQ ID NO: 2637 - protein, 5 aa, Artificial Sequence
  Synthetic
LDNDA

SEQ ID NO: 2638 - protein, 9 aa, Artificial Sequence
  Synthetic
TIFMDSDLG

SEQ ID NO: 2639 - protein, 120 aa, Artificial Sequence
  Synthetic
EVKLVESGGGLVKAGDSLRLSCAASGAIVHVFAMGWFRQAPGKEREFVASINLDNDATNYADSVKGRFTISRDDARNTVYLQMNSLKPEDTAVYYCNATIFMDSDLGDYWGQGTQVTVSS

SEQ ID NO: 2640 - DNA, 416 bp, Artificial Sequence
  Synthetic
aggagatataccatggaagttaaactggttgaatctggtggcggtttagttaaagccggtgatagccttcgtctgagctgcgccgcaagcggagccattgtgcatgtgttcgctatgggttggtttcgccaggcacctggtaaagaacgtgaatttgtggcatccattaaccttgacaacgacgctaccaactatgccgattctgttaaaggtcgcttcactatttcacgcgatgatgcgcgtaataccgtgtacttacagatgaactcactgaaacctgaggataccgccgtttattattgtaatgcaaccatctttatggattccgatttgggtgactattggggtcagggcacacaagtcacggtctcaagcggcggaagctctggtgaacagaaactgatttcagaagccaa

SEQ ID NO: 2641 - protein, 7 aa, Artificial Sequence
  Synthetic
AIVHVFA

SEQ ID NO: 2642 - protein, 5 aa, Artificial Sequence
  Synthetic
LDNDA

SEQ ID NO: 2643 - protein, 9 aa, Artificial Sequence
  Synthetic
FCYVPLATC

SEQ ID NO: 2644 - protein, 120 aa, Artificial Sequence
  Synthetic
EVQLVESGGGLVQAGDSLRLSCAASGAIVHVFAMGWFRQAPGKEREFVASINLDNDATNYADSVKGRFTISRDDARNTVYLQMNSLKPEDTAVYYCNAFCYVPLATCDYRGQGTQVTVSS

SEQ ID NO: 2645 - DNA, 407 bp, Artificial Sequence
  Synthetic
accatggaagttcaactggttgaatctggtggcggtttagttcaagccggtgatagccttcgtctgagctgtgccgcaagcggagccattgtgcatgtgttcgctatgggttggtttcgccaggcacctggtaaagaacgtgaatttgtggcatccattaaccttgacaacgacgctaccaactatgccgattctgttaaaggtcgcttcactatttcacgcgatgatgcgcgtaataccgtgtacttacagatgaactcactgaaacctgaggataccgccgtttattattgtaatgcattctgctacgtccctttggccacgtgtgactataggggtcagggcacacaagtcacggtctcaagcggcggaagctctggtgaacagaaactgatttcagaagccaa

SEQ ID NO: 2646 - protein, 7 aa, Artificial Sequence
  Synthetic
AIVHVFA

SEQ ID NO: 2647 - protein, 5 aa, Artificial Sequence
  Synthetic
LDNDA

SEQ ID NO: 2648 - protein, 9 aa, Artificial Sequence
  Synthetic
FCYVPLATC

SEQ ID NO: 2649 - protein, 120 aa, Artificial Sequence
  Synthetic
QVQLVESGGGLVQAGDSLRLSCAASGAIVHVFAMGWFRQAPGKEREFVASINLDNDATNYADSVKGRFTISRDDARNTVYLQMNSLKPEDTAVYYCNAFCYVPLATCDYWGQGTQVTVSS

SEQ ID NO: 2650 - DNA, 411 bp, Artificial Sequence
  Synthetic
atataccatgcaggttcaactggttgaatctggtggcggtttagttcaagccggtgatagccttcgtctgagctgcgccgcaagcggagccattgtgcatgtgttcgctatgggttggtttcgccaggcacctggtaaagaacgtgaatttgtggcatccattaaccttgacaacgacgctaccaactatgccgattctgttaaaggtcgcttcactatttcacgcgatgatgcgcgtaataccgtgtacttacagatgaactcactgaaacctgaggataccgccgtttattattgtaatgcattctgctacgtccctttggccacgtgtgactattggggtcagggcacacaagtcacggtctcaagcggcggaagctctggtgaacagaaactgatttcagaagccaa

SEQ ID NO: 2651 - protein, 7 aa, Artificial Sequence
  Synthetic
AIVHVFA

SEQ ID NO: 2652 - protein, 5 aa, Artificial Sequence
  Synthetic
LDNDA

SEQ ID NO: 2653 - protein, 9 aa, Artificial Sequence
  Synthetic
TIFMDSDLG

SEQ ID NO: 2654 - protein, 120 aa, Artificial Sequence
  Synthetic
EVQLVESGGGLVQAGDSLRLSCAASGAIVHVFAMGCFRQAPGKEREFVASINLDNDATNYADSVKGRFTISRDDARNTVYLQMNSLKPEDTAVYYCNATIFMDSDLGDYWVQGTQVTVSS

SEQ ID NO: 2655 - DNA, 407 bp, Artificial Sequence
  Synthetic
accatggaagttcaactggttgaatctggtggcggtttagttcaagccggtgatagccttcgtctgagctgcgccgcaagcggagccattgtgcatgtgttcgctatgggttgttttcgccaggcacctggtaaagaacgtgaatttgtggcatccattaaccttgacaacgacgctaccaactatgccgattctgttaaaggtcgcttcactatttcacgcgatgatgcgcgtaataccgtgtacttacagatgaactcactgaaacctgaggataccgccgtttattattgtaatgcaaccatctttatggattccgatttgggtgactattgggttcagggcacacaagtcacggtctcaagcggcggaagctctggtgaaaagaaactgatttcagaagccaa

SEQ ID NO: 2656 - protein, 7 aa, Artificial Sequence
  Synthetic
AIVHVFA

SEQ ID NO: 2657 - protein, 5 aa, Artificial Sequence
  Synthetic
LDNDA

SEQ ID NO: 2658 - protein, 9 aa, Artificial Sequence
  Synthetic
TIFMDSDLG

SEQ ID NO: 2659 - protein, 120 aa, Artificial Sequence
  Synthetic
EVQLVESGGGLVQAGDSLRLSCAASGAIVHVFAMGWFRQAPGKEREFVASINLDNDATNYADSVKGRFTISRDDARNTVYLQMNSLKPEDTAFYYCNATIFMDSDLGDYWGQGTQVTVSS

SEQ ID NO: 2660 - DNA, 418 bp, Artificial Sequence
  Synthetic
gaaggagatataccatggaagttcaactggttgaatctggtggcggtttagttcaagccggtgatagccttcgtctgagctgcgccgcaagcggagccattgtgcatgtgttcgctatgggttggtttcgccaggcacctggtaaagaacgtgaatttgtggcatccattaaccttgacaacgacgctaccaactatgccgattctgttaaaggtcgcttcactatttcacgcgatgatgcgcgtaataccgtgtacttacagatgaactcactgaaacctgaggataccgctttttattattgtaatgcaaccatctttatggattccgatttgggtgactattggggtcagggcacacaagtcacggtctcaagcggcggaagctctggtgaacagaaactgatttcagaagccaa

SEQ ID NO: 2661 - protein, 7 aa, Artificial Sequence
  Synthetic
AIVHVFA

SEQ ID NO: 2662 - protein, 5 aa, Artificial Sequence
  Synthetic
LDNDA

SEQ ID NO: 2663 - protein, 9 aa, Artificial Sequence
  Synthetic
PFWINSSVV

SEQ ID NO: 2664 - protein, 120 aa, Artificial Sequence
  Synthetic
GVQLVESGGGLVQAGDSLRLSCAASGAIVHVFAMGWFRQAPGKEREFVASINLDNDATNYADSVKGRFTISRDDAHNTVYLQMNSLKPEDTAVYYCNAPFWINSSVVDYWGQGTQVTVSS

SEQ ID NO: 2665 - DNA, 416 bp, Artificial Sequence
  Synthetic
aggagatataccatgggagttcaactggttgaatctggtggcggtttagttcaagccggtgatagccttcgtctgagctgcgccgcaagcggagccattgtgcatgtgttcgctatgggttggtttcgccaggcacctggtaaagaacgtgaatttgtggcatccattaaccttgacaacgacgctaccaactatgccgattctgttaaaggtcgcttcactatttcacgcgatgatgcgcataataccgtgtacttacagatgaactcactgaaacctgaggataccgccgtttattattgtaatgcacccttctggatcaatagttctgttgtggactattgggggcagggcacacaagtcacggtctcaagcggcggaagctctggtgaacagaaaatgatttcagaagccaa

SEQ ID NO: 2666 - protein, 7 aa, Artificial Sequence
  Synthetic
AIVHVFA

SEQ ID NO: 2667 - protein, 5 aa, Artificial Sequence
  Synthetic
LDNDA

SEQ ID NO: 2668 - protein, 9 aa, Artificial Sequence
  Synthetic
TIFMDSDLG

SEQ ID NO: 2669 - protein, 120 aa, Artificial Sequence
  Synthetic
EVQLVESGGGLVQAGDSLRLSCAASGAIVHVFAMGWFRQAPGKEREFVASIDLDNDATNYADSVKGRFTISRDDARNTVYLQMNSLKPEDTAVYYCNATIFMDSDLGDYWGQGTQVTVSS

SEQ ID NO: 2670 - DNA, 418 bp, Artificial Sequence
  Synthetic
gaaggagatataccatggaagttcaactggttgaatctggtggcggtttagttcaagccggtgatagccttcgtctgagctgcgccgcaagcggagccattgtgcatgtgttcgctatgggttggtttcgccaggcacctggtaaagaacgtgaatttgtggcatccattgaccttgacaacgacgctaccaactatgccgattctgttaaaggtcgcttcactatttcacgcgatgatgcgcgtaataccgtgtacttacagatgaactcactgaaacctgaggataccgccgtttattattgtaatgcaaccatctttatggattccgatttgggtgactattggggtcagggcacacaagtcacggtctcaagcggcggaagctctggtgaacagaaactgatttcagaagccaa

SEQ ID NO: 2671 - protein, 7 aa, Artificial Sequence
  Synthetic
AIVLVFA

SEQ ID NO: 2672 - protein, 5 aa, Artificial Sequence
  Synthetic
LDNDA

SEQ ID NO: 2673 - protein, 9 aa, Artificial Sequence
  Synthetic
TIFMDSDLG

SEQ ID NO: 2674 - protein, 120 aa, Artificial Sequence
  Synthetic
EVQLVESGGGLVQAGDSLRLSCAASGAIVLVFAMGWFRQAPGKEREFVASINLDNDATNYADSVKGRFTISRDDARNTVYLQMNSLKPEDTAVYYCNATIFMDSDLGDYWGQGTQVTVSS

SEQ ID NO: 2675 - DNA, 409 bp, Artificial Sequence
  Synthetic
ataccatggaagttcaactggttgaatctggtggcggtttagttcaagccggtgatagccttcgtctgagctgcgccgcaagcggagccattgtgcttgtgttcgctatgggttggtttcgccaggcacctggtaaagaacgtgaatttgtggcatccattaaccttgacaacgacgctaccaactatgccgattctgttaaaggtcgctttactatttcacgcgatgatgcgcgtaataccgtgtacttacagatgaactcactgaaacctgaggataccgccgtttattattgtaatgcaaccatctttatggattccgatttgggtgactattggggtcagggcacacaagtcacggtctcaagcggcggaagctctggtgaacagaaactgatttcagaagccaa

SEQ ID NO: 2676 - protein, 7 aa, Artificial Sequence
  Synthetic
AIVHVFA

SEQ ID NO: 2677 - protein, 5 aa, Artificial Sequence
  Synthetic
LDNDA

SEQ ID NO: 2678 - protein, 10 aa, Artificial Sequence
  Synthetic
WSFTPSICTL

SEQ ID NO: 2679 - protein, 121 aa, Artificial Sequence
  Synthetic
EVQLVESGGGLVQAGDSLRLSCAASGAIVHVFAMGWFRQAPGKEREFVASINLDNDATNYADSVKGRFTISRDDARNTVYLQMNSLKPEDTAVYYCAAWSFTPSICTLEYWGQGTQGTVSS

SEQ ID NO: 2680 - DNA, 420 bp, Artificial Sequence
  Synthetic
aaggagatataccatggaagttcaactggttgaatctggtggcggtttagttcaagccggtgatagccttcgtctgagctgcgccgcaagcggagccattgtgcatgtgttcgctatgggttggtttcgccaggcacctggtaaagaacgtgaatttgtggcatccattaaccttgacaacgacgctaccaactatgccgattctgttaaaggtcgcttcactatttcacgcgatgatgcgcgtaataccgtgtacttacagatgaactcactgaaacctgaggataccgccgtttattattgtgcggcatggagtttcaccccttctatctgtaccttggagtattggggtcagggcacacaaggcacggtctcaagcggcggaagctctggtgaacagaaactgatttcagaagccaa

SEQ ID NO: 2681 - protein, 7 aa, Artificial Sequence
  Synthetic
AIVHVFA

SEQ ID NO: 2682 - protein, 5 aa, Artificial Sequence
  Synthetic
LDNDA

SEQ ID NO: 2683 - protein, 9 aa, Artificial Sequence
  Synthetic
TIFMDSDLG

SEQ ID NO: 2684 - protein, 120 aa, Artificial Sequence
  Synthetic
EVQLVESGGGLVQAGDSLRLSCAASGAIVHVFAMDWFRQAPGKEREFVASINLDNDATNYADSVKGRFTISRDDARNTVYLQMNSLKPEDTAVYYCNATIFMDSDLGDYWGQGTQGTVSS

SEQ ID NO: 2685 - DNA, 409 bp, Artificial Sequence
  Synthetic
ataccatggaagttcaactggttgaatctggtggcggtttagttcaagccggtgatagccttcgtctgagctgcgccgcaagcggagccattgtgcatgtgttcgctatggattggtttcgccaggcacctggtaaagaacgtgaatttgtggcatccattaaccttgacaacgacgctaccaactatgccgattctgttaaaggtcgcttcactatttcacgcgatgatgcgcgtaataccgtgtacttacagatgaactcactgaaacctgaggataccgccgtttattattgtaatgcaaccatctttatggattccgatttgggtgactattggggtcagggcacacaaggcacggtctcaagcggcggaagctctggtgaacagaaactgatttcagaagccaa

SEQ ID NO: 2686 - protein, 7 aa, Artificial Sequence
  Synthetic
AIVHVFA

SEQ ID NO: 2687 - protein, 5 aa, Artificial Sequence
  Synthetic
LDNDA

SEQ ID NO: 2688 - protein, 9 aa, Artificial Sequence
  Synthetic
TIFMDSDLG

SEQ ID NO: 2689 - protein, 120 aa, Artificial Sequence
  Synthetic
QVQLVESGGGLVQAGDSLRLSCAASGAIVHVFAMGWFRQAPGKEREFVASINLDNDATNYADSVKGRFTISRDDARNTVYLQMNSLKPEDTAVYYCNATIFMDSDLGDYWGQGTQGTVSS

SEQ ID NO: 2690 - DNA, 409 bp, Artificial Sequence
  Synthetic
ataccatgcaggttcaactggttgaatctggtggcggtttagttcaagccggtgatagccttcgtctgagctgcgccgcaagcggagccattgtgcatgtgttcgctatgggttggtttcgccaggcacctggtaaagaacgtgaatttgtggcatccattaaccttgacaacgacgctaccaactatgccgattctgttaaaggtcgcttcactatttcacgcgatgatgcgcgtaataccgtgtacttacagatgaactcactgaaacctgaggataccgccgtttattattgtaatgcaaccatctttatggattccgatttgggtgactattggggtcagggcacacaaggcacggtctcaagcggcggaagctctggtgaacagaaactgatttcagaagccaa

SEQ ID NO: 2691 - protein, 7 aa, Artificial Sequence
  Synthetic
AIVHVFA

SEQ ID NO: 2692 - protein, 5 aa, Artificial Sequence
  Synthetic
LDNDA

SEQ ID NO: 2693 - protein, 9 aa, Artificial Sequence
  Synthetic
PFWINSSVV

SEQ ID NO: 2694 - protein, 120 aa, Artificial Sequence
  Synthetic
EVQLVESGGGLVQAGDSLRLSCAASGAIVHVFAMGWFRQAPGKEREFVASINLDNDATNYADSVKGRFTISRDDAHNTVYLQMNSLKPEDTAVYYCNAPFWINSSVVDYWGQGTQGTVSS

SEQ ID NO: 2695 - DNA, 418 bp, Artificial Sequence
  Synthetic
gaaggagatataccatggaagttcaactggttgaatctggtggcggtttagttcaagccggtgatagccttcgtctgagctgcgccgcaagcggagccattgtgcatgtgttcgctatgggttggtttcgccaggcacctggtaaagaacgtgaatttgtggcatccattaaccttgacaacgacgctaccaactatgccgattctgttaaaggtcgcttcactatttcacgcgatgatgcgcataataccgtgtacttacagatgaactcactgaaacctgaggataccgccgtttattattgtaatgcacccttctggatcaatagttctgttgtggactattggggtcagggcacacaaggcacggtctcaagcggcggaagctctggtgaacagaaactgatttcagaagccaa

SEQ ID NO: 2696 - protein, 7 aa, Artificial Sequence
  Synthetic
AIVHVFA

SEQ ID NO: 2697 - protein, 5 aa, Artificial Sequence
  Synthetic
LDNDA

SEQ ID NO: 2698 - protein, 9 aa, Artificial Sequence
  Synthetic
PFWINSSVV

SEQ ID NO: 2699 - protein, 120 aa, Artificial Sequence
  Synthetic
EVQLVDSGGGLVQAGDRLRLSCAASGAIVHVFAMGWFRQAPGKEREFVASINLDNDATNYADSVKGRFTISRDDAHNTVYLQMNSLKPEDTAVYYCNAPFWINSSVVDYWGQGTQGTVSS

SEQ ID NO: 2700 - DNA, 418 bp, Artificial Sequence
  Synthetic
gaaggagatataccatggaagttcaactggttgactctggtggcggtttagttcaagccggtgatcgccttcgtctgagctgcgccgcaagcggagccattgtgcatgtgttcgctatgggttggtttcgccaggcacctggtaaagaacgtgaatttgtggcatccattaaccttgacaacgacgctaccaactatgccgattctgttaaaggtcgcttcactatttcacgcgatgatgcgcataataccgtgtacttacagatgaactcactgaaacctgaggataccgccgtttattattgtaatgcacccttctggatcaatagttctgttgtggactattggggtcagggcacacaaggcacggtctcaagcggcggaagctctggtgaacagaaactgatttcagaagccaa

SEQ ID NO: 2701 - protein, 7 aa, Artificial Sequence
  Synthetic
AIVHVFA

SEQ ID NO: 2702 - protein, 5 aa, Artificial Sequence
  Synthetic
LDNDA

SEQ ID NO: 2703 - protein, 13 aa, Artificial Sequence
  Synthetic
ACSDYTYGSHGVR

SEQ ID NO: 2704 - protein, 124 aa, Artificial Sequence
  Synthetic
EVQLVESGGGLVQAGDSLRLSCAASGAIVHVFAMGWFRQAPGKEREFVASINLDNDATNYADSVKGRFTISRDDARNTVYLQMNSLKPEDTAVYYCNAACSDYTYGSHGVRDYWGQGTQGTVSS

SEQ ID NO: 2705 - DNA, 427 bp, Artificial Sequence
  Synthetic
ggagatataccatggaagttcaactggttgaatctggtggcggtttagttcaagccggtgatagccttcgtctgagctgcgccgcaagcggagccattgtgcatgtgttcgctatgggttggtttcgccaggcacctggtaaagaacgtgaatttgtggcatccattaaccttgacaacgacgctaccaactatgccgattctgttaaaggtcgcttcactatttcacgcgatgatgcgcgtaataccgtgtacttacagatgaactcactgaaacctgaggataccgccgtttattattgtaatgcagcgtgttcggactatacgtatggctctcatggtgttcgggactattggggtcagggcacacaaggcactgtctcaagcggcggaagctctggtgaacagaaactgatttcagaagccaa

SEQ ID NO: 2706 - protein, 7 aa, Artificial Sequence
  Synthetic
AIVHVFA

SEQ ID NO: 2707 - protein, 5 aa, Artificial Sequence
  Synthetic
LDNDA

SEQ ID NO: 2708 - protein, 13 aa, Artificial Sequence
  Synthetic
ACSDYTYGSHGVR

SEQ ID NO: 2709 - protein, 124 aa, Artificial Sequence
  Synthetic
EVQLVESGGGLVQAGDSLRLSCAASGAIVHVFAMGWFRQAPGKEREFVASINLDNDATNYADSVKGRFTISRDDARNTVYLQMNSLKPEDTAVYYCNAACSDYTYGSHGVRDSWGQGTQGTVSS

SEQ ID NO: 2710 - DNA, 427 bp, Artificial Sequence
  Synthetic
ggagatataccatggaagttcaactggttgaatctggtggcggtttagttcaagccggtgatagtcttcgtctgagctgcgccgcaagcggagccattgtgcatgtgttcgctatgggttggtttcgccaggcacctggtaaagaacgtgaatttgtggcatccattaaccttgacaacgacgctaccaactatgccgattctgttaaaggtcgcttcactatttcacgcgatgatgcgcgtaataccgtgtacttacagatgaactcactgaaacctgaggataccgccgtttattattgtaatgcagcgtgttcggactatacgtatggctctcatggtgttcgggactcttggggtcagggcacacaaggcacggtctcaagcggcggaagctctggtgaacagaaactgatttcagaagccaa

SEQ ID NO: 2711 - protein, 7 aa, Artificial Sequence
  Synthetic
AIVHVFA

SEQ ID NO: 2712 - protein, 5 aa, Artificial Sequence
  Synthetic
LDNDA

SEQ ID NO: 2713 - protein, 9 aa, Artificial Sequence
  Synthetic
PFWINSSVV

SEQ ID NO: 2714 - protein, 120 aa, Artificial Sequence
  Synthetic
QVQLVESGGGLVQAGDSLRLSCAASGAIVHVFAMGWFRQAPGKEREFVASINLDNDATNYADSVKGRFTISRDDAHNTVYLQMNSPKPEDTAVYYCNAPFWINSSVVDYWGQGTQVTVSS

SEQ ID NO: 2715 - DNA, 417 bp, Artificial Sequence
  Synthetic
aaggagatataccatgcaggttcaactggttgaatctggtggcggtttagttcaagccggtgatagccttcgtctgagctgcgccgcaagcggagccattgtgcatgtgttcgctatgggttggtttcgccaggcacctggtaaagaacgtgaatttgtggcatccattaaccttgacaacgacgctaccaactatgccgattctgttaaaggtcgcttcactatttcacgcgatgatgcgcataataccgtgtacttacagatgaactcaccgaaacctgaggataccgccgtttattattgtaatgcacccttctggatcaatagttctgttgtggactattggggtcagggcacacaagtcacggtctcaagcggcggaagctctggtgaacagaaactgatttcagaagccaa

SEQ ID NO: 2716 - protein, 7 aa, Artificial Sequence
  Synthetic
AIVHVFA

SEQ ID NO: 2717 - protein, 5 aa, Artificial Sequence
  Synthetic
LDNDA

SEQ ID NO: 2718 - protein, 13 aa, Artificial Sequence
  Synthetic
ACSDYTYGSHGVR

SEQ ID NO: 2719 - protein, 124 aa, Artificial Sequence
  Synthetic
EVQLFESGGGLVQAGDSLRLSCAASGAIVHVFAMGWFRQAPGKEREFVASINLDNDATNYADSVKGRFTISRDDARNTVYLQMNSLKPEDTAVYYCNAACSDYTYGSHGVRDSWGQGTQVTVSS

SEQ ID NO: 2720 - DNA, 423 bp, Artificial Sequence
  Synthetic
atataccatggaagttcaactgtttgaatctggtggcggtttagttcaagccggtgatagccttcgtctgagctgcgccgcaagcggagccattgtgcatgtgttcgctatgggttggtttcgccaggcacctggtaaagaacgtgaatttgtggcatccattaaccttgacaacgacgctaccaactatgccgattctgttaaaggtcgcttcactatttcacgcgatgatgcgcgtaataccgtgtacttacagatgaactcactgaaacctgaggataccgccgtttattattgtaatgcagcgtgttcggactatacgtatggctctcatggtgttcgggactcttggggtcagggcacacaagtcacggtctcaagcggcggaagctctggtgaacagaaactgatttcagaagccaa

SEQ ID NO: 2721 - protein, 7 aa, Artificial Sequence
  Synthetic
AIVHVFA

SEQ ID NO: 2722 - protein, 5 aa, Artificial Sequence
  Synthetic
LDNDA

SEQ ID NO: 2723 - protein, 9 aa, Artificial Sequence
  Synthetic
FCYVPLATC

SEQ ID NO: 2724 - protein, 120 aa, Artificial Sequence
  Synthetic
EVQLVESGGGLVQAGDSLRLSCAASGAIVHVFAMGWFRQAPGKEREIVASINLDNDATNYADSVKGRFTISRDDARNTVYLQMNSLKPEDTAVYYCNAFCYVPLATCDYLGQGTQVTVSS

SEQ ID NO: 2725 - DNA, 416 bp, Artificial Sequence
  Synthetic
aggagatataccatggaagttcaactggttgaatctggtggcggtttagttcaagccggtgatagccttcgtctgagctgcgccgcaagcggagccattgtgcatgtgttcgctatgggttggtttcgccaggcacctggtaaagaacgtgaaattgtggcatccattaaccttgacaacgacgctaccaactatgccgattctgttaaaggtcgcttcactatttcacgcgatgatgcgcgtaataccgtgtacttacagatgaactcactgaaacctgaggataccgccgtttattactgtaatgcattctgctacgtccctttggccacgtgtgactatttgggtcagggcacacaagtcacggtctcaagcggcggaagctctggtgaacagaaactgatttcagaagccaa

SEQ ID NO: 2726 - protein, 7 aa, Artificial Sequence
  Synthetic
AIVHVFA

SEQ ID NO: 2727 - protein, 5 aa, Artificial Sequence
  Synthetic
LDNDA

SEQ ID NO: 2728 - protein, 9 aa, Artificial Sequence
  Synthetic
PFWINSSVV

SEQ ID NO: 2729 - protein, 120 aa, Artificial Sequence
  Synthetic
EVQLVESGGGLVQAGDSLRLSCAASGAIVHVFAMGWFRQAPGKEREFVASINLDNDATNYADSVKGRFTISRDDAHNTVYLQMNSLKPEDTAVYYCNAPFWINSSVVDYWGQGTQVAVSS

SEQ ID NO: 2730 - DNA, 407 bp, Artificial Sequence
  Synthetic
accatggaagttcaactggttgaatctggtggcggtttagttcaagccggtgatagccttcgtctgagctgcgccgcaagcggagccattgtgcatgtgttcgctatgggttggtttcgtcaggcacctggtaaagaacgtgaatttgtggcatccattaaccttgacaacgacgctaccaactatgccgattctgttaaaggtcgcttcactatttcacgcgatgatgcgcataataccgtgtacttacagatgaactcactgaaacctgaggataccgccgtttattattgtaatgcacccttctggatcaatagttctgttgtggactattggggtcagggcacacaagtcgcggtctcaagcggcggaagctctggtgaacagaaactgatttcagaagccaa

SEQ ID NO: 2731 - protein, 7 aa, Artificial Sequence
  Synthetic
AIVHVFA

SEQ ID NO: 2732 - protein, 5 aa, Artificial Sequence
  Synthetic
LDNDA

SEQ ID NO: 2733 - protein, 9 aa, Artificial Sequence
  Synthetic
TIFMDSDSG

SEQ ID NO: 2734 - protein, 120 aa, Artificial Sequence
  Synthetic
EVQLVESGGGLVQAGDSLRLSCAASGAIVHVFAMGWFRQAPGKEREFVASINLDNDATNYADSVKGRFTISRDDARNTVYLQMNSLKPEDTAVYYCNATIFMDSDSGDYWGQDTQGTVSS

SEQ ID NO: 2735 - DNA, 418 bp, Artificial Sequence
  Synthetic
gaaggagatataccatggaagttcaactggttgaatctggtggcggtttagttcaagccggtgatagccttcgtctgagctgcgccgcaagcggagccattgtgcatgtgttcgctatgggttggtttcgccaggcacctggtaaagaacgtgaatttgtggcatccattaaccttgacaacgacgctaccaactatgccgattctgttaaaggtcgcttcactatttcacgcgatgatgcgcgtaataccgtgtacttacagatgaactcactgaaacctgaggataccgccgtttattattgtaatgcaaccatctttatggattccgattcgggtgactattggggtcaggacacacaaggcacggtctcaagcggcggaagctctggtgaacagaaaatgatttcagaagccaa

SEQ ID NO: 2736 - protein, 7 aa, Artificial Sequence
  Synthetic
AIVHVFA

SEQ ID NO: 2737 - protein, 5 aa, Artificial Sequence
  Synthetic
LDNDA

SEQ ID NO: 2738 - protein, 9 aa, Artificial Sequence
  Synthetic
FCYVPLATC

SEQ ID NO: 2739 - protein, 120 aa, Artificial Sequence
  Synthetic
EVQLVESGGGLVQAGDSLRLSCAASGAIVHVFAMGWFRQAPGKEREFVASINLDNDATNYADSVKGRFTISRDDARNTVYLQMNSLKPEDTAVYYCNAFCYVPLATCDYWGQGTQGTVSS

SEQ ID NO: 2740 - DNA, 415 bp, Artificial Sequence
  Synthetic
ggagatataccatggaagttcaactggttgaatctggtggcggtttagttcaagccggtgatagccttcgtctgagctgcgccgcaagcggagccattgtgcatgtgttcgctatgggttggtttcgccaggcacctggtaaagaacgtgaatttgtggcatccattaaccttgacaacgacgctaccaactatgccgattctgttaaaggtcgcttcactatttcacgcgatgatgcgcgtaataccgtgtacttacagatgaactcactgaaacctgaggataccgccgtttattattgtaatgcattctgctacgtccctttggccacgtgtgactattggggtcagggcacacaaggcacggtctcaagcggcggaagctctggtgaacagaaaatgatttcagaagccaa

SEQ ID NO: 2741 - protein, 7 aa, Artificial Sequence
  Synthetic
AIVHVFA

SEQ ID NO: 2742 - protein, 5 aa, Artificial Sequence
  Synthetic
LDNDA

SEQ ID NO: 2743 - protein, 10 aa, Artificial Sequence
  Synthetic
TAISPISIVD

SEQ ID NO: 2744 - protein, 121 aa, Artificial Sequence
  Synthetic
KVQLVESGGGLVQAGDSLRLSCAASGAIVHVFAMGWFRQAPGKEREFVASINLDNDATNYADSVKGRFTISRDDARNTVYLQMNSLKPEDTAVYYCAATAISPISIVDEYWGQGTQVTVSS

SEQ ID NO: 2745 - DNA, 412 bp, Artificial Sequence
  Synthetic
ataccatgaaagttcaactggttgaatctggtggcggtttagttcaagccggtgatagccttcgtctgagctgcgccgcaagcggagccattgtgcatgtgttcgctatgggttggtttcgccaggcacctggtaaagaacgtgaatttgtggcatccattaaccttgacaacgacgctaccaactatgccgattctgttaaaggtcgcttcactatttcacgcgatgatgcgcgtaataccgtgtacttacagatgaactcactgaaacctgaggataccgccgtttattattgtgcggcaacggctattagccctatctctattgtggatgagtattggggtcagggcacacaagtcacggtctcaagcggcggaagctctggtgaacagaaactgatttcagaagccaa

SEQ ID NO: 2746 - protein, 7 aa, Artificial Sequence
  Synthetic
AIVHVFA

SEQ ID NO: 2747 - protein, 5 aa, Artificial Sequence
  Synthetic
LDNDA

SEQ ID NO: 2748 - protein, 9 aa, Artificial Sequence
  Synthetic
TIFMDSDLG

SEQ ID NO: 2749 - protein, 120 aa, Artificial Sequence
  Synthetic
EGQLVESGGGLVQAGDSLRLSCAASGAIVHVFAMGWFRQAPGKEREFVASINLDNDATNYADSVKGRFTISRDDARNTVYLQMNSLKPEDTAVYYCNATIFMDSDLGDYWGQGTQGTVSS

SEQ ID NO: 2750 - DNA, 407 bp, Artificial Sequence
  Synthetic
accatggaaggtcaactggttgaatctggtggcggtttagttcaagccggtgatagccttcgtctgagctgcgccgcaagcggagccattgtgcatgtgttcgctatgggttggtttcgccaggcacctggtaaagaacgtgaatttgtggcatccattaaccttgacaacgacgctaccaactatgccgattctgttaaaggtcgcttcactatttcacgcgatgatgcgcgtaataccgtgtacttacagatgaactcactgaaacctgaggataccgccgtttattattgtaatgcaaccatctttatggattccgatttgggtgactattggggtcagggcacacaaggcacggtctcaagcggcggaagctctggtgaaaagaaaatgatttcagaagccaa

SEQ ID NO: 2751 - protein, 7 aa, Artificial Sequence
  Synthetic
AIVHVFA

SEQ ID NO: 2752 - protein, 5 aa, Artificial Sequence
  Synthetic
LDNDA

SEQ ID NO: 2753 - protein, 9 aa, Artificial Sequence
  Synthetic
TIFMDSDLG

SEQ ID NO: 2754 - protein, 120 aa, Artificial Sequence
  Synthetic
EVQLVESGGGLVQAGDSLRLSCDASGAIVHVFAMGWFRQAPGKEREFVASINLDNDATNYADSVKGRFTISRDDARNTVYLQMNSLKPEDTAVYYCNATIFMDSDLGDYWGQGTQGTVSS

SEQ ID NO: 2755 - DNA, 413 bp, Artificial Sequence
  Synthetic
agatataccatggaagttcaactggttgaatctggtggcggtttagttcaagccggtgatagccttcgtctgagctgcgacgcaagcggagccattgtgcatgtgttcgctatgggttggtttcgccaggcacctggtaaagaacgtgaatttgtggcatccattaaccttgacaacgacgctaccaactatgccgattctgttaaaggtcgcttcactatttcacgcgatgatgcgcgtaataccgtgtacttacagatgaactcactgaaacctgaggataccgccgtttattattgtaatgcaaccatctttatggattccgatttgggtgactattggggtcagggcacacaaggcacggtctcaagcggcggaagctctggtgaacagaaaatgatttcagaagccaa

SEQ ID NO: 2756 - protein, 7 aa, Artificial Sequence
  Synthetic
YSCDTVR

SEQ ID NO: 2757 - protein, 7 aa, Artificial Sequence
  Synthetic
DCHVLWR

SEQ ID NO: 2758 - protein, 7 aa, Artificial Sequence
  Synthetic
AIVHVFA

SEQ ID NO: 2759 - protein, 7 aa, Artificial Sequence
  Synthetic
DYCMDCF

SEQ ID NO: 2760 - protein, 7 aa, Artificial Sequence
  Synthetic
PYCMGNQ

SEQ ID NO: 2761 - protein, 7 aa, Artificial Sequence
  Synthetic
WFQRQVY

SEQ ID NO: 2762 - protein, 7 aa, Artificial Sequence
  Synthetic
FQLSCYC

SEQ ID NO: 2763 - protein, 7 aa, Artificial Sequence
  Synthetic
VCGIVSR

SEQ ID NO: 2764 - protein, 7 aa, Artificial Sequence
  Synthetic
IGLTWVC

SEQ ID NO: 2765 - protein, 7 aa, Artificial Sequence
  Synthetic
KTGRSVI

SEQ ID NO: 2766 - protein, 7 aa, Artificial Sequence
  Synthetic
AFGSNVF

SEQ ID NO: 2767 - protein, 7 aa, Artificial Sequence
  Synthetic
IRHDFLL

SEQ ID NO: 2768 - protein, 7 aa, Artificial Sequence
  Synthetic
IGERCLF

SEQ ID NO: 2769 - protein, 7 aa, Artificial Sequence
  Synthetic
IFSGCVF

SEQ ID NO: 2770 - protein, 7 aa, Artificial Sequence
  Synthetic
CNARQVY

SEQ ID NO: 2771 - protein, 6 aa, Artificial Sequence
  Synthetic
FKLPCL

SEQ ID NO: 2772 - protein, 7 aa, Artificial Sequence
  Synthetic
IWMGTRV

SEQ ID NO: 2773 - protein, 7 aa, Artificial Sequence
  Synthetic
IMIGTQS

SEQ ID NO: 2774 - protein, 7 aa, Artificial Sequence
  Synthetic
ALCRRVY

SEQ ID NO: 2775 - protein, 7 aa, Artificial Sequence
  Synthetic
LCLSVLA

SEQ ID NO: 2776 - protein, 7 aa, Artificial Sequence
  Synthetic
TACGLLG

SEQ ID NO: 2777 - protein, 7 aa, Artificial Sequence
  Synthetic
VLGVTIS

SEQ ID NO: 2778 - protein, 7 aa, Artificial Sequence
  Synthetic
ASFYNTM

SEQ ID NO: 2779 - protein, 7 aa, Artificial Sequence
  Synthetic
ATNFCVQ

SEQ ID NO: 2780 - protein, 7 aa, Artificial Sequence
  Synthetic
FWSNAIF

SEQ ID NO: 2781 - protein, 7 aa, Artificial Sequence
  Synthetic
RLLRLVY

SEQ ID NO: 2782 - protein, 6 aa, Artificial Sequence
  Synthetic
LRSVVF

SEQ ID NO: 2783 - protein, 7 aa, Artificial Sequence
  Synthetic
MKCIHAG

SEQ ID NO: 2784 - protein, 7 aa, Artificial Sequence
  Synthetic
WVTFMVF

SEQ ID NO: 2785 - protein, 4 aa, Artificial Sequence
  Synthetic
RSVG

SEQ ID NO: 2786 - protein, 7 aa, Artificial Sequence
  Synthetic
RARNIVY

SEQ ID NO: 2787 - protein, 7 aa, Artificial Sequence
  Synthetic
FPCSYVF

SEQ ID NO: 2788 - protein, 7 aa, Artificial Sequence
  Synthetic
SRCALVV

SEQ ID NO: 2789 - protein, 7 aa, Artificial Sequence
  Synthetic
YVMMWCE

SEQ ID NO: 2790 - protein, 7 aa, Artificial Sequence
  Synthetic
VYVGSAT

SEQ ID NO: 2791 - protein, 7 aa, Artificial Sequence
  Synthetic
IANKIVF

SEQ ID NO: 2792 - protein, 7 aa, Artificial Sequence
  Synthetic
FLFRVVH

SEQ ID NO: 2793 - protein, 7 aa, Artificial Sequence
  Synthetic
SVYGPSN

SEQ ID NO: 2794 - protein, 7 aa, Artificial Sequence
  Synthetic
HFVRIMA

SEQ ID NO: 2795 - protein, 7 aa, Artificial Sequence
  Synthetic
GLYVSIV

SEQ ID NO: 2796 - protein, 7 aa, Artificial Sequence
  Synthetic
LVLSYFT

SEQ ID NO: 2797 - protein, 7 aa, Artificial Sequence
  Synthetic
GLYWQND

SEQ ID NO: 2798 - protein, 7 aa, Artificial Sequence
  Synthetic
LLAVPVD

SEQ ID NO: 2799 - protein, 6 aa, Artificial Sequence
  Synthetic
ACCDAH

SEQ ID NO: 2800 - protein, 7 aa, Artificial Sequence
  Synthetic
TGFCHYW

SEQ ID NO: 2801 - protein, 7 aa, Artificial Sequence
  Synthetic
HSAHASQ

SEQ ID NO: 2802 - protein, 7 aa, Artificial Sequence
  Synthetic
VLLRRVF

SEQ ID NO: 2803 - protein, 7 aa, Artificial Sequence
  Synthetic
VTRGLLN

SEQ ID NO: 2804 - protein, 7 aa, Artificial Sequence
  Synthetic
GVAQVVF

SEQ ID NO: 2805 - protein, 7 aa, Artificial Sequence
  Synthetic
TFCMFVC

SEQ ID NO: 2806 - protein, 7 aa, Artificial Sequence
  Synthetic
LRCDSAS

SEQ ID NO: 2807 - protein, 7 aa, Artificial Sequence
  Synthetic
TLRSCVN

SEQ ID NO: 2808 - protein, 7 aa, Artificial Sequence
  Synthetic
VIFRESF

SEQ ID NO: 2809 - protein, 7 aa, Artificial Sequence
  Synthetic
RCGSVVF

SEQ ID NO: 2810 - protein, 7 aa, Artificial Sequence
  Synthetic
GILLRTC

SEQ ID NO: 2811 - protein, 7 aa, Artificial Sequence
  Synthetic
SLRLVVY

SEQ ID NO: 2812 - protein, 7 aa, Artificial Sequence
  Synthetic
FVIPRYA

SEQ ID NO: 2813 - protein, 7 aa, Artificial Sequence
  Synthetic
PVFRCVY

SEQ ID NO: 2814 - protein, 7 aa, Artificial Sequence
  Synthetic
VCRGVVA

SEQ ID NO: 2815 - protein, 7 aa, Artificial Sequence
  Synthetic
WGYRMRV

SEQ ID NO: 2816 - protein, 7 aa, Artificial Sequence
  Synthetic
RLRHVVF

SEQ ID NO: 2817 - protein, 7 aa, Artificial Sequence
  Synthetic
VLGILST

SEQ ID NO: 2818 - protein, 7 aa, Artificial Sequence
  Synthetic
DFANIHG

SEQ ID NO: 2819 - protein, 6 aa, Artificial Sequence
  Synthetic
LDRAVL

SEQ ID NO: 2820 - protein, 7 aa, Artificial Sequence
  Synthetic
ARDRLLG

SEQ ID NO: 2821 - protein, 7 aa, Artificial Sequence
  Synthetic
MPAFGGR

SEQ ID NO: 2822 - protein, 7 aa, Artificial Sequence
  Synthetic
HSQHVFY

SEQ ID NO: 2823 - protein, 7 aa, Artificial Sequence
  Synthetic
LGSGLLF

SEQ ID NO: 2824 - protein, 7 aa, Artificial Sequence
  Synthetic
HTTRRIY

SEQ ID NO: 2825 - protein, 7 aa, Artificial Sequence
  Synthetic
VFGIVRS

SEQ ID NO: 2826 - protein, 7 aa, Artificial Sequence
  Synthetic
HLDALVY

SEQ ID NO: 2827 - protein, 7 aa, Artificial Sequence
  Synthetic
QAIVVSW

SEQ ID NO: 2828 - protein, 7 aa, Artificial Sequence
  Synthetic
SFRGLRW

SEQ ID NO: 2829 - protein, 7 aa, Artificial Sequence
  Synthetic
RLVNVVY

SEQ ID NO: 2830 - protein, 7 aa, Artificial Sequence
  Synthetic
DPRGLVY

SEQ ID NO: 2831 - protein, 7 aa, Artificial Sequence
  Synthetic
NSIVCCA

SEQ ID NO: 2832 - protein, 7 aa, Artificial Sequence
  Synthetic
HYPDARW

SEQ ID NO: 2833 - protein, 7 aa, Artificial Sequence
  Synthetic
SCWQWHR

SEQ ID NO: 2834 - protein, 7 aa, Artificial Sequence
  Synthetic
NPVDIQC

SEQ ID NO: 2835 - protein, 7 aa, Artificial Sequence
  Synthetic
VRGLVLN

SEQ ID NO: 2836 - protein, 7 aa, Artificial Sequence
  Synthetic
ITHSLVY

SEQ ID NO: 2837 - protein, 7 aa, Artificial Sequence
  Synthetic
MGTSLSG

SEQ ID NO: 2838 - protein, 6 aa, Artificial Sequence
  Synthetic
VNCLVW

SEQ ID NO: 2839 - protein, 7 aa, Artificial Sequence
  Synthetic
APCVLLS

SEQ ID NO: 2840 - protein, 7 aa, Artificial Sequence
  Synthetic
AMTGVYM

SEQ ID NO: 2841 - protein, 7 aa, Artificial Sequence
  Synthetic
LHHRVVF

SEQ ID NO: 2842 - protein, 7 aa, Artificial Sequence
  Synthetic
EMSRIVY

SEQ ID NO: 2843 - protein, 7 aa, Artificial Sequence
  Synthetic
RLPCVVF

SEQ ID NO: 2844 - protein, 7 aa, Artificial Sequence
  Synthetic
RHFHIVA

SEQ ID NO: 2845 - protein, 7 aa, Artificial Sequence
  Synthetic
RNSGCVF

SEQ ID NO: 2846 - protein, 7 aa, Artificial Sequence
  Synthetic
GNFDVFS

SEQ ID NO: 2847 - protein, 7 aa, Artificial Sequence
  Synthetic
NSNVVYA

SEQ ID NO: 2848 - protein, 7 aa, Artificial Sequence
  Synthetic
DKCAYIM

SEQ ID NO: 2849 - protein, 7 aa, Artificial Sequence
  Synthetic
AGCFVSN

SEQ ID NO: 2850 - protein, 7 aa, Artificial Sequence
  Synthetic
YYEALRG

SEQ ID NO: 2851 - protein, 7 aa, Artificial Sequence
  Synthetic
VTTKQVY

SEQ ID NO: 2852 - protein, 7 aa, Artificial Sequence
  Synthetic
KVFLTVW

SEQ ID NO: 2853 - protein, 7 aa, Artificial Sequence
  Synthetic
RARGKVF

SEQ ID NO: 2854 - protein, 6 aa, Artificial Sequence
  Synthetic
LESLCG

SEQ ID NO: 2855 - protein, 7 aa, Artificial Sequence
  Synthetic
RLMNEVF

SEQ ID NO: 2856 - protein, 7 aa, Artificial Sequence
  Synthetic
IYLEAYG

SEQ ID NO: 2857 - protein, 7 aa, Artificial Sequence
  Synthetic
SCIRWLS

SEQ ID NO: 2858 - protein, 6 aa, Artificial Sequence
  Synthetic
TVIPYS

SEQ ID NO: 2859 - protein, 7 aa, Artificial Sequence
  Synthetic
RTYRMVF

SEQ ID NO: 2860 - protein, 7 aa, Artificial Sequence
  Synthetic
CVTRRYR

SEQ ID NO: 2861 - protein, 7 aa, Artificial Sequence
  Synthetic
IDFCYRF

SEQ ID NO: 2862 - protein, 7 aa, Artificial Sequence
  Synthetic
PECPIIY

SEQ ID NO: 2863 - protein, 7 aa, Artificial Sequence
  Synthetic
SFMPFIR

SEQ ID NO: 2864 - protein, 7 aa, Artificial Sequence
  Synthetic
VQPGVVY

SEQ ID NO: 2865 - protein, 7 aa, Artificial Sequence
  Synthetic
LSIEGCQ

SEQ ID NO: 2866 - protein, 7 aa, Artificial Sequence
  Synthetic
SCGSVVY

SEQ ID NO: 2867 - protein, 7 aa, Artificial Sequence
  Synthetic
YICHVTM

SEQ ID NO: 2868 - protein, 7 aa, Artificial Sequence
  Synthetic
QSGKGCR

SEQ ID NO: 2869 - protein, 7 aa, Artificial Sequence
  Synthetic
SIVSAVF

SEQ ID NO: 2870 - protein, 7 aa, Artificial Sequence
  Synthetic
AWEDLVC

SEQ ID NO: 2871 - protein, 7 aa, Artificial Sequence
  Synthetic
VLGIVGG

SEQ ID NO: 2872 - protein, 7 aa, Artificial Sequence
  Synthetic
YRVYYAL

SEQ ID NO: 2873 - protein, 7 aa, Artificial Sequence
  Synthetic
LGGQCVW

SEQ ID NO: 2874 - protein, 7 aa, Artificial Sequence
  Synthetic
WFGRLVY

SEQ ID NO: 2875 - protein, 4 aa, Artificial Sequence
  Synthetic
SFGL

SEQ ID NO: 2876 - protein, 7 aa, Artificial Sequence
  Synthetic
LDVRYFV

SEQ ID NO: 2877 - protein, 7 aa, Artificial Sequence
  Synthetic
VIGHFVY

SEQ ID NO: 2878 - protein, 7 aa, Artificial Sequence
  Synthetic
NFVCNHQ

SEQ ID NO: 2879 - protein, 7 aa, Artificial Sequence
  Synthetic
VHPHIFG

SEQ ID NO: 2880 - protein, 7 aa, Artificial Sequence
  Synthetic
VLGLLRL

SEQ ID NO: 2881 - protein, 7 aa, Artificial Sequence
  Synthetic
ITHSCVY

SEQ ID NO: 2882 - protein, 7 aa, Artificial Sequence
  Synthetic
NGGHVFA

SEQ ID NO: 2883 - protein, 7 aa, Artificial Sequence
  Synthetic
SIPRVVI

SEQ ID NO: 2884 - protein, 7 aa, Artificial Sequence
  Synthetic
CLRGICW

SEQ ID NO: 2885 - protein, 7 aa, Artificial Sequence
  Synthetic
HLGIEVA

SEQ ID NO: 2886 - protein, 7 aa, Artificial Sequence
  Synthetic
KCSLIVY

SEQ ID NO: 2887 - protein, 7 aa, Artificial Sequence
  Synthetic
GGLFDMF

SEQ ID NO: 2888 - protein, 7 aa, Artificial Sequence
  Synthetic
LFLRNVY

SEQ ID NO: 2889 - protein, 7 aa, Artificial Sequence
  Synthetic
IRCTLGW

SEQ ID NO: 2890 - protein, 7 aa, Artificial Sequence
  Synthetic
FIYRLVY

SEQ ID NO: 2891 - protein, 7 aa, Artificial Sequence
  Synthetic
INVRVCC

SEQ ID NO: 2892 - protein, 7 aa, Artificial Sequence
  Synthetic
SINGGVY

SEQ ID NO: 2893 - protein, 7 aa, Artificial Sequence
  Synthetic
FLSSVWF

SEQ ID NO: 2894 - protein, 7 aa, Artificial Sequence
  Synthetic
FNCCDVQ

SEQ ID NO: 2895 - protein, 7 aa, Artificial Sequence
  Synthetic
GIFVYGG

SEQ ID NO: 2896 - protein, 7 aa, Artificial Sequence
  Synthetic
GRSRQSD

SEQ ID NO: 2897 - protein, 7 aa, Artificial Sequence
  Synthetic
GCSGIWR

SEQ ID NO: 2898 - protein, 7 aa, Artificial Sequence
  Synthetic
GAEFVGC

SEQ ID NO: 2899 - protein, 7 aa, Artificial Sequence
  Synthetic
NIGILLV

SEQ ID NO: 2900 - protein, 7 aa, Artificial Sequence
  Synthetic
VVGVIVV

SEQ ID NO: 2901 - protein, 7 aa, Artificial Sequence
  Synthetic
VMMPGPT

SEQ ID NO: 2902 - protein, 7 aa, Artificial Sequence
  Synthetic
IVGVCVG

SEQ ID NO: 2903 - protein, 7 aa, Artificial Sequence
  Synthetic
ERYRSVY

SEQ ID NO: 2904 - protein, 7 aa, Artificial Sequence
  Synthetic
VVDRWVC

SEQ ID NO: 2905 - protein, 7 aa, Artificial Sequence
  Synthetic
NIVGCVF

SEQ ID NO: 2906 - protein, 7 aa, Artificial Sequence
  Synthetic
AGLCMYQ

SEQ ID NO: 2907 - protein, 7 aa, Artificial Sequence
  Synthetic
IMPIISW

SEQ ID NO: 2908 - protein, 7 aa, Artificial Sequence
  Synthetic
LFTRVVF

SEQ ID NO: 2909 - protein, 7 aa, Artificial Sequence
  Synthetic
VCNRLVF

SEQ ID NO: 2910 - protein, 7 aa, Artificial Sequence
  Synthetic
GSVTFVH

SEQ ID NO: 2911 - protein, 7 aa, Artificial Sequence
  Synthetic
VAGHLSR

SEQ ID NO: 2912 - protein, 7 aa, Artificial Sequence
  Synthetic
VVGIVHE

SEQ ID NO: 2913 - protein, 7 aa, Artificial Sequence
  Synthetic
MASGDIT

SEQ ID NO: 2914 - protein, 7 aa, Artificial Sequence
  Synthetic
LFRRIVF

SEQ ID NO: 2915 - protein, 7 aa, Artificial Sequence
  Synthetic
SPCIFCC

SEQ ID NO: 2916 - protein, 7 aa, Artificial Sequence
  Synthetic
VVGTLSD

SEQ ID NO: 2917 - protein, 7 aa, Artificial Sequence
  Synthetic
MFSSFWF

SEQ ID NO: 2918 - protein, 7 aa, Artificial Sequence
  Synthetic
SLHGVVF

SEQ ID NO: 2919 - protein, 7 aa, Artificial Sequence
  Synthetic
FMLRVVE

SEQ ID NO: 2920 - protein, 7 aa, Artificial Sequence
  Synthetic
NERHCVF

SEQ ID NO: 2921 - protein, 7 aa, Artificial Sequence
  Synthetic
PVKRCVY

SEQ ID NO: 2922 - protein, 7 aa, Artificial Sequence
  Synthetic
RIGCLVF

SEQ ID NO: 2923 - protein, 7 aa, Artificial Sequence
  Synthetic
CSFKYFI

SEQ ID NO: 2924 - protein, 7 aa, Artificial Sequence
  Synthetic
PEAVLIA

SEQ ID NO: 2925 - protein, 7 aa, Artificial Sequence
  Synthetic
RIVQCVF

SEQ ID NO: 2926 - protein, 7 aa, Artificial Sequence
  Synthetic
LVGFLGH

SEQ ID NO: 2927 - protein, 7 aa, Artificial Sequence
  Synthetic
VTAHCFA

SEQ ID NO: 2928 - protein, 7 aa, Artificial Sequence
  Synthetic
VMFRACF

SEQ ID NO: 2929 - protein, 7 aa, Artificial Sequence
  Synthetic
FLIRDMI

SEQ ID NO: 2930 - protein, 7 aa, Artificial Sequence
  Synthetic
VRPVPYQ

SEQ ID NO: 2931 - protein, 7 aa, Artificial Sequence
  Synthetic
RMNGVCF

SEQ ID NO: 2932 - protein, 5 aa, Artificial Sequence
  Synthetic
GRTLV

SEQ ID NO: 2933 - protein, 7 aa, Artificial Sequence
  Synthetic
IKVYYLV

SEQ ID NO: 2934 - protein, 7 aa, Artificial Sequence
  Synthetic
GMHSVVF

SEQ ID NO: 2935 - protein, 7 aa, Artificial Sequence
  Synthetic
CQSLPCA

SEQ ID NO: 2936 - protein, 7 aa, Artificial Sequence
  Synthetic
LCVCRSS

SEQ ID NO: 2937 - protein, 7 aa, Artificial Sequence
  Synthetic
VPMDVLS

SEQ ID NO: 2938 - protein, 7 aa, Artificial Sequence
  Synthetic
IRAGCLI

SEQ ID NO: 2939 - protein, 7 aa, Artificial Sequence
  Synthetic
FVGLLLS

SEQ ID NO: 2940 - protein, 7 aa, Artificial Sequence
  Synthetic
YVVGMIY

SEQ ID NO: 2941 - protein, 4 aa, Artificial Sequence
  Synthetic
WSSQ

SEQ ID NO: 2942 - protein, 7 aa, Artificial Sequence
  Synthetic
CLAGVVF

SEQ ID NO: 2943 - protein, 7 aa, Artificial Sequence
  Synthetic
FGDLIGC

SEQ ID NO: 2944 - protein, 7 aa, Artificial Sequence
  Synthetic
ICAGFCR

SEQ ID NO: 2945 - protein, 7 aa, Artificial Sequence
  Synthetic
RTNGMVY

SEQ ID NO: 2946 - protein, 7 aa, Artificial Sequence
  Synthetic
SHCSFMY

SEQ ID NO: 2947 - protein, 7 aa, Artificial Sequence
  Synthetic
IDVLLTR

SEQ ID NO: 2948 - protein, 7 aa, Artificial Sequence
  Synthetic
VLSLLLA

SEQ ID NO: 2949 - skipped

SEQ ID NO: 2950 - protein, 7 aa, Artificial Sequence
  Synthetic
SVFQIHW

SEQ ID NO: 2951 - protein, 7 aa, Artificial Sequence
  Synthetic
LFKNVVF

SEQ ID NO: 2952 - protein, 7 aa, Artificial Sequence
  Synthetic
LVRGSVF

SEQ ID NO: 2953 - protein, 7 aa, Artificial Sequence
  Synthetic
LCSRVVI

SEQ ID NO: 2954 - protein, 7 aa, Artificial Sequence
  Synthetic
KYIAYTP

SEQ ID NO: 2955 - protein, 7 aa, Artificial Sequence
  Synthetic
IVGLLVC

SEQ ID NO: 2956 - protein, 7 aa, Artificial Sequence
  Synthetic
KVSDVYV

SEQ ID NO: 2957 - protein, 7 aa, Artificial Sequence
  Synthetic
HHYHLFA

SEQ ID NO: 2958 - protein, 6 aa, Artificial Sequence
  Synthetic
LGRLVL

SEQ ID NO: 2959 - protein, 7 aa, Artificial Sequence
  Synthetic
RFSSAVY

SEQ ID NO: 2960 - protein, 7 aa, Artificial Sequence
  Synthetic
SARKCVQ

SEQ ID NO: 2961 - protein, 7 aa, Artificial Sequence
  Synthetic
VDIRNMC

SEQ ID NO: 2962 - protein, 7 aa, Artificial Sequence
  Synthetic
IRNQLLF

SEQ ID NO: 2963 - protein, 7 aa, Artificial Sequence
  Synthetic
HCDGGFM

SEQ ID NO: 2964 - protein, 7 aa, Artificial Sequence
  Synthetic
NLVRLMG

SEQ ID NO: 2965 - protein, 7 aa, Artificial Sequence
  Synthetic
MCYRCFN

SEQ ID NO: 2966 - protein, 7 aa, Artificial Sequence
  Synthetic
TRFWSSL

SEQ ID NO: 2967 - protein, 7 aa, Artificial Sequence
  Synthetic
ASLPWVL

SEQ ID NO: 2968 - protein, 7 aa, Artificial Sequence
  Synthetic
SFVDRIF

SEQ ID NO: 2969 - protein, 7 aa, Artificial Sequence
  Synthetic
IVILVCQ

SEQ ID NO: 2970 - protein, 7 aa, Artificial Sequence
  Synthetic
GVQCPVL

SEQ ID NO: 2971 - protein, 7 aa, Artificial Sequence
  Synthetic
YGFHGSV

SEQ ID NO: 2972 - protein, 7 aa, Artificial Sequence
  Synthetic
GRYVGVV

SEQ ID NO: 2973 - protein, 7 aa, Artificial Sequence
  Synthetic
LIVSSGL

SEQ ID NO: 2974 - protein, 7 aa, Artificial Sequence
  Synthetic
LLALTVF

SEQ ID NO: 2975 - protein, 6 aa, Artificial Sequence
  Synthetic
LKRLTI

SEQ ID NO: 2976 - protein, 6 aa, Artificial Sequence
  Synthetic
MIGVVY

SEQ ID NO: 2977 - protein, 7 aa, Artificial Sequence
  Synthetic
CYRQRVF

SEQ ID NO: 2978 - protein, 7 aa, Artificial Sequence
  Synthetic
AGDRVLL

SEQ ID NO: 2979 - protein, 7 aa, Artificial Sequence
  Synthetic
DTMDRCF

SEQ ID NO: 2980 - protein, 7 aa, Artificial Sequence
  Synthetic
SAGFRVF

SEQ ID NO: 2981 - protein, 4 aa, Artificial Sequence
  Synthetic
ALSD

SEQ ID NO: 2982 - protein, 6 aa, Artificial Sequence
  Synthetic
GFYGLL

SEQ ID NO: 2983 - protein, 7 aa, Artificial Sequence
  Synthetic
NTWLCFR

SEQ ID NO: 2984 - protein, 7 aa, Artificial Sequence
  Synthetic
IVDMEFQ

SEQ ID NO: 2985 - protein, 7 aa, Artificial Sequence
  Synthetic
FMTHIVY

SEQ ID NO: 2986 - protein, 7 aa, Artificial Sequence
  Synthetic
SIQKVVY

SEQ ID NO: 2987 - protein, 6 aa, Artificial Sequence
  Synthetic
CTNIYC

SEQ ID NO: 2988 - protein, 7 aa, Artificial Sequence
  Synthetic
MSVMCMS

SEQ ID NO: 2989 - protein, 7 aa, Artificial Sequence
  Synthetic
QYLAVCW

SEQ ID NO: 2990 - protein, 7 aa, Artificial Sequence
  Synthetic
LIRHFFV

SEQ ID NO: 2991 - protein, 7 aa, Artificial Sequence
  Synthetic
CYGVVYS

SEQ ID NO: 2992 - protein, 6 aa, Artificial Sequence
  Synthetic
LRNCLW

SEQ ID NO: 2993 - protein, 7 aa, Artificial Sequence
  Synthetic
GYIRQNW

SEQ ID NO: 2994 - protein, 7 aa, Artificial Sequence
  Synthetic
TIRSCVF

SEQ ID NO: 2995 - protein, 7 aa, Artificial Sequence
  Synthetic
LIAPVVY

SEQ ID NO: 2996 - protein, 6 aa, Artificial Sequence
  Synthetic
IQRRVA

SEQ ID NO: 2997 - protein, 7 aa, Artificial Sequence
  Synthetic
NIRRIVY

SEQ ID NO: 2998 - protein, 6 aa, Artificial Sequence
  Synthetic
CCHVFG

SEQ ID NO: 2999 - protein, 7 aa, Artificial Sequence
  Synthetic
IPYAQRS

SEQ ID NO: 3000 - protein, 7 aa, Artificial Sequence
  Synthetic
SFLTVLS

SEQ ID NO: 3001 - protein, 5 aa, Artificial Sequence
  Synthetic
FACVY

SEQ ID NO: 3002 - protein, 7 aa, Artificial Sequence
  Synthetic
RLCDWIW

SEQ ID NO: 3003 - protein, 7 aa, Artificial Sequence
  Synthetic
FSRRYYV

SEQ ID NO: 3004 - protein, 7 aa, Artificial Sequence
  Synthetic
LDVVGGC

SEQ ID NO: 3005 - protein, 7 aa, Artificial Sequence
  Synthetic
DGGFWVA

SEQ ID NO: 3006 - protein, 7 aa, Artificial Sequence
  Synthetic
LMVVTSF

SEQ ID NO: 3007 - protein, 7 aa, Artificial Sequence
  Synthetic
QASEIWL

SEQ ID NO: 3008 - protein, 7 aa, Artificial Sequence
  Synthetic
WRCIGGR

SEQ ID NO: 3009 - protein, 7 aa, Artificial Sequence
  Synthetic
YYMHIEF

SEQ ID NO: 3010 - protein, 7 aa, Artificial Sequence
  Synthetic
VFFSVDR

SEQ ID NO: 3011 - protein, 7 aa, Artificial Sequence
  Synthetic
LLGAPYY

SEQ ID NO: 3012 - protein, 7 aa, Artificial Sequence
  Synthetic
LHSCWIR

SEQ ID NO: 3013 - protein, 7 aa, Artificial Sequence
  Synthetic
YKLSYLA

SEQ ID NO: 3014 - protein, 7 aa, Artificial Sequence
  Synthetic
DRRYNVW

SEQ ID NO: 3015 - protein, 7 aa, Artificial Sequence
  Synthetic
HSYLPLS

SEQ ID NO: 3016 - protein, 7 aa, Artificial Sequence
  Synthetic
TIYRIIY

SEQ ID NO: 3017 - protein, 7 aa, Artificial Sequence
  Synthetic
VCCLVTV

SEQ ID NO: 3018 - protein, 5 aa, Artificial Sequence
  Synthetic
SISMR

SEQ ID NO: 3019 - protein, 7 aa, Artificial Sequence
  Synthetic
YVHFSVL

SEQ ID NO: 3020 - protein, 7 aa, Artificial Sequence
  Synthetic
DRIVVLG

SEQ ID NO: 3021 - protein, 7 aa, Artificial Sequence
  Synthetic
PSVSYVA

SEQ ID NO: 3022 - protein, 7 aa, Artificial Sequence
  Synthetic
GSDLGCW

SEQ ID NO: 3023 - protein, 7 aa, Artificial Sequence
  Synthetic
VGFHWFA

SEQ ID NO: 3024 - protein, 7 aa, Artificial Sequence
  Synthetic
SRASDTS

SEQ ID NO: 3025 - protein, 7 aa, Artificial Sequence
  Synthetic
CCRSVVW

SEQ ID NO: 3026 - protein, 7 aa, Artificial Sequence
  Synthetic
GITNNVT

SEQ ID NO: 3027 - protein, 7 aa, Artificial Sequence
  Synthetic
SVIYICE

SEQ ID NO: 3028 - protein, 7 aa, Artificial Sequence
  Synthetic
SGARRVF

SEQ ID NO: 3029 - protein, 7 aa, Artificial Sequence
  Synthetic
LYHGLVF

SEQ ID NO: 3030 - protein, 7 aa, Artificial Sequence
  Synthetic
PRTGGVY

SEQ ID NO: 3031 - protein, 7 aa, Artificial Sequence
  Synthetic
FHAIARA

SEQ ID NO: 3032 - protein, 7 aa, Artificial Sequence
  Synthetic
QQLRCVN

SEQ ID NO: 3033 - protein, 7 aa, Artificial Sequence
  Synthetic
VGAIVLC

SEQ ID NO: 3034 - protein, 7 aa, Artificial Sequence
  Synthetic
VSSSFPL

SEQ ID NO: 3035 - protein, 7 aa, Artificial Sequence
  Synthetic
TVNALCY

SEQ ID NO: 3036 - protein, 7 aa, Artificial Sequence
  Synthetic
VNCFWHS

SEQ ID NO: 3037 - protein, 7 aa, Artificial Sequence
  Synthetic
DKPLRTP

SEQ ID NO: 3038 - protein, 7 aa, Artificial Sequence
  Synthetic
FGLIRYP

SEQ ID NO: 3039 - protein, 7 aa, Artificial Sequence
  Synthetic
YISALVF

SEQ ID NO: 3040 - protein, 7 aa, Artificial Sequence
  Synthetic
VFPNWGI

SEQ ID NO: 3041 - protein, 7 aa, Artificial Sequence
  Synthetic
VWLRSVY

SEQ ID NO: 3042 - protein, 7 aa, Artificial Sequence
  Synthetic
TWSFMLV

SEQ ID NO: 3043 - protein, 7 aa, Artificial Sequence
  Synthetic
RFLWCVY

SEQ ID NO: 3044 - protein, 7 aa, Artificial Sequence
  Synthetic
LQDVTWI

SEQ ID NO: 3045 - protein, 7 aa, Artificial Sequence
  Synthetic
GNRHVYA

SEQ ID NO: 3046 - protein, 7 aa, Artificial Sequence
  Synthetic
LFNPTIG

SEQ ID NO: 3047 - protein, 7 aa, Artificial Sequence
  Synthetic
SFRWGEE

SEQ ID NO: 3048 - protein, 7 aa, Artificial Sequence
  Synthetic
RLTFLVW

SEQ ID NO: 3049 - protein, 7 aa, Artificial Sequence
  Synthetic
GIHSPLQ

SEQ ID NO: 3050 - protein, 7 aa, Artificial Sequence
  Synthetic
MNIVWSW

SEQ ID NO: 3051 - protein, 7 aa, Artificial Sequence
  Synthetic
CDDDFRV

SEQ ID NO: 3052 - protein, 7 aa, Artificial Sequence
  Synthetic
LMGRLIF

SEQ ID NO: 3053 - protein, 7 aa, Artificial Sequence
  Synthetic
SRIRILA

SEQ ID NO: 3054 - protein, 7 aa, Artificial Sequence
  Synthetic
DYASLVY

SEQ ID NO: 3055 - protein, 7 aa, Artificial Sequence
  Synthetic
SMCDPRS

SEQ ID NO: 3056 - protein, 7 aa, Artificial Sequence
  Synthetic
YIDSHEV

SEQ ID NO: 3057 - protein, 7 aa, Artificial Sequence
  Synthetic
RPYRGSV

SEQ ID NO: 3058 - protein, 7 aa, Artificial Sequence
  Synthetic
LMHRVVF

SEQ ID NO: 3059 - protein, 6 aa, Artificial Sequence
  Synthetic
VCHVVW

SEQ ID NO: 3060 - protein, 7 aa, Artificial Sequence
  Synthetic
VDARALS

SEQ ID NO: 3061 - protein, 7 aa, Artificial Sequence
  Synthetic
GHAEMYQ

SEQ ID NO: 3062 - protein, 7 aa, Artificial Sequence
  Synthetic
LDSGVVF

SEQ ID NO: 3063 - protein, 7 aa, Artificial Sequence
  Synthetic
IRGFIVC

SEQ ID NO: 3064 - protein, 7 aa, Artificial Sequence
  Synthetic
YASEIRS

SEQ ID NO: 3065 - protein, 7 aa, Artificial Sequence
  Synthetic
RVVDMLH

SEQ ID NO: 3066 - protein, 7 aa, Artificial Sequence
  Synthetic
CLDMCYV

SEQ ID NO: 3067 - protein, 7 aa, Artificial Sequence
  Synthetic
ICEPMWA

SEQ ID NO: 3068 - protein, 7 aa, Artificial Sequence
  Synthetic
MYIGDVL

SEQ ID NO: 3069 - protein, 7 aa, Artificial Sequence
  Synthetic
VFWTERW

SEQ ID NO: 3070 - protein, 7 aa, Artificial Sequence
  Synthetic
FSSPWLC

SEQ ID NO: 3071 - protein, 7 aa, Artificial Sequence
  Synthetic
VCVHCFA

SEQ ID NO: 3072 - protein, 7 aa, Artificial Sequence
  Synthetic
SNVPMNS

SEQ ID NO: 3073 - protein, 7 aa, Artificial Sequence
  Synthetic
KLGHVVF

SEQ ID NO: 3074 - protein, 7 aa, Artificial Sequence
  Synthetic
AFVGCWT

SEQ ID NO: 3075 - protein, 7 aa, Artificial Sequence
  Synthetic
FDLSWVQ

SEQ ID NO: 3076 - protein, 7 aa, Artificial Sequence
  Synthetic
CSVLRGT

SEQ ID NO: 3077 - protein, 7 aa, Artificial Sequence
  Synthetic
RGFDWFQ

SEQ ID NO: 3078 - protein, 7 aa, Artificial Sequence
  Synthetic
LSCGIGS

SEQ ID NO: 3079 - protein, 7 aa, Artificial Sequence
  Synthetic
GLRRMGG

SEQ ID NO: 3080 - protein, 7 aa, Artificial Sequence
  Synthetic
KPGPMLY

SEQ ID NO: 3081 - protein, 7 aa, Artificial Sequence
  Synthetic
AFGGVCW

SEQ ID NO: 3082 - protein, 7 aa, Artificial Sequence
  Synthetic
DCLIGGV

SEQ ID NO: 3083 - protein, 7 aa, Artificial Sequence
  Synthetic
VSHYWCR

SEQ ID NO: 3084 - protein, 7 aa, Artificial Sequence
  Synthetic
RLHEIFY

SEQ ID NO: 3085 - protein, 7 aa, Artificial Sequence
  Synthetic
PMLCGFP

SEQ ID NO: 3086 - protein, 7 aa, Artificial Sequence
  Synthetic
FIRNCML

SEQ ID NO: 3087 - protein, 7 aa, Artificial Sequence
  Synthetic
PVLRVTF

SEQ ID NO: 3088 - protein, 7 aa, Artificial Sequence
  Synthetic
VARFRGT

SEQ ID NO: 3089 - protein, 7 aa, Artificial Sequence
  Synthetic
DVDHVFV

SEQ ID NO: 3090 - protein, 7 aa, Artificial Sequence
  Synthetic
ILGILAY

SEQ ID NO: 3091 - protein, 7 aa, Artificial Sequence
  Synthetic
PGRRTIS

SEQ ID NO: 3092 - protein, 7 aa, Artificial Sequence
  Synthetic
INACYEH

SEQ ID NO: 3093 - protein, 7 aa, Artificial Sequence
  Synthetic
GDSLFGV

SEQ ID NO: 3094 - protein, 7 aa, Artificial Sequence
  Synthetic
DEFRRSG

SEQ ID NO: 3095 - protein, 7 aa, Artificial Sequence
  Synthetic
TRDCGAS

SEQ ID NO: 3096 - protein, 7 aa, Artificial Sequence
  Synthetic
NLDSIVF

SEQ ID NO: 3097 - protein, 7 aa, Artificial Sequence
  Synthetic
KRRVLVE

SEQ ID NO: 3098 - protein, 7 aa, Artificial Sequence
  Synthetic
ARRCMLW

SEQ ID NO: 3099 - protein, 7 aa, Artificial Sequence
  Synthetic
HVARVVF

SEQ ID NO: 3100 - protein, 7 aa, Artificial Sequence
  Synthetic
SIPFGGQ

SEQ ID NO: 3101 - protein, 7 aa, Artificial Sequence
  Synthetic
CIVGYPC

SEQ ID NO: 3102 - protein, 7 aa, Artificial Sequence
  Synthetic
TLTGVVY

SEQ ID NO: 3103 - protein, 7 aa, Artificial Sequence
  Synthetic
NRPHVCQ

SEQ ID NO: 3104 - protein, 7 aa, Artificial Sequence
  Synthetic
VVDLLIS

SEQ ID NO: 3105 - protein, 7 aa, Artificial Sequence
  Synthetic
TQVRPAC

SEQ ID NO: 3106 - protein, 7 aa, Artificial Sequence
  Synthetic
YHLEMSG

SEQ ID NO: 3107 - protein, 7 aa, Artificial Sequence
  Synthetic
FIDFGQS

SEQ ID NO: 3108 - protein, 7 aa, Artificial Sequence
  Synthetic
SGSVVFA

SEQ ID NO: 3109 - protein, 7 aa, Artificial Sequence
  Synthetic
RILKCVF

SEQ ID NO: 3110 - protein, 6 aa, Artificial Sequence
  Synthetic
HCLEQS

SEQ ID NO: 3111 - protein, 7 aa, Artificial Sequence
  Synthetic
YFSGCVF

SEQ ID NO: 3112 - protein, 7 aa, Artificial Sequence
  Synthetic
APTGLVY

SEQ ID NO: 3113 - protein, 7 aa, Artificial Sequence
  Synthetic
VVSLLIW

SEQ ID NO: 3114 - protein, 7 aa, Artificial Sequence
  Synthetic
ALDGRIY

SEQ ID NO: 3115 - protein, 7 aa, Artificial Sequence
  Synthetic
RVKRLIF

SEQ ID NO: 3116 - protein, 7 aa, Artificial Sequence
  Synthetic
ILKCRVF

SEQ ID NO: 3117 - protein, 7 aa, Artificial Sequence
  Synthetic
FISSCVF

SEQ ID NO: 3118 - protein, 7 aa, Artificial Sequence
  Synthetic
GHSGTPS

SEQ ID NO: 3119 - protein, 7 aa, Artificial Sequence
  Synthetic
AVAGHGG

SEQ ID NO: 3120 - protein, 7 aa, Artificial Sequence
  Synthetic
FTHEMWR

SEQ ID NO: 3121 - protein, 7 aa, Artificial Sequence
  Synthetic
LRLRMYG

SEQ ID NO: 3122 - protein, 7 aa, Artificial Sequence
  Synthetic
RCHGSVQ

SEQ ID NO: 3123 - protein, 7 aa, Artificial Sequence
  Synthetic
YLCRCTF

SEQ ID NO: 3124 - protein, 7 aa, Artificial Sequence
  Synthetic
VGHVLSA

SEQ ID NO: 3125 - protein, 7 aa, Artificial Sequence
  Synthetic
VTGSSND

SEQ ID NO: 3126 - protein, 7 aa, Artificial Sequence
  Synthetic
PLVCWHD

SEQ ID NO: 3127 - protein, 7 aa, Artificial Sequence
  Synthetic
YFERIVF

SEQ ID NO: 3128 - protein, 7 aa, Artificial Sequence
  Synthetic
CIMSLVW

SEQ ID NO: 3129 - protein, 7 aa, Artificial Sequence
  Synthetic
VVALIMS

SEQ ID NO: 3130 - protein, 7 aa, Artificial Sequence
  Synthetic
SMKVVLL

SEQ ID NO: 3131 - protein, 7 aa, Artificial Sequence
  Synthetic
GPGYVVW

SEQ ID NO: 3132 - protein, 7 aa, Artificial Sequence
  Synthetic
SCVSVRF

SEQ ID NO: 3133 - protein, 7 aa, Artificial Sequence
  Synthetic
WPCFTRY

SEQ ID NO: 3134 - protein, 7 aa, Artificial Sequence
  Synthetic
SLRAKVY

SEQ ID NO: 3135 - protein, 7 aa, Artificial Sequence
  Synthetic
CWVGACM

SEQ ID NO: 3136 - protein, 7 aa, Artificial Sequence
  Synthetic
AARRLVF

SEQ ID NO: 3137 - protein, 7 aa, Artificial Sequence
  Synthetic
PRDFVRV

SEQ ID NO: 3138 - protein, 7 aa, Artificial Sequence
  Synthetic
SSNCWVL

SEQ ID NO: 3139 - protein, 7 aa, Artificial Sequence
  Synthetic
SVVDPQL

SEQ ID NO: 3140 - protein, 7 aa, Artificial Sequence
  Synthetic
HSLPGVI

SEQ ID NO: 3141 - protein, 7 aa, Artificial Sequence
  Synthetic
IFNKVVF

SEQ ID NO: 3142 - protein, 7 aa, Artificial Sequence
  Synthetic
PVEFWYW

SEQ ID NO: 3143 - protein, 7 aa, Artificial Sequence
  Synthetic
FEQFDWR

SEQ ID NO: 3144 - protein, 7 aa, Artificial Sequence
  Synthetic
FASDLCF

SEQ ID NO: 3145 - protein, 7 aa, Artificial Sequence
  Synthetic
ALSCGVF

SEQ ID NO: 3146 - protein, 7 aa, Artificial Sequence
  Synthetic
DGRRVVY

SEQ ID NO: 3147 - protein, 7 aa, Artificial Sequence
  Synthetic
RADIYWM

SEQ ID NO: 3148 - protein, 7 aa, Artificial Sequence
  Synthetic
HARCSVI

SEQ ID NO: 3149 - protein, 7 aa, Artificial Sequence
  Synthetic
GLHLALT

SEQ ID NO: 3150 - protein, 7 aa, Artificial Sequence
  Synthetic
NDLRCLI

SEQ ID NO: 3151 - protein, 5 aa, Artificial Sequence
  Synthetic
KWLVY

SEQ ID NO: 3152 - protein, 7 aa, Artificial Sequence
  Synthetic
GHTCGSR

SEQ ID NO: 3153 - protein, 7 aa, Artificial Sequence
  Synthetic
DYLYVYA

SEQ ID NO: 3154 - protein, 7 aa, Artificial Sequence
  Synthetic
ICCCYET

SEQ ID NO: 3155 - protein, 7 aa, Artificial Sequence
  Synthetic
VVGVVLG

SEQ ID NO: 3156 - protein, 7 aa, Artificial Sequence
  Synthetic
TRTVNVC

SEQ ID NO: 3157 - protein, 7 aa, Artificial Sequence
  Synthetic
FHVGSNV

SEQ ID NO: 3158 - protein, 7 aa, Artificial Sequence
  Synthetic
STSYYTY

SEQ ID NO: 3159 - protein, 7 aa, Artificial Sequence
  Synthetic
RCHRRVY

SEQ ID NO: 3160 - protein, 7 aa, Artificial Sequence
  Synthetic
GQIPALV

SEQ ID NO: 3161 - protein, 7 aa, Artificial Sequence
  Synthetic
GFCYADR

SEQ ID NO: 3162 - protein, 7 aa, Artificial Sequence
  Synthetic
PAYYFSR

SEQ ID NO: 3163 - protein, 7 aa, Artificial Sequence
  Synthetic
HQDCVVH

SEQ ID NO: 3164 - protein, 7 aa, Artificial Sequence
  Synthetic
LTLLPFC

SEQ ID NO: 3165 - protein, 7 aa, Artificial Sequence
  Synthetic
KIFESFR

SEQ ID NO: 3166 - protein, 7 aa, Artificial Sequence
  Synthetic
ATCRVIR

SEQ ID NO: 3167 - protein, 7 aa, Artificial Sequence
  Synthetic
IRRSYST

SEQ ID NO: 3168 - protein, 7 aa, Artificial Sequence
  Synthetic
KNVIINV

SEQ ID NO: 3169 - protein, 7 aa, Artificial Sequence
  Synthetic
SARWVVY

SEQ ID NO: 3170 - protein, 7 aa, Artificial Sequence
  Synthetic
GSVRIVY

SEQ ID NO: 3171 - protein, 7 aa, Artificial Sequence
  Synthetic
TVVKVHW

SEQ ID NO: 3172 - protein, 7 aa, Artificial Sequence
  Synthetic
MSSWCTW

SEQ ID NO: 3173 - protein, 7 aa, Artificial Sequence
  Synthetic
KFVYCLA

SEQ ID NO: 3174 - protein, 7 aa, Artificial Sequence
  Synthetic
VIERLVY

SEQ ID NO: 3175 - protein, 8 aa, Artificial Sequence
  Synthetic
FDFAGDVA

SEQ ID NO: 3176 - protein, 7 aa, Artificial Sequence
  Synthetic
DTLCNSI

SEQ ID NO: 3177 - protein, 7 aa, Artificial Sequence
  Synthetic
SDVPGPY

SEQ ID NO: 3178 - protein, 7 aa, Artificial Sequence
  Synthetic
SCSKRVF

SEQ ID NO: 3179 - protein, 7 aa, Artificial Sequence
  Synthetic
NSLHVFA

SEQ ID NO: 3180 - protein, 7 aa, Artificial Sequence
  Synthetic
YLPRVDD

SEQ ID NO: 3181 - protein, 7 aa, Artificial Sequence
  Synthetic
SFAFSLC

SEQ ID NO: 3182 - protein, 7 aa, Artificial Sequence
  Synthetic
CFPYDFW

SEQ ID NO: 3183 - protein, 7 aa, Artificial Sequence
  Synthetic
FACHWCA

SEQ ID NO: 3184 - protein, 7 aa, Artificial Sequence
  Synthetic
RTSRIVG

SEQ ID NO: 3185 - protein, 7 aa, Artificial Sequence
  Synthetic
VASADVL

SEQ ID NO: 3186 - protein, 7 aa, Artificial Sequence
  Synthetic
YYHNIVY

SEQ ID NO: 3187 - protein, 7 aa, Artificial Sequence
  Synthetic
SVSAVFQ

SEQ ID NO: 3188 - protein, 7 aa, Artificial Sequence
  Synthetic
CSLRVVY

SEQ ID NO: 3189 - protein, 7 aa, Artificial Sequence
  Synthetic
VVGILAS

SEQ ID NO: 3190 - protein, 7 aa, Artificial Sequence
  Synthetic
GSYLVYR

SEQ ID NO: 3191 - protein, 7 aa, Artificial Sequence
  Synthetic
SHVTNEF

SEQ ID NO: 3192 - protein, 7 aa, Artificial Sequence
  Synthetic
QAAVCFA

SEQ ID NO: 3193 - protein, 7 aa, Artificial Sequence
  Synthetic
VNTEFVC

SEQ ID NO: 3194 - protein, 6 aa, Artificial Sequence
  Synthetic
FHRVTG

SEQ ID NO: 3195 - protein, 7 aa, Artificial Sequence
  Synthetic
GLRAIMC

SEQ ID NO: 3196 - protein, 7 aa, Artificial Sequence
  Synthetic
CRMCAFT

SEQ ID NO: 3197 - protein, 7 aa, Artificial Sequence
  Synthetic
VPIDYVM

SEQ ID NO: 3198 - protein, 7 aa, Artificial Sequence
  Synthetic
VSHHVFG

SEQ ID NO: 3199 - protein, 7 aa, Artificial Sequence
  Synthetic
TIVKSIA

SEQ ID NO: 3200 - protein, 7 aa, Artificial Sequence
  Synthetic
DAFIVSH

SEQ ID NO: 3201 - protein, 7 aa, Artificial Sequence
  Synthetic
CLVSYEC

SEQ ID NO: 3202 - protein, 7 aa, Artificial Sequence
  Synthetic
YFVSIVW

SEQ ID NO: 3203 - protein, 7 aa, Artificial Sequence
  Synthetic
VVGYPIA

SEQ ID NO: 3204 - protein, 7 aa, Artificial Sequence
  Synthetic
IIGCSVY

SEQ ID NO: 3205 - protein, 7 aa, Artificial Sequence
  Synthetic
ISKRAWS

SEQ ID NO: 3206 - protein, 7 aa, Artificial Sequence
  Synthetic
ATMSSEW

SEQ ID NO: 3207 - protein, 7 aa, Artificial Sequence
  Synthetic
TIVQYYP

SEQ ID NO: 3208 - protein, 7 aa, Artificial Sequence
  Synthetic
GLVAWAF

SEQ ID NO: 3209 - protein, 7 aa, Artificial Sequence
  Synthetic
PLLRVVY

SEQ ID NO: 3210 - protein, 7 aa, Artificial Sequence
  Synthetic
AKNGMIG

SEQ ID NO: 3211 - protein, 7 aa, Artificial Sequence
  Synthetic
CTFNVIW

SEQ ID NO: 3212 - protein, 7 aa, Artificial Sequence
  Synthetic
TFLPFIQ

SEQ ID NO: 3213 - protein, 7 aa, Artificial Sequence
  Synthetic
IMGLIRL

SEQ ID NO: 3214 - protein, 7 aa, Artificial Sequence
  Synthetic
VLGIVES

SEQ ID NO: 3215 - protein, 7 aa, Artificial Sequence
  Synthetic
SRTHPLR

SEQ ID NO: 3216 - protein, 7 aa, Artificial Sequence
  Synthetic
DTNACVY

SEQ ID NO: 3217 - protein, 6 aa, Artificial Sequence
  Synthetic
ASRTVY

SEQ ID NO: 3218 - protein, 7 aa, Artificial Sequence
  Synthetic
LAGGVVY

SEQ ID NO: 3219 - protein, 7 aa, Artificial Sequence
  Synthetic
RLSGLVW

SEQ ID NO: 3220 - protein, 7 aa, Artificial Sequence
  Synthetic
PLVRACY

SEQ ID NO: 3221 - protein, 7 aa, Artificial Sequence
  Synthetic
SVTARVD

SEQ ID NO: 3222 - protein, 6 aa, Artificial Sequence
  Synthetic
CVLYVF

SEQ ID NO: 3223 - protein, 7 aa, Artificial Sequence
  Synthetic
ISVSFWF

SEQ ID NO: 3224 - protein, 7 aa, Artificial Sequence
  Synthetic
RGVGTVY

SEQ ID NO: 3225 - protein, 7 aa, Artificial Sequence
  Synthetic
CLICYST

SEQ ID NO: 3226 - protein, 7 aa, Artificial Sequence
  Synthetic
TMLHIFS

SEQ ID NO: 3227 - protein, 7 aa, Artificial Sequence
  Synthetic
CVLMATS

SEQ ID NO: 3228 - protein, 7 aa, Artificial Sequence
  Synthetic
QALSCFN

SEQ ID NO: 3229 - protein, 7 aa, Artificial Sequence
  Synthetic
AHARTVW

SEQ ID NO: 3230 - protein, 7 aa, Artificial Sequence
  Synthetic
CLSNYLN

SEQ ID NO: 3231 - protein, 7 aa, Artificial Sequence
  Synthetic
AGSRCVY

SEQ ID NO: 3232 - protein, 7 aa, Artificial Sequence
  Synthetic
DVVNYYT

SEQ ID NO: 3233 - protein, 7 aa, Artificial Sequence
  Synthetic
ICTLTCW

SEQ ID NO: 3234 - protein, 7 aa, Artificial Sequence
  Synthetic
YSGRMVW

SEQ ID NO: 3235 - protein, 7 aa, Artificial Sequence
  Synthetic
TYLTMLG

SEQ ID NO: 3236 - protein, 7 aa, Artificial Sequence
  Synthetic
VLYGEVY

SEQ ID NO: 3237 - protein, 7 aa, Artificial Sequence
  Synthetic
SGLRVMG

SEQ ID NO: 3238 - protein, 7 aa, Artificial Sequence
  Synthetic
HARGGAC

SEQ ID NO: 3239 - protein, 7 aa, Artificial Sequence
  Synthetic
IQSMFHY

SEQ ID NO: 3240 - protein, 7 aa, Artificial Sequence
  Synthetic
SGYRVVY

SEQ ID NO: 3241 - protein, 7 aa, Artificial Sequence
  Synthetic
LSGGVAI

SEQ ID NO: 3242 - protein, 7 aa, Artificial Sequence
  Synthetic
VTFSLFR

SEQ ID NO: 3243 - protein, 7 aa, Artificial Sequence
  Synthetic
AYTNLCC

SEQ ID NO: 3244 - protein, 7 aa, Artificial Sequence
  Synthetic
ILVCYTV

SEQ ID NO: 3245 - protein, 7 aa, Artificial Sequence
  Synthetic
FASNRRF

SEQ ID NO: 3246 - protein, 7 aa, Artificial Sequence
  Synthetic
PVRCFVW

SEQ ID NO: 3247 - protein, 7 aa, Artificial Sequence
  Synthetic
MVKRWVY

SEQ ID NO: 3248 - protein, 7 aa, Artificial Sequence
  Synthetic
GVSSIVV

SEQ ID NO: 3249 - protein, 7 aa, Artificial Sequence
  Synthetic
YSFAADQ

SEQ ID NO: 3250 - protein, 7 aa, Artificial Sequence
  Synthetic
GSGYVGY

SEQ ID NO: 3251 - protein, 7 aa, Artificial Sequence
  Synthetic
NIWYHGQ

SEQ ID NO: 3252 - protein, 7 aa, Artificial Sequence
  Synthetic
CVRSSVY

SEQ ID NO: 3253 - protein, 5 aa, Artificial Sequence
  Synthetic
GRVIA

SEQ ID NO: 3254 - protein, 7 aa, Artificial Sequence
  Synthetic
SLRGLLV

SEQ ID NO: 3255 - protein, 6 aa, Artificial Sequence
  Synthetic
TSSWEW

SEQ ID NO: 3256 - protein, 7 aa, Artificial Sequence
  Synthetic
AFVWSAV

SEQ ID NO: 3257 - protein, 6 aa, Artificial Sequence
  Synthetic
LQRVVH

SEQ ID NO: 3258 - protein, 5 aa, Artificial Sequence
  Synthetic
CHLVY

SEQ ID NO: 3259 - protein, 7 aa, Artificial Sequence
  Synthetic
SWHIVGA

SEQ ID NO: 3260 - protein, 6 aa, Artificial Sequence
  Synthetic
VTINSN

SEQ ID NO: 3261 - protein, 7 aa, Artificial Sequence
  Synthetic
HDGLRVT

SEQ ID NO: 3262 - protein, 7 aa, Artificial Sequence
  Synthetic
VFAKVKG

SEQ ID NO: 3263 - protein, 7 aa, Artificial Sequence
  Synthetic
TTCQCCF

SEQ ID NO: 3264 - protein, 7 aa, Artificial Sequence
  Synthetic
VRCLDAF

SEQ ID NO: 3265 - protein, 5 aa, Artificial Sequence
  Synthetic
NLCSF

SEQ ID NO: 3266 - protein, 7 aa, Artificial Sequence
  Synthetic
FLNSLVF

SEQ ID NO: 3267 - protein, 7 aa, Artificial Sequence
  Synthetic
SFGLVRF

SEQ ID NO: 3268 - protein, 7 aa, Artificial Sequence
  Synthetic
GRCYMSS

SEQ ID NO: 3269 - protein, 7 aa, Artificial Sequence
  Synthetic
SVAALRF

SEQ ID NO: 3270 - protein, 7 aa, Artificial Sequence
  Synthetic
GSTGQVY

SEQ ID NO: 3271 - protein, 7 aa, Artificial Sequence
  Synthetic
TSCPFQC

SEQ ID NO: 3272 - protein, 6 aa, Artificial Sequence
  Synthetic
MNRKAR

SEQ ID NO: 3273 - protein, 7 aa, Artificial Sequence
  Synthetic
LVCCSCT

SEQ ID NO: 3274 - protein, 7 aa, Artificial Sequence
  Synthetic
EFVRVFA

SEQ ID NO: 3275 - protein, 7 aa, Artificial Sequence
  Synthetic
CAYNWFC

SEQ ID NO: 3276 - protein, 7 aa, Artificial Sequence
  Synthetic
ATCDAFR

SEQ ID NO: 3277 - protein, 7 aa, Artificial Sequence
  Synthetic
TFARCLV

SEQ ID NO: 3278 - protein, 7 aa, Artificial Sequence
  Synthetic
NILYVFG

SEQ ID NO: 3279 - protein, 7 aa, Artificial Sequence
  Synthetic
HICGCVF

SEQ ID NO: 3280 - protein, 5 aa, Artificial Sequence
  Synthetic
KSMIW

SEQ ID NO: 3281 - protein, 5 aa, Artificial Sequence
  Synthetic
GTPGR

SEQ ID NO: 3282 - protein, 7 aa, Artificial Sequence
  Synthetic
AHGGLVY

SEQ ID NO: 3283 - protein, 7 aa, Artificial Sequence
  Synthetic
GTRGCIC

SEQ ID NO: 3284 - protein, 7 aa, Artificial Sequence
  Synthetic
GSLWQWM

SEQ ID NO: 3285 - protein, 7 aa, Artificial Sequence
  Synthetic
GQGDAFC

SEQ ID NO: 3286 - protein, 7 aa, Artificial Sequence
  Synthetic
SLVNVVW

SEQ ID NO: 3287 - protein, 6 aa, Artificial Sequence
  Synthetic
SVTVRA

SEQ ID NO: 3288 - protein, 7 aa, Artificial Sequence
  Synthetic
PYLGRLA

SEQ ID NO: 3289 - protein, 7 aa, Artificial Sequence
  Synthetic
GRGCCVY

SEQ ID NO: 3290 - protein, 7 aa, Artificial Sequence
  Synthetic
PRCYCVW

SEQ ID NO: 3291 - protein, 6 aa, Artificial Sequence
  Synthetic
LSAVCF

SEQ ID NO: 3292 - protein, 7 aa, Artificial Sequence
  Synthetic
FSVVRCS

SEQ ID NO: 3293 - protein, 7 aa, Artificial Sequence
  Synthetic
LSVLTQR

SEQ ID NO: 3294 - protein, 6 aa, Artificial Sequence
  Synthetic
ARSITL

SEQ ID NO: 3295 - protein, 7 aa, Artificial Sequence
  Synthetic
FGVYYLG

SEQ ID NO: 3296 - protein, 7 aa, Artificial Sequence
  Synthetic
TGVGSVF

SEQ ID NO: 3297 - protein, 7 aa, Artificial Sequence
  Synthetic
RLTRTIG

SEQ ID NO: 3298 - protein, 7 aa, Artificial Sequence
  Synthetic
SADVAPT

SEQ ID NO: 3299 - protein, 7 aa, Artificial Sequence
  Synthetic
MCDRFIW

SEQ ID NO: 3300 - protein, 7 aa, Artificial Sequence
  Synthetic
AGFLLIA

SEQ ID NO: 3301 - protein, 7 aa, Artificial Sequence
  Synthetic
IEMVPLG

SEQ ID NO: 3302 - protein, 7 aa, Artificial Sequence
  Synthetic
NGRVNVS

SEQ ID NO: 3303 - protein, 7 aa, Artificial Sequence
  Synthetic
VTSLIQH

SEQ ID NO: 3304 - protein, 7 aa, Artificial Sequence
  Synthetic
SVASWCM

SEQ ID NO: 3305 - protein, 7 aa, Artificial Sequence
  Synthetic
VVSHCVF

SEQ ID NO: 3306 - protein, 7 aa, Artificial Sequence
  Synthetic
CASNLLG

SEQ ID NO: 3307 - protein, 7 aa, Artificial Sequence
  Synthetic
VHHGMVF

SEQ ID NO: 3308 - protein, 7 aa, Artificial Sequence
  Synthetic
SKGVSMA

SEQ ID NO: 3309 - protein, 7 aa, Artificial Sequence
  Synthetic
FGLGPGW

SEQ ID NO: 3310 - protein, 7 aa, Artificial Sequence
  Synthetic
RADSYIW

SEQ ID NO: 3311 - protein, 7 aa, Artificial Sequence
  Synthetic
LLRYNTY

SEQ ID NO: 3312 - protein, 7 aa, Artificial Sequence
  Synthetic
RFVFSLY

SEQ ID NO: 3313 - protein, 7 aa, Artificial Sequence
  Synthetic
WIKWLHV

SEQ ID NO: 3314 - protein, 7 aa, Artificial Sequence
  Synthetic
FLMERHT

SEQ ID NO: 3315 - protein, 7 aa, Artificial Sequence
  Synthetic
GSMIVTL

SEQ ID NO: 3316 - protein, 7 aa, Artificial Sequence
  Synthetic
VFGAYNV

SEQ ID NO: 3317 - protein, 7 aa, Artificial Sequence
  Synthetic
FIRRRVY

SEQ ID NO: 3318 - protein, 7 aa, Artificial Sequence
  Synthetic
LIRSVVW

SEQ ID NO: 3319 - protein, 7 aa, Artificial Sequence
  Synthetic
ALGGCVF

SEQ ID NO: 3320 - protein, 7 aa, Artificial Sequence
  Synthetic
FVLCTRS

SEQ ID NO: 3321 - protein, 7 aa, Artificial Sequence
  Synthetic
HYLKVFG

SEQ ID NO: 3322 - protein, 7 aa, Artificial Sequence
  Synthetic
VVLTFTD

SEQ ID NO: 3323 - protein, 7 aa, Artificial Sequence
  Synthetic
LYSYLAI

SEQ ID NO: 3324 - protein, 7 aa, Artificial Sequence
  Synthetic
MVMRCVF

SEQ ID NO: 3325 - protein, 7 aa, Artificial Sequence
  Synthetic
GRAYYVC

SEQ ID NO: 3326 - protein, 7 aa, Artificial Sequence
  Synthetic
DMSGVFI

SEQ ID NO: 3327 - protein, 7 aa, Artificial Sequence
  Synthetic
YFKCLVY

SEQ ID NO: 3328 - protein, 7 aa, Artificial Sequence
  Synthetic
LILRWSV

SEQ ID NO: 3329 - protein, 7 aa, Artificial Sequence
  Synthetic
STHTLLA

SEQ ID NO: 3330 - protein, 7 aa, Artificial Sequence
  Synthetic
HSIAQYY

SEQ ID NO: 3331 - protein, 7 aa, Artificial Sequence
  Synthetic
RLPCLVY

SEQ ID NO: 3332 - protein, 7 aa, Artificial Sequence
  Synthetic
VMGIVSG

SEQ ID NO: 3333 - protein, 7 aa, Artificial Sequence
  Synthetic
WPRRPLG

SEQ ID NO: 3334 - protein, 7 aa, Artificial Sequence
  Synthetic
PSRPVVY

SEQ ID NO: 3335 - protein, 7 aa, Artificial Sequence
  Synthetic
WGSSPVS

SEQ ID NO: 3336 - protein, 7 aa, Artificial Sequence
  Synthetic
CWRHMFV

SEQ ID NO: 3337 - protein, 7 aa, Artificial Sequence
  Synthetic
YVGSNVY

SEQ ID NO: 3338 - protein, 7 aa, Artificial Sequence
  Synthetic
GFNVVLW

SEQ ID NO: 3339 - protein, 7 aa, Artificial Sequence
  Synthetic
EYMRIMI

SEQ ID NO: 3340 - protein, 7 aa, Artificial Sequence
  Synthetic
YFERIYC

SEQ ID NO: 3341 - protein, 7 aa, Artificial Sequence
  Synthetic
LRSSWGR

SEQ ID NO: 3342 - protein, 7 aa, Artificial Sequence
  Synthetic
PDTRVVY

SEQ ID NO: 3343 - protein, 7 aa, Artificial Sequence
  Synthetic
VCIVCGN

SEQ ID NO: 3344 - protein, 7 aa, Artificial Sequence
  Synthetic
ASRTCGF

SEQ ID NO: 3345 - protein, 7 aa, Artificial Sequence
  Synthetic
KGCFWHA

SEQ ID NO: 3346 - protein, 7 aa, Artificial Sequence
  Synthetic
YTNNYVF

SEQ ID NO: 3347 - protein, 7 aa, Artificial Sequence
  Synthetic
IGGLTLV

SEQ ID NO: 3348 - protein, 7 aa, Artificial Sequence
  Synthetic
GRNPIVW

SEQ ID NO: 3349 - protein, 7 aa, Artificial Sequence
  Synthetic
FMRGSLY

SEQ ID NO: 3350 - protein, 7 aa, Artificial Sequence
  Synthetic
NYGGVYT

SEQ ID NO: 3351 - protein, 7 aa, Artificial Sequence
  Synthetic
VSGIIRI

SEQ ID NO: 3352 - protein, 7 aa, Artificial Sequence
  Synthetic
VSFCERF

SEQ ID NO: 3353 - protein, 7 aa, Artificial Sequence
  Synthetic
TTYNRVH

SEQ ID NO: 3354 - protein, 7 aa, Artificial Sequence
  Synthetic
FYCGYVS

SEQ ID NO: 3355 - protein, 7 aa, Artificial Sequence
  Synthetic
EYMGLLG

SEQ ID NO: 3356 - protein, 7 aa, Artificial Sequence
  Synthetic
SGCYPPF

SEQ ID NO: 3357 - protein, 7 aa, Artificial Sequence
  Synthetic
NACVVFR

SEQ ID NO: 3358 - protein, 7 aa, Artificial Sequence
  Synthetic
VRISIWV

SEQ ID NO: 3359 - protein, 7 aa, Artificial Sequence
  Synthetic
RVIGLWA

SEQ ID NO: 3360 - protein, 7 aa, Artificial Sequence
  Synthetic
TCLHCLG

SEQ ID NO: 3361 - protein, 7 aa, Artificial Sequence
  Synthetic
LDCFYYL

SEQ ID NO: 3362 - protein, 7 aa, Artificial Sequence
  Synthetic
KMHRVIW

SEQ ID NO: 3363 - protein, 7 aa, Artificial Sequence
  Synthetic
ACYSGYV

SEQ ID NO: 3364 - protein, 7 aa, Artificial Sequence
  Synthetic
VYMAYCR

SEQ ID NO: 3365 - protein, 7 aa, Artificial Sequence
  Synthetic
AHHQSVI

SEQ ID NO: 3366 - protein, 7 aa, Artificial Sequence
  Synthetic
ERCSWSS

SEQ ID NO: 3367 - protein, 7 aa, Artificial Sequence
  Synthetic
LRVRVMA

SEQ ID NO: 3368 - protein, 7 aa, Artificial Sequence
  Synthetic
VPTCNVY

SEQ ID NO: 3369 - protein, 7 aa, Artificial Sequence
  Synthetic
GCMDMFV

SEQ ID NO: 3370 - protein, 7 aa, Artificial Sequence
  Synthetic
RCSRCCY

SEQ ID NO: 3371 - protein, 7 aa, Artificial Sequence
  Synthetic
NFVVVFG

SEQ ID NO: 3372 - protein, 7 aa, Artificial Sequence
  Synthetic
WSVKVFD

SEQ ID NO: 3373 - protein, 7 aa, Artificial Sequence
  Synthetic
TLSLRSH

SEQ ID NO: 3374 - protein, 5 aa, Artificial Sequence
  Synthetic
LPVPC

SEQ ID NO: 3375 - protein, 7 aa, Artificial Sequence
  Synthetic
GLHFVYS

SEQ ID NO: 3376 - protein, 7 aa, Artificial Sequence
  Synthetic
CFSAVGS

SEQ ID NO: 3377 - protein, 7 aa, Artificial Sequence
  Synthetic
LGVVLVQ

SEQ ID NO: 3378 - protein, 7 aa, Artificial Sequence
  Synthetic
YLFCTMA

SEQ ID NO: 3379 - protein, 7 aa, Artificial Sequence
  Synthetic
FTERVVS

SEQ ID NO: 3380 - protein, 7 aa, Artificial Sequence
  Synthetic
VSEVPYA

SEQ ID NO: 3381 - protein, 7 aa, Artificial Sequence
  Synthetic
YSDTWYL

SEQ ID NO: 3382 - protein, 7 aa, Artificial Sequence
  Synthetic
GVNGNVY

SEQ ID NO: 3383 - protein, 7 aa, Artificial Sequence
  Synthetic
CCINRFT

SEQ ID NO: 3384 - protein, 7 aa, Artificial Sequence
  Synthetic
FNVHVFG

SEQ ID NO: 3385 - protein, 7 aa, Artificial Sequence
  Synthetic
CIHSCVF

SEQ ID NO: 3386 - protein, 7 aa, Artificial Sequence
  Synthetic
SGATPMS

SEQ ID NO: 3387 - protein, 7 aa, Artificial Sequence
  Synthetic
PTCGQLS

SEQ ID NO: 3388 - protein, 7 aa, Artificial Sequence
  Synthetic
VIGILEG

SEQ ID NO: 3389 - protein, 7 aa, Artificial Sequence
  Synthetic
GVSDVFV

SEQ ID NO: 3390 - protein, 7 aa, Artificial Sequence
  Synthetic
KTTSAVY

SEQ ID NO: 3391 - protein, 7 aa, Artificial Sequence
  Synthetic
NGGKSVW

SEQ ID NO: 3392 - protein, 7 aa, Artificial Sequence
  Synthetic
NACDVCQ

SEQ ID NO: 3393 - protein, 7 aa, Artificial Sequence
  Synthetic
LVSRMSE

SEQ ID NO: 3394 - protein, 4 aa, Artificial Sequence
  Synthetic
FGSI

SEQ ID NO: 3395 - protein, 7 aa, Artificial Sequence
  Synthetic
PLYCAVY

SEQ ID NO: 3396 - protein, 7 aa, Artificial Sequence
  Synthetic
PIDRLVF

SEQ ID NO: 3397 - protein, 7 aa, Artificial Sequence
  Synthetic
EINFCLF

SEQ ID NO: 3398 - protein, 7 aa, Artificial Sequence
  Synthetic
LYCGCVF

SEQ ID NO: 3399 - protein, 7 aa, Artificial Sequence
  Synthetic
RSSRRVY

SEQ ID NO: 3400 - protein, 7 aa, Artificial Sequence
  Synthetic
GVHLVAI

SEQ ID NO: 3401 - protein, 7 aa, Artificial Sequence
  Synthetic
QATRCPV

SEQ ID NO: 3402 - protein, 7 aa, Artificial Sequence
  Synthetic
TWLRMWC

SEQ ID NO: 3403 - protein, 7 aa, Artificial Sequence
  Synthetic
DCHRRVW

SEQ ID NO: 3404 - protein, 7 aa, Artificial Sequence
  Synthetic
SGRPHVR

SEQ ID NO: 3405 - protein, 7 aa, Artificial Sequence
  Synthetic
IYNAYSC

SEQ ID NO: 3406 - protein, 7 aa, Artificial Sequence
  Synthetic
VWVLGQR

SEQ ID NO: 3407 - protein, 7 aa, Artificial Sequence
  Synthetic
RDVERIV

SEQ ID NO: 3408 - protein, 7 aa, Artificial Sequence
  Synthetic
GLPNCVF

SEQ ID NO: 3409 - protein, 7 aa, Artificial Sequence
  Synthetic
VLGAMGH

SEQ ID NO: 3410 - protein, 7 aa, Artificial Sequence
  Synthetic
WGRIPFV

SEQ ID NO: 3411 - protein, 7 aa, Artificial Sequence
  Synthetic
SWNTPLA

SEQ ID NO: 3412 - protein, 7 aa, Artificial Sequence
  Synthetic
SMVGLLQ

SEQ ID NO: 3413 - protein, 7 aa, Artificial Sequence
  Synthetic
SPAHLLN

SEQ ID NO: 3414 - protein, 7 aa, Artificial Sequence
  Synthetic
LPFSVHS

SEQ ID NO: 3415 - protein, 7 aa, Artificial Sequence
  Synthetic
LMTRVVH

SEQ ID NO: 3416 - protein, 7 aa, Artificial Sequence
  Synthetic
WRNWVLT

SEQ ID NO: 3417 - protein, 7 aa, Artificial Sequence
  Synthetic
LFSSVVF

SEQ ID NO: 3418 - protein, 7 aa, Artificial Sequence
  Synthetic
LRRVDTS

SEQ ID NO: 3419 - protein, 7 aa, Artificial Sequence
  Synthetic
VYGILSS

SEQ ID NO: 3420 - protein, 7 aa, Artificial Sequence
  Synthetic
CRVEYSF

SEQ ID NO: 3421 - protein, 7 aa, Artificial Sequence
  Synthetic
STPDGFF

SEQ ID NO: 3422 - protein, 7 aa, Artificial Sequence
  Synthetic
VKNFSAR

SEQ ID NO: 3423 - protein, 7 aa, Artificial Sequence
  Synthetic
ISVDRHQ

SEQ ID NO: 3424 - protein, 7 aa, Artificial Sequence
  Synthetic
LGTVLLR

SEQ ID NO: 3425 - protein, 7 aa, Artificial Sequence
  Synthetic
RGSYTVV

SEQ ID NO: 3426 - protein, 7 aa, Artificial Sequence
  Synthetic
CRAVVCG

SEQ ID NO: 3427 - protein, 7 aa, Artificial Sequence
  Synthetic
RVWCCYT

SEQ ID NO: 3428 - protein, 7 aa, Artificial Sequence
  Synthetic
CLEHSYQ

SEQ ID NO: 3429 - protein, 7 aa, Artificial Sequence
  Synthetic
YCYTLLA

SEQ ID NO: 3430 - protein, 7 aa, Artificial Sequence
  Synthetic
PVARYWS

SEQ ID NO: 3431 - protein, 7 aa, Artificial Sequence
  Synthetic
LWVVYAK

SEQ ID NO: 3432 - protein, 7 aa, Artificial Sequence
  Synthetic
FVFCQFL

SEQ ID NO: 3433 - protein, 7 aa, Artificial Sequence
  Synthetic
RLCGLVW

SEQ ID NO: 3434 - protein, 7 aa, Artificial Sequence
  Synthetic
ELGRSVY

SEQ ID NO: 3435 - protein, 7 aa, Artificial Sequence
  Synthetic
KRTDFQL

SEQ ID NO: 3436 - protein, 5 aa, Artificial Sequence
  Synthetic
HRCMA

SEQ ID NO: 3437 - protein, 7 aa, Artificial Sequence
  Synthetic
SLVRLVF

SEQ ID NO: 3438 - protein, 7 aa, Artificial Sequence
  Synthetic
CRANEVV

SEQ ID NO: 3439 - protein, 7 aa, Artificial Sequence
  Synthetic
PHCSDRL

SEQ ID NO: 3440 - protein, 7 aa, Artificial Sequence
  Synthetic
YVSYVIY

SEQ ID NO: 3441 - protein, 7 aa, Artificial Sequence
  Synthetic
HLYMILI

SEQ ID NO: 3442 - protein, 7 aa, Artificial Sequence
  Synthetic
YLAVLAW

SEQ ID NO: 3443 - protein, 7 aa, Artificial Sequence
  Synthetic
YIERLWV

SEQ ID NO: 3444 - protein, 7 aa, Artificial Sequence
  Synthetic
DGTRCVF

SEQ ID NO: 3445 - protein, 7 aa, Artificial Sequence
  Synthetic
GTYCVHL

SEQ ID NO: 3446 - protein, 7 aa, Artificial Sequence
  Synthetic
GCIQSVV

SEQ ID NO: 3447 - protein, 4 aa, Artificial Sequence
  Synthetic
DALQ

SEQ ID NO: 3448 - protein, 7 aa, Artificial Sequence
  Synthetic
CWCNEAH

SEQ ID NO: 3449 - protein, 7 aa, Artificial Sequence
  Synthetic
MMCGIVQ

SEQ ID NO: 3450 - protein, 7 aa, Artificial Sequence
  Synthetic
NYVAYLL

SEQ ID NO: 3451 - protein, 7 aa, Artificial Sequence
  Synthetic
LTHSCVY

SEQ ID NO: 3452 - protein, 7 aa, Artificial Sequence
  Synthetic
AVNAQVW

SEQ ID NO: 3453 - protein, 7 aa, Artificial Sequence
  Synthetic
NHRPIVS

SEQ ID NO: 3454 - protein, 7 aa, Artificial Sequence
  Synthetic
HPYEDSA

SEQ ID NO: 3455 - protein, 7 aa, Artificial Sequence
  Synthetic
EWRSVVW

SEQ ID NO: 3456 - protein, 7 aa, Artificial Sequence
  Synthetic
LLRKCVF

SEQ ID NO: 3457 - protein, 7 aa, Artificial Sequence
  Synthetic
VGLLCVV

SEQ ID NO: 3458 - protein, 7 aa, Artificial Sequence
  Synthetic
ILSCWYV

SEQ ID NO: 3459 - protein, 7 aa, Artificial Sequence
  Synthetic
MSLSSST

SEQ ID NO: 3460 - protein, 7 aa, Artificial Sequence
  Synthetic
MVNANVY

SEQ ID NO: 3461 - protein, 4 aa, Artificial Sequence
  Synthetic
ACVV

SEQ ID NO: 3462 - protein, 7 aa, Artificial Sequence
  Synthetic
WNGTALN

SEQ ID NO: 3463 - protein, 7 aa, Artificial Sequence
  Synthetic
WVVRECF

SEQ ID NO: 3464 - protein, 7 aa, Artificial Sequence
  Synthetic
PTIGCCY

SEQ ID NO: 3465 - protein, 7 aa, Artificial Sequence
  Synthetic
YLSRRIF

SEQ ID NO: 3466 - protein, 7 aa, Artificial Sequence
  Synthetic
DMLVIYG

SEQ ID NO: 3467 - protein, 7 aa, Artificial Sequence
  Synthetic
HIAGCHA

SEQ ID NO: 3468 - protein, 7 aa, Artificial Sequence
  Synthetic
TLGRNVY

SEQ ID NO: 3469 - protein, 7 aa, Artificial Sequence
  Synthetic
LCFHSYC

SEQ ID NO: 3470 - protein, 7 aa, Artificial Sequence
  Synthetic
DGGCWLV

SEQ ID NO: 3471 - protein, 7 aa, Artificial Sequence
  Synthetic
GPYCWER

SEQ ID NO: 3472 - protein, 7 aa, Artificial Sequence
  Synthetic
VLEFLVY

SEQ ID NO: 3473 - protein, 7 aa, Artificial Sequence
  Synthetic
VVTRKVF

SEQ ID NO: 3474 - protein, 7 aa, Artificial Sequence
  Synthetic
TYDHCFG

SEQ ID NO: 3475 - protein, 7 aa, Artificial Sequence
  Synthetic
DWTRIVF

SEQ ID NO: 3476 - protein, 7 aa, Artificial Sequence
  Synthetic
TYSALVW

SEQ ID NO: 3477 - protein, 7 aa, Artificial Sequence
  Synthetic
LNRDVFA

SEQ ID NO: 3478 - protein, 7 aa, Artificial Sequence
  Synthetic
CSNEYPL

SEQ ID NO: 3479 - protein, 7 aa, Artificial Sequence
  Synthetic
CPNTRVY

SEQ ID NO: 3480 - protein, 7 aa, Artificial Sequence
  Synthetic
GGCSCST

SEQ ID NO: 3481 - protein, 7 aa, Artificial Sequence
  Synthetic
VTVLSLG

SEQ ID NO: 3482 - protein, 7 aa, Artificial Sequence
  Synthetic
VVCNRIF

SEQ ID NO: 3483 - protein, 7 aa, Artificial Sequence
  Synthetic
VRSAWFY

SEQ ID NO: 3484 - protein, 7 aa, Artificial Sequence
  Synthetic
WYVDTSH

SEQ ID NO: 3485 - protein, 7 aa, Artificial Sequence
  Synthetic
VHFKYSC

SEQ ID NO: 3486 - protein, 7 aa, Artificial Sequence
  Synthetic
CLSHTVY

SEQ ID NO: 3487 - protein, 6 aa, Artificial Sequence
  Synthetic
LRSLLG

SEQ ID NO: 3488 - protein, 7 aa, Artificial Sequence
  Synthetic
VRVLGVV

SEQ ID NO: 3489 - protein, 7 aa, Artificial Sequence
  Synthetic
LPLPPIR

SEQ ID NO: 3490 - protein, 7 aa, Artificial Sequence
  Synthetic
LWASEFG

SEQ ID NO: 3491 - protein, 7 aa, Artificial Sequence
  Synthetic
WSNCFIV

SEQ ID NO: 3492 - protein, 7 aa, Artificial Sequence
  Synthetic
NLFRWAH

SEQ ID NO: 3493 - protein, 7 aa, Artificial Sequence
  Synthetic
LSCFCRV

SEQ ID NO: 3494 - protein, 7 aa, Artificial Sequence
  Synthetic
YGCGLVY

SEQ ID NO: 3495 - protein, 7 aa, Artificial Sequence
  Synthetic
RNFNTGD

SEQ ID NO: 3496 - protein, 7 aa, Artificial Sequence
  Synthetic
YDILYMF

SEQ ID NO: 3497 - protein, 7 aa, Artificial Sequence
  Synthetic
YCYHTYY

SEQ ID NO: 3498 - protein, 7 aa, Artificial Sequence
  Synthetic
GYVVLIS

SEQ ID NO: 3499 - protein, 7 aa, Artificial Sequence
  Synthetic
SWPAFAC

SEQ ID NO: 3500 - protein, 7 aa, Artificial Sequence
  Synthetic
FIQQLVF

SEQ ID NO: 3501 - protein, 7 aa, Artificial Sequence
  Synthetic
SVIYVMW

SEQ ID NO: 3502 - protein, 7 aa, Artificial Sequence
  Synthetic
GISALLF

SEQ ID NO: 3503 - protein, 7 aa, Artificial Sequence
  Synthetic
NIICVFS

SEQ ID NO: 3504 - protein, 7 aa, Artificial Sequence
  Synthetic
VYYVERA

SEQ ID NO: 3505 - protein, 7 aa, Artificial Sequence
  Synthetic
RFGSNLY

SEQ ID NO: 3506 - protein, 7 aa, Artificial Sequence
  Synthetic
YLVAYEN

SEQ ID NO: 3507 - protein, 7 aa, Artificial Sequence
  Synthetic
NIFNDPV

SEQ ID NO: 3508 - protein, 7 aa, Artificial Sequence
  Synthetic
PSPVFMI

SEQ ID NO: 3509 - protein, 7 aa, Artificial Sequence
  Synthetic
FSDPLQI

SEQ ID NO: 3510 - protein, 7 aa, Artificial Sequence
  Synthetic
GFVGCID

SEQ ID NO: 3511 - protein, 7 aa, Artificial Sequence
  Synthetic
VNTWRSL

SEQ ID NO: 3512 - protein, 5 aa, Artificial Sequence
  Synthetic
RVFQV

SEQ ID NO: 3513 - protein, 7 aa, Artificial Sequence
  Synthetic
YQLKFCG

SEQ ID NO: 3514 - protein, 7 aa, Artificial Sequence
  Synthetic
AIRCCVY

SEQ ID NO: 3515 - protein, 7 aa, Artificial Sequence
  Synthetic
RSVVCSV

SEQ ID NO: 3516 - protein, 7 aa, Artificial Sequence
  Synthetic
AAGARMS

SEQ ID NO: 3517 - protein, 7 aa, Artificial Sequence
  Synthetic
SYNRSTF

SEQ ID NO: 3518 - protein, 7 aa, Artificial Sequence
  Synthetic
TSFRVYG

SEQ ID NO: 3519 - protein, 7 aa, Artificial Sequence
  Synthetic
QLYGSHV

SEQ ID NO: 3520 - protein, 5 aa, Artificial Sequence
  Synthetic
YHAFG

SEQ ID NO: 3521 - protein, 7 aa, Artificial Sequence
  Synthetic
LGVQSPA

SEQ ID NO: 3522 - protein, 7 aa, Artificial Sequence
  Synthetic
ILVSCGW

SEQ ID NO: 3523 - protein, 7 aa, Artificial Sequence
  Synthetic
DVSWYCQ

SEQ ID NO: 3524 - protein, 7 aa, Artificial Sequence
  Synthetic
RICRCVW

SEQ ID NO: 3525 - protein, 7 aa, Artificial Sequence
  Synthetic
SFVHLLL

SEQ ID NO: 3526 - protein, 7 aa, Artificial Sequence
  Synthetic
GRATIRV

SEQ ID NO: 3527 - protein, 7 aa, Artificial Sequence
  Synthetic
SLGGKIY

SEQ ID NO: 3528 - protein, 7 aa, Artificial Sequence
  Synthetic
SNVLPQT

SEQ ID NO: 3529 - protein, 7 aa, Artificial Sequence
  Synthetic
FWGTLMF

SEQ ID NO: 3530 - protein, 4 aa, Artificial Sequence
  Synthetic
SYVL

SEQ ID NO: 3531 - protein, 7 aa, Artificial Sequence
  Synthetic
SESAIWF

SEQ ID NO: 3532 - protein, 7 aa, Artificial Sequence
  Synthetic
LDSGVCR

SEQ ID NO: 3533 - protein, 7 aa, Artificial Sequence
  Synthetic
NVVGQVF

SEQ ID NO: 3534 - protein, 7 aa, Artificial Sequence
  Synthetic
LLSEFIV

SEQ ID NO: 3535 - protein, 7 aa, Artificial Sequence
  Synthetic
TTRNIWY

SEQ ID NO: 3536 - protein, 7 aa, Artificial Sequence
  Synthetic
DIYHNLY

SEQ ID NO: 3537 - protein, 7 aa, Artificial Sequence
  Synthetic
VVQIVRS

SEQ ID NO: 3538 - protein, 7 aa, Artificial Sequence
  Synthetic
RVKYEVY

SEQ ID NO: 3539 - protein, 7 aa, Artificial Sequence
  Synthetic
ALSSQVF

SEQ ID NO: 3540 - protein, 7 aa, Artificial Sequence
  Synthetic
GLLLGAI

SEQ ID NO: 3541 - protein, 7 aa, Artificial Sequence
  Synthetic
HILGLDG

SEQ ID NO: 3542 - protein, 7 aa, Artificial Sequence
  Synthetic
CFKTIPC

SEQ ID NO: 3543 - protein, 7 aa, Artificial Sequence
  Synthetic
QTANCVM

SEQ ID NO: 3544 - protein, 7 aa, Artificial Sequence
  Synthetic
VRVCGCS

SEQ ID NO: 3545 - protein, 7 aa, Artificial Sequence
  Synthetic
GVSLIYS

SEQ ID NO: 3546 - protein, 7 aa, Artificial Sequence
  Synthetic
LNSTCYA

SEQ ID NO: 3547 - protein, 7 aa, Artificial Sequence
  Synthetic
SSLVDVT

SEQ ID NO: 3548 - protein, 7 aa, Artificial Sequence
  Synthetic
GFSCTVY

SEQ ID NO: 3549 - protein, 7 aa, Artificial Sequence
  Synthetic
GIRCLIH

SEQ ID NO: 3550 - protein, 7 aa, Artificial Sequence
  Synthetic
FLFVRCF

SEQ ID NO: 3551 - protein, 7 aa, Artificial Sequence
  Synthetic
CQSYSWP

SEQ ID NO: 3552 - protein, 7 aa, Artificial Sequence
  Synthetic
GLTGMTI

SEQ ID NO: 3553 - protein, 7 aa, Artificial Sequence
  Synthetic
QLSRTGY

SEQ ID NO: 3554 - protein, 7 aa, Artificial Sequence
  Synthetic
LAWHFCC

SEQ ID NO: 3555 - protein, 7 aa, Artificial Sequence
  Synthetic
VTCMWST

SEQ ID NO: 3556 - protein, 7 aa, Artificial Sequence
  Synthetic
LIVSVST

SEQ ID NO: 3557 - protein, 7 aa, Artificial Sequence
  Synthetic
NAFFGLL

SEQ ID NO: 3558 - protein, 6 aa, Artificial Sequence
  Synthetic
DVKWLT

SEQ ID NO: 3559 - protein, 7 aa, Artificial Sequence
  Synthetic
YGVSHSC

SEQ ID NO: 3560 - protein, 7 aa, Artificial Sequence
  Synthetic
DDWCSCT

SEQ ID NO: 3561 - protein, 7 aa, Artificial Sequence
  Synthetic
CCVLQMW

SEQ ID NO: 3562 - protein, 7 aa, Artificial Sequence
  Synthetic
SSSDFVV

SEQ ID NO: 3563 - protein, 7 aa, Artificial Sequence
  Synthetic
VQSEHRV

SEQ ID NO: 3564 - protein, 7 aa, Artificial Sequence
  Synthetic
YNSQIVW

SEQ ID NO: 3565 - protein, 7 aa, Artificial Sequence
  Synthetic
LFTGAWI

SEQ ID NO: 3566 - protein, 7 aa, Artificial Sequence
  Synthetic
RLDRLVK

SEQ ID NO: 3567 - protein, 7 aa, Artificial Sequence
  Synthetic
VVGILRG

SEQ ID NO: 3568 - protein, 7 aa, Artificial Sequence
  Synthetic
SPSLLCS

SEQ ID NO: 3569 - protein, 7 aa, Artificial Sequence
  Synthetic
TFNFGLR

SEQ ID NO: 3570 - protein, 7 aa, Artificial Sequence
  Synthetic
GRYGVVW

SEQ ID NO: 3571 - protein, 7 aa, Artificial Sequence
  Synthetic
VADGIVY

SEQ ID NO: 3572 - protein, 7 aa, Artificial Sequence
  Synthetic
MLCANTY

SEQ ID NO: 3573 - protein, 7 aa, Artificial Sequence
  Synthetic
FVFLVQE

SEQ ID NO: 3574 - protein, 7 aa, Artificial Sequence
  Synthetic
GFGTVLF

SEQ ID NO: 3575 - protein, 7 aa, Artificial Sequence
  Synthetic
ILKHVFG

SEQ ID NO: 3576 - protein, 7 aa, Artificial Sequence
  Synthetic
LCTGPAW

SEQ ID NO: 3577 - protein, 7 aa, Artificial Sequence
  Synthetic
GGGSWFP

SEQ ID NO: 3578 - protein, 7 aa, Artificial Sequence
  Synthetic
LSLRNVF

SEQ ID NO: 3579 - protein, 7 aa, Artificial Sequence
  Synthetic
ACFGLVY

SEQ ID NO: 3580 - protein, 4 aa, Artificial Sequence
  Synthetic
RVVR

SEQ ID NO: 3581 - protein, 7 aa, Artificial Sequence
  Synthetic
SLYAVVW

SEQ ID NO: 3582 - protein, 7 aa, Artificial Sequence
  Synthetic
NPDPCVV

SEQ ID NO: 3583 - protein, 7 aa, Artificial Sequence
  Synthetic
GHWCSLT

SEQ ID NO: 3584 - protein, 7 aa, Artificial Sequence
  Synthetic
VSFHVFY

SEQ ID NO: 3585 - protein, 7 aa, Artificial Sequence
  Synthetic
MILVAGW

SEQ ID NO: 3586 - protein, 5 aa, Artificial Sequence
  Synthetic
LDPRA

SEQ ID NO: 3587 - protein, 7 aa, Artificial Sequence
  Synthetic
RSHDCIN

SEQ ID NO: 3588 - protein, 7 aa, Artificial Sequence
  Synthetic
NWSCVFQ

SEQ ID NO: 3589 - protein, 7 aa, Artificial Sequence
  Synthetic
VLVCYSY

SEQ ID NO: 3590 - protein, 7 aa, Artificial Sequence
  Synthetic
RLICDMQ

SEQ ID NO: 3591 - protein, 7 aa, Artificial Sequence
  Synthetic
HLVPVAT

SEQ ID NO: 3592 - protein, 7 aa, Artificial Sequence
  Synthetic
VLVCYSY

SEQ ID NO: 3593 - protein, 7 aa, Artificial Sequence
  Synthetic
VLVCYSY

SEQ ID NO: 3594 - protein, 7 aa, Artificial Sequence
  Synthetic
LVVTYER

SEQ ID NO: 3595 - protein, 7 aa, Artificial Sequence
  Synthetic
VCVSYTH

SEQ ID NO: 3596 - protein, 7 aa, Artificial Sequence
  Synthetic
ILCMYEQ

SEQ ID NO: 3597 - protein, 7 aa, Artificial Sequence
  Synthetic
IYNCKST

SEQ ID NO: 3598 - protein, 7 aa, Artificial Sequence
  Synthetic
LLMAYEC

SEQ ID NO: 3599 - protein, 7 aa, Artificial Sequence
  Synthetic
LRVCYTR

SEQ ID NO: 3600 - protein, 7 aa, Artificial Sequence
  Synthetic
IPVFYCI

SEQ ID NO: 3601 - protein, 7 aa, Artificial Sequence
  Synthetic
FLCCYGI

SEQ ID NO: 3602 - protein, 7 aa, Artificial Sequence
  Synthetic
DYGYCTF

SEQ ID NO: 3603 - protein, 7 aa, Artificial Sequence
  Synthetic
TKFEGLV

SEQ ID NO: 3604 - protein, 7 aa, Artificial Sequence
  Synthetic
VNLLCNV

SEQ ID NO: 3605 - protein, 7 aa, Artificial Sequence
  Synthetic
SSRSRFN

SEQ ID NO: 3606 - protein, 7 aa, Artificial Sequence
  Synthetic
SSRSRFN

SEQ ID NO: 3607 - protein, 7 aa, Artificial Sequence
  Synthetic
SYVNVWG

SEQ ID NO: 3608 - protein, 7 aa, Artificial Sequence
  Synthetic
GNVFLCG

SEQ ID NO: 3609 - protein, 7 aa, Artificial Sequence
  Synthetic
LRSRVIT

SEQ ID NO: 3610 - protein, 7 aa, Artificial Sequence
  Synthetic
DRCGTST

SEQ ID NO: 3611 - protein, 7 aa, Artificial Sequence
  Synthetic
ATIYIYA

SEQ ID NO: 3612 - protein, 7 aa, Artificial Sequence
  Synthetic
MLTLSAR

SEQ ID NO: 3613 - protein, 7 aa, Artificial Sequence
  Synthetic
HLVPVAT

SEQ ID NO: 3614 - protein, 7 aa, Artificial Sequence
  Synthetic
SVCYVYG

SEQ ID NO: 3615 - protein, 7 aa, Artificial Sequence
  Synthetic
NIGPCMC

SEQ ID NO: 3616 - protein, 7 aa, Artificial Sequence
  Synthetic
RCVIVGC

SEQ ID NO: 3617 - protein, 7 aa, Artificial Sequence
  Synthetic
ITVVVGS

SEQ ID NO: 3618 - protein, 7 aa, Artificial Sequence
  Synthetic
LALARVS

SEQ ID NO: 3619 - protein, 7 aa, Artificial Sequence
  Synthetic
SSIYVYL

SEQ ID NO: 3620 - protein, 7 aa, Artificial Sequence
  Synthetic
WMFVLSS

SEQ ID NO: 3621 - protein, 7 aa, Artificial Sequence
  Synthetic
HNVGVGT

SEQ ID NO: 3622 - protein, 7 aa, Artificial Sequence
  Synthetic
PEISLIC

SEQ ID NO: 3623 - protein, 7 aa, Artificial Sequence
  Synthetic
DTVYLLV

SEQ ID NO: 3624 - protein, 7 aa, Artificial Sequence
  Synthetic
ILVGIYW

SEQ ID NO: 3625 - protein, 7 aa, Artificial Sequence
  Synthetic
ESQALRV

SEQ ID NO: 3626 - protein, 7 aa, Artificial Sequence
  Synthetic
CHSGALY

SEQ ID NO: 3627 - protein, 7 aa, Artificial Sequence
  Synthetic
VLKSMLL

SEQ ID NO: 3628 - protein, 4 aa, Artificial Sequence
  Synthetic
LLFT

SEQ ID NO: 3629 - protein, 7 aa, Artificial Sequence
  Synthetic
DMYGSLT

SEQ ID NO: 3630 - protein, 7 aa, Artificial Sequence
  Synthetic
NMVYMKH

SEQ ID NO: 3631 - protein, 6 aa, Artificial Sequence
  Synthetic
PLATSG

SEQ ID NO: 3632 - protein, 7 aa, Artificial Sequence
  Synthetic
VLSSEFT

SEQ ID NO: 3633 - protein, 7 aa, Artificial Sequence
  Synthetic
VHITRFV

SEQ ID NO: 3634 - protein, 4 aa, Artificial Sequence
  Synthetic
RLRP

SEQ ID NO: 3635 - protein, 7 aa, Artificial Sequence
  Synthetic
AIGCNGL

SEQ ID NO: 3636 - protein, 7 aa, Artificial Sequence
  Synthetic
IDAHDSV

SEQ ID NO: 3637 - protein, 7 aa, Artificial Sequence
  Synthetic
VLICRTA

SEQ ID NO: 3638 - protein, 7 aa, Artificial Sequence
  Synthetic
VSGFRAC

SEQ ID NO: 3639 - protein, 7 aa, Artificial Sequence
  Synthetic
FDAAQAW

SEQ ID NO: 3640 - protein, 7 aa, Artificial Sequence
  Synthetic
NCNRVIS

SEQ ID NO: 3641 - protein, 7 aa, Artificial Sequence
  Synthetic
CVINYHV

SEQ ID NO: 3642 - protein, 7 aa, Artificial Sequence
  Synthetic
VCYTGWD

SEQ ID NO: 3643 - protein, 7 aa, Artificial Sequence
  Synthetic
TRTELRS

SEQ ID NO: 3644 - protein, 7 aa, Artificial Sequence
  Synthetic
SDTVGLV

SEQ ID NO: 3645 - protein, 5 aa, Artificial Sequence
  Synthetic
IVSGW

SEQ ID NO: 3646 - protein, 5 aa, Artificial Sequence
  Synthetic
LDGLF

SEQ ID NO: 3647 - protein, 5 aa, Artificial Sequence
  Synthetic
LDNDA

SEQ ID NO: 3648 - protein, 5 aa, Artificial Sequence
  Synthetic
PYSFK

SEQ ID NO: 3649 - protein, 5 aa, Artificial Sequence
  Synthetic
QMSRQ

SEQ ID NO: 3650 - protein, 5 aa, Artificial Sequence
  Synthetic
RTLDS

SEQ ID NO: 3651 - protein, 5 aa, Artificial Sequence
  Synthetic
QHAFR

SEQ ID NO: 3652 - protein, 5 aa, Artificial Sequence
  Synthetic
FMNFI

SEQ ID NO: 3653 - protein, 5 aa, Artificial Sequence
  Synthetic
TWNAS

SEQ ID NO: 3654 - protein, 5 aa, Artificial Sequence
  Synthetic
RGDDT

SEQ ID NO: 3655 - protein, 5 aa, Artificial Sequence
  Synthetic
PHHTV

SEQ ID NO: 3656 - protein, 5 aa, Artificial Sequence
  Synthetic
FGGRR

SEQ ID NO: 3657 - protein, 5 aa, Artificial Sequence
  Synthetic
AFSFR

SEQ ID NO: 3658 - protein, 5 aa, Artificial Sequence
  Synthetic
RSSQG

SEQ ID NO: 3659 - protein, 5 aa, Artificial Sequence
  Synthetic
RGPED

SEQ ID NO: 3660 - protein, 5 aa, Artificial Sequence
  Synthetic
DHGGR

SEQ ID NO: 3661 - protein, 5 aa, Artificial Sequence
  Synthetic
GCYGT

SEQ ID NO: 3662 - protein, 5 aa, Artificial Sequence
  Synthetic
ANEMF

SEQ ID NO: 3663 - protein, 5 aa, Artificial Sequence
  Synthetic
CAGWR

SEQ ID NO: 3664 - protein, 5 aa, Artificial Sequence
  Synthetic
GSAAA

SEQ ID NO: 3665 - protein, 5 aa, Artificial Sequence
  Synthetic
SVTSF

SEQ ID NO: 3666 - protein, 5 aa, Artificial Sequence
  Synthetic
LSFDV

SEQ ID NO: 3667 - protein, 5 aa, Artificial Sequence
  Synthetic
SVSHV

SEQ ID NO: 3668 - protein, 5 aa, Artificial Sequence
  Synthetic
TFDDY

SEQ ID NO: 3669 - protein, 5 aa, Artificial Sequence
  Synthetic
TCVGA

SEQ ID NO: 3670 - protein, 5 aa, Artificial Sequence
  Synthetic
TIALD

SEQ ID NO: 3671 - protein, 5 aa, Artificial Sequence
  Synthetic
LDSSW

SEQ ID NO: 3672 - protein, 5 aa, Artificial Sequence
  Synthetic
QVTGH

SEQ ID NO: 3673 - protein, 5 aa, Artificial Sequence
  Synthetic
RCVSD

SEQ ID NO: 3674 - protein, 5 aa, Artificial Sequence
  Synthetic
LGEGL

SEQ ID NO: 3675 - protein, 5 aa, Artificial Sequence
  Synthetic
CVTGI

SEQ ID NO: 3676 - protein, 5 aa, Artificial Sequence
  Synthetic
SVTCS

SEQ ID NO: 3677 - protein, 5 aa, Artificial Sequence
  Synthetic
PRNFD

SEQ ID NO: 3678 - protein, 5 aa, Artificial Sequence
  Synthetic
AYLGY

SEQ ID NO: 3679 - protein, 5 aa, Artificial Sequence
  Synthetic
QSTGV

SEQ ID NO: 3680 - protein, 5 aa, Artificial Sequence
  Synthetic
ISSGG

SEQ ID NO: 3681 - protein, 5 aa, Artificial Sequence
  Synthetic
IAAQV

SEQ ID NO: 3682 - protein, 5 aa, Artificial Sequence
  Synthetic
NRHSC

SEQ ID NO: 3683 - protein, 5 aa, Artificial Sequence
  Synthetic
NTRQW

SEQ ID NO: 3684 - protein, 5 aa, Artificial Sequence
  Synthetic
AQDRG

SEQ ID NO: 3685 - protein, 5 aa, Artificial Sequence
  Synthetic
RYPCY

SEQ ID NO: 3686 - protein, 5 aa, Artificial Sequence
  Synthetic
WCGLS

SEQ ID NO: 3687 - protein, 5 aa, Artificial Sequence
  Synthetic
ATPSA

SEQ ID NO: 3688 - protein, 5 aa, Artificial Sequence
  Synthetic
ASSSR

SEQ ID NO: 3689 - protein, 5 aa, Artificial Sequence
  Synthetic
RSAAN

SEQ ID NO: 3690 - protein, 5 aa, Artificial Sequence
  Synthetic
CNNHS

SEQ ID NO: 3691 - protein, 5 aa, Artificial Sequence
  Synthetic
ASMLT

SEQ ID NO: 3692 - protein, 5 aa, Artificial Sequence
  Synthetic
VDAMN

SEQ ID NO: 3693 - protein, 5 aa, Artificial Sequence
  Synthetic
SYSEG

SEQ ID NO: 3694 - skipped

SEQ ID NO: 3695 - protein, 5 aa, Artificial Sequence
  Synthetic
SGSVH

SEQ ID NO: 3696 - protein, 5 aa, Artificial Sequence
  Synthetic
PHNLG

SEQ ID NO: 3697 - protein, 5 aa, Artificial Sequence
  Synthetic
PGAYR

SEQ ID NO: 3698 - protein, 5 aa, Artificial Sequence
  Synthetic
ISGEF

SEQ ID NO: 3699 - protein, 5 aa, Artificial Sequence
  Synthetic
FRLAL

SEQ ID NO: 3700 - protein, 5 aa, Artificial Sequence
  Synthetic
RCGGL

SEQ ID NO: 3701 - protein, 5 aa, Artificial Sequence
  Synthetic
YMLRC

SEQ ID NO: 3702 - protein, 5 aa, Artificial Sequence
  Synthetic
NDIND

SEQ ID NO: 3703 - protein, 5 aa, Artificial Sequence
  Synthetic
DCHSD

SEQ ID NO: 3704 - protein, 5 aa, Artificial Sequence
  Synthetic
HPSCV

SEQ ID NO: 3705 - protein, 5 aa, Artificial Sequence
  Synthetic
TTACG

SEQ ID NO: 3706 - protein, 5 aa, Artificial Sequence
  Synthetic
MYGEY

SEQ ID NO: 3707 - protein, 5 aa, Artificial Sequence
  Synthetic
DCGHQ

SEQ ID NO: 3708 - protein, 5 aa, Artificial Sequence
  Synthetic
ISFRL

SEQ ID NO: 3709 - protein, 5 aa, Artificial Sequence
  Synthetic
TCNCW

SEQ ID NO: 3710 - protein, 5 aa, Artificial Sequence
  Synthetic
AYDAN

SEQ ID NO: 3711 - protein, 5 aa, Artificial Sequence
  Synthetic
GCFNL

SEQ ID NO: 3712 - protein, 5 aa, Artificial Sequence
  Synthetic
VDARC

SEQ ID NO: 3713 - protein, 5 aa, Artificial Sequence
  Synthetic
ITNSH

SEQ ID NO: 3714 - protein, 5 aa, Artificial Sequence
  Synthetic
SNMHT

SEQ ID NO: 3715 - protein, 5 aa, Artificial Sequence
  Synthetic
FGKHG

SEQ ID NO: 3716 - protein, 5 aa, Artificial Sequence
  Synthetic
VRLSC

SEQ ID NO: 3717 - protein, 5 aa, Artificial Sequence
  Synthetic
AGNSW

SEQ ID NO: 3718 - protein, 5 aa, Artificial Sequence
  Synthetic
CSTSC

SEQ ID NO: 3719 - protein, 5 aa, Artificial Sequence
  Synthetic
FRGTV

SEQ ID NO: 3720 - protein, 5 aa, Artificial Sequence
  Synthetic
LATVV

SEQ ID NO: 3721 - protein, 5 aa, Artificial Sequence
  Synthetic
RSFSD

SEQ ID NO: 3722 - protein, 5 aa, Artificial Sequence
  Synthetic
HRLMA

SEQ ID NO: 3723 - protein, 5 aa, Artificial Sequence
  Synthetic
NNGKW

SEQ ID NO: 3724 - protein, 5 aa, Artificial Sequence
  Synthetic
CGALL

SEQ ID NO: 3725 - protein, 5 aa, Artificial Sequence
  Synthetic
FWDGR

SEQ ID NO: 3726 - protein, 5 aa, Artificial Sequence
  Synthetic
RGVHH

SEQ ID NO: 3727 - protein, 5 aa, Artificial Sequence
  Synthetic
PGTGF

SEQ ID NO: 3728 - protein, 5 aa, Artificial Sequence
  Synthetic
PACSD

SEQ ID NO: 3729 - protein, 5 aa, Artificial Sequence
  Synthetic
SGACL

SEQ ID NO: 3730 - protein, 5 aa, Artificial Sequence
  Synthetic
PHNLG

SEQ ID NO: 3731 - protein, 5 aa, Artificial Sequence
  Synthetic
SGSIV

SEQ ID NO: 3732 - protein, 5 aa, Artificial Sequence
  Synthetic
GWQGI

SEQ ID NO: 3733 - protein, 5 aa, Artificial Sequence
  Synthetic
ACDSI

SEQ ID NO: 3734 - protein, 5 aa, Artificial Sequence
  Synthetic
TFSRG

SEQ ID NO: 3735 - protein, 5 aa, Artificial Sequence
  Synthetic
TFLGN

SEQ ID NO: 3736 - protein, 5 aa, Artificial Sequence
  Synthetic
GVTIN

SEQ ID NO: 3737 - protein, 5 aa, Artificial Sequence
  Synthetic
FRSLQ

SEQ ID NO: 3738 - protein, 5 aa, Artificial Sequence
  Synthetic
IDSYS

SEQ ID NO: 3739 - protein, 5 aa, Artificial Sequence
  Synthetic
MVLGS

SEQ ID NO: 3740 - protein, 5 aa, Artificial Sequence
  Synthetic
NDGHT

SEQ ID NO: 3741 - protein, 5 aa, Artificial Sequence
  Synthetic
CSGVD

SEQ ID NO: 3742 - protein, 5 aa, Artificial Sequence
  Synthetic
VGAIR

SEQ ID NO: 3743 - protein, 5 aa, Artificial Sequence
  Synthetic
RSAGT

SEQ ID NO: 3744 - protein, 5 aa, Artificial Sequence
  Synthetic
LYSFR

SEQ ID NO: 3745 - protein, 5 aa, Artificial Sequence
  Synthetic
EYVKF

SEQ ID NO: 3746 - protein, 5 aa, Artificial Sequence
  Synthetic
CMFLH

SEQ ID NO: 3747 - protein, 5 aa, Artificial Sequence
  Synthetic
VCSSV

SEQ ID NO: 3748 - protein, 5 aa, Artificial Sequence
  Synthetic
NVLTL

SEQ ID NO: 3749 - protein, 5 aa, Artificial Sequence
  Synthetic
PYAFR

SEQ ID NO: 3750 - protein, 5 aa, Artificial Sequence
  Synthetic
DWRGC

SEQ ID NO: 3751 - protein, 5 aa, Artificial Sequence
  Synthetic
HGIGE

SEQ ID NO: 3752 - protein, 5 aa, Artificial Sequence
  Synthetic
NPRGT

SEQ ID NO: 3753 - protein, 4 aa, Artificial Sequence
  Synthetic
ACDS

SEQ ID NO: 3754 - protein, 5 aa, Artificial Sequence
  Synthetic
SSRWS

SEQ ID NO: 3755 - protein, 5 aa, Artificial Sequence
  Synthetic
SWGAA

SEQ ID NO: 3756 - protein, 5 aa, Artificial Sequence
  Synthetic
PVYND

SEQ ID NO: 3757 - protein, 5 aa, Artificial Sequence
  Synthetic
TGGVG

SEQ ID NO: 3758 - protein, 5 aa, Artificial Sequence
  Synthetic
KTIGS

SEQ ID NO: 3759 - protein, 5 aa, Artificial Sequence
  Synthetic
GFTRT

SEQ ID NO: 3760 - protein, 5 aa, Artificial Sequence
  Synthetic
GGARQ

SEQ ID NO: 3761 - protein, 5 aa, Artificial Sequence
  Synthetic
GHSDA

SEQ ID NO: 3762 - protein, 5 aa, Artificial Sequence
  Synthetic
AYSGS

SEQ ID NO: 3763 - protein, 5 aa, Artificial Sequence
  Synthetic
ADGCT

SEQ ID NO: 3764 - protein, 5 aa, Artificial Sequence
  Synthetic
FPFGL

SEQ ID NO: 3765 - protein, 5 aa, Artificial Sequence
  Synthetic
FYSCV

SEQ ID NO: 3766 - protein, 5 aa, Artificial Sequence
  Synthetic
ADSSR

SEQ ID NO: 3767 - protein, 5 aa, Artificial Sequence
  Synthetic
WSVAV

SEQ ID NO: 3768 - protein, 5 aa, Artificial Sequence
  Synthetic
LWASD

SEQ ID NO: 3769 - protein, 5 aa, Artificial Sequence
  Synthetic
CLAHG

SEQ ID NO: 3770 - protein, 5 aa, Artificial Sequence
  Synthetic
HDVAS

SEQ ID NO: 3771 - protein, 5 aa, Artificial Sequence
  Synthetic
PDTMC

SEQ ID NO: 3772 - protein, 5 aa, Artificial Sequence
  Synthetic
DLGRG

SEQ ID NO: 3773 - protein, 5 aa, Artificial Sequence
  Synthetic
YNCVR

SEQ ID NO: 3774 - protein, 5 aa, Artificial Sequence
  Synthetic
RFPEN

SEQ ID NO: 3775 - protein, 5 aa, Artificial Sequence
  Synthetic
RDSRG

SEQ ID NO: 3776 - protein, 5 aa, Artificial Sequence
  Synthetic
PKQHN

SEQ ID NO: 3777 - protein, 5 aa, Artificial Sequence
  Synthetic
HSSGD

SEQ ID NO: 3778 - protein, 5 aa, Artificial Sequence
  Synthetic
LAAQV

SEQ ID NO: 3779 - protein, 5 aa, Artificial Sequence
  Synthetic
RAAEN

SEQ ID NO: 3780 - protein, 5 aa, Artificial Sequence
  Synthetic
ALYIG

SEQ ID NO: 3781 - protein, 5 aa, Artificial Sequence
  Synthetic
RAGCW

SEQ ID NO: 3782 - protein, 5 aa, Artificial Sequence
  Synthetic
TCHMD

SEQ ID NO: 3783 - protein, 5 aa, Artificial Sequence
  Synthetic
GVSCE

SEQ ID NO: 3784 - protein, 5 aa, Artificial Sequence
  Synthetic
GVTAN

SEQ ID NO: 3785 - protein, 5 aa, Artificial Sequence
  Synthetic
ISCCD

SEQ ID NO: 3786 - protein, 5 aa, Artificial Sequence
  Synthetic
RELVG

SEQ ID NO: 3787 - protein, 5 aa, Artificial Sequence
  Synthetic
IWYSS

SEQ ID NO: 3788 - protein, 5 aa, Artificial Sequence
  Synthetic
TPNGV

SEQ ID NO: 3789 - protein, 5 aa, Artificial Sequence
  Synthetic
PHNLG

SEQ ID NO: 3790 - protein, 5 aa, Artificial Sequence
  Synthetic
DRERV

SEQ ID NO: 3791 - protein, 5 aa, Artificial Sequence
  Synthetic
RCVFG

SEQ ID NO: 3792 - protein, 5 aa, Artificial Sequence
  Synthetic
VRTAD

SEQ ID NO: 3793 - protein, 5 aa, Artificial Sequence
  Synthetic
GGSVF

SEQ ID NO: 3794 - protein, 5 aa, Artificial Sequence
  Synthetic
SWSST

SEQ ID NO: 3795 - protein, 5 aa, Artificial Sequence
  Synthetic
ASLSG

SEQ ID NO: 3796 - protein, 5 aa, Artificial Sequence
  Synthetic
YPCFD

SEQ ID NO: 3797 - protein, 5 aa, Artificial Sequence
  Synthetic
FHLDR

SEQ ID NO: 3798 - protein, 5 aa, Artificial Sequence
  Synthetic
ANACS

SEQ ID NO: 3799 - protein, 5 aa, Artificial Sequence
  Synthetic
CGNRC

SEQ ID NO: 3800 - protein, 5 aa, Artificial Sequence
  Synthetic
NHSCR

SEQ ID NO: 3801 - protein, 5 aa, Artificial Sequence
  Synthetic
PSILF

SEQ ID NO: 3802 - protein, 5 aa, Artificial Sequence
  Synthetic
GNCPR

SEQ ID NO: 3803 - protein, 5 aa, Artificial Sequence
  Synthetic
MDANV

SEQ ID NO: 3804 - protein, 5 aa, Artificial Sequence
  Synthetic
AGSVA

SEQ ID NO: 3805 - protein, 5 aa, Artificial Sequence
  Synthetic
EYGYR

SEQ ID NO: 3806 - protein, 5 aa, Artificial Sequence
  Synthetic
FADKT

SEQ ID NO: 3807 - protein, 5 aa, Artificial Sequence
  Synthetic
CFGTQ

SEQ ID NO: 3808 - protein, 5 aa, Artificial Sequence
  Synthetic
SGYYD

SEQ ID NO: 3809 - protein, 5 aa, Artificial Sequence
  Synthetic
KWLHE

SEQ ID NO: 3810 - protein, 5 aa, Artificial Sequence
  Synthetic
PMHNM

SEQ ID NO: 3811 - protein, 5 aa, Artificial Sequence
  Synthetic
PGHSG

SEQ ID NO: 3812 - protein, 5 aa, Artificial Sequence
  Synthetic
ADLVG

SEQ ID NO: 3813 - protein, 5 aa, Artificial Sequence
  Synthetic
AGNLI

SEQ ID NO: 3814 - protein, 5 aa, Artificial Sequence
  Synthetic
PHNLG

SEQ ID NO: 3815 - protein, 5 aa, Artificial Sequence
  Synthetic
DGSSI

SEQ ID NO: 3816 - protein, 5 aa, Artificial Sequence
  Synthetic
FYPSG

SEQ ID NO: 3817 - protein, 5 aa, Artificial Sequence
  Synthetic
AGAVT

SEQ ID NO: 3818 - protein, 5 aa, Artificial Sequence
  Synthetic
CNNAV

SEQ ID NO: 3819 - protein, 5 aa, Artificial Sequence
  Synthetic
LDSRC

SEQ ID NO: 3820 - protein, 5 aa, Artificial Sequence
  Synthetic
CEGFR

SEQ ID NO: 3821 - protein, 5 aa, Artificial Sequence
  Synthetic
PHNLG

SEQ ID NO: 3822 - protein, 5 aa, Artificial Sequence
  Synthetic
GRCSV

SEQ ID NO: 3823 - protein, 5 aa, Artificial Sequence
  Synthetic
YCRCV

SEQ ID NO: 3824 - protein, 5 aa, Artificial Sequence
  Synthetic
ICGAD

SEQ ID NO: 3825 - protein, 5 aa, Artificial Sequence
  Synthetic
LGYGN

SEQ ID NO: 3826 - protein, 5 aa, Artificial Sequence
  Synthetic
LARIQ

SEQ ID NO: 3827 - protein, 5 aa, Artificial Sequence
  Synthetic
MLYFM

SEQ ID NO: 3828 - protein, 5 aa, Artificial Sequence
  Synthetic
NVLSF

SEQ ID NO: 3829 - protein, 5 aa, Artificial Sequence
  Synthetic
IHSVL

SEQ ID NO: 3830 - protein, 5 aa, Artificial Sequence
  Synthetic
LYPYC

SEQ ID NO: 3831 - protein, 5 aa, Artificial Sequence
  Synthetic
RASTS

SEQ ID NO: 3832 - protein, 5 aa, Artificial Sequence
  Synthetic
YPGYY

SEQ ID NO: 3833 - protein, 4 aa, Artificial Sequence
  Synthetic
PVVC

SEQ ID NO: 3834 - protein, 5 aa, Artificial Sequence
  Synthetic
FLLHS

SEQ ID NO: 3835 - protein, 5 aa, Artificial Sequence
  Synthetic
VGHIR

SEQ ID NO: 3836 - protein, 5 aa, Artificial Sequence
  Synthetic
RSYYG

SEQ ID NO: 3837 - protein, 5 aa, Artificial Sequence
  Synthetic
RLLDD

SEQ ID NO: 3838 - protein, 5 aa, Artificial Sequence
  Synthetic
CWVLE

SEQ ID NO: 3839 - protein, 5 aa, Artificial Sequence
  Synthetic
RHACS

SEQ ID NO: 3840 - protein, 5 aa, Artificial Sequence
  Synthetic
ASGNA

SEQ ID NO: 3841 - protein, 5 aa, Artificial Sequence
  Synthetic
HICGS

SEQ ID NO: 3842 - protein, 5 aa, Artificial Sequence
  Synthetic
NNGLP

SEQ ID NO: 3843 - protein, 5 aa, Artificial Sequence
  Synthetic
YCDHD

SEQ ID NO: 3844 - protein, 5 aa, Artificial Sequence
  Synthetic
TSLSG

SEQ ID NO: 3845 - protein, 5 aa, Artificial Sequence
  Synthetic
LMRGI

SEQ ID NO: 3846 - protein, 5 aa, Artificial Sequence
  Synthetic
FSPTA

SEQ ID NO: 3847 - protein, 5 aa, Artificial Sequence
  Synthetic
SSRHA

SEQ ID NO: 3848 - protein, 4 aa, Artificial Sequence
  Synthetic
SSGG

SEQ ID NO: 3849 - protein, 5 aa, Artificial Sequence
  Synthetic
EFGGQ

SEQ ID NO: 3850 - protein, 5 aa, Artificial Sequence
  Synthetic
RDNKG

SEQ ID NO: 3851 - protein, 5 aa, Artificial Sequence
  Synthetic
ASGEV

SEQ ID NO: 3852 - protein, 5 aa, Artificial Sequence
  Synthetic
GWLCA

SEQ ID NO: 3853 - protein, 5 aa, Artificial Sequence
  Synthetic
AGIGA

SEQ ID NO: 3854 - protein, 5 aa, Artificial Sequence
  Synthetic
QYGYR

SEQ ID NO: 3855 - protein, 5 aa, Artificial Sequence
  Synthetic
IYPAA

SEQ ID NO: 3856 - protein, 5 aa, Artificial Sequence
  Synthetic
YRWTV

SEQ ID NO: 3857 - protein, 5 aa, Artificial Sequence
  Synthetic
TNGCC

SEQ ID NO: 3858 - protein, 5 aa, Artificial Sequence
  Synthetic
RSVMS

SEQ ID NO: 3859 - protein, 5 aa, Artificial Sequence
  Synthetic
PYDAG

SEQ ID NO: 3860 - protein, 5 aa, Artificial Sequence
  Synthetic
FRGVT

SEQ ID NO: 3861 - protein, 5 aa, Artificial Sequence
  Synthetic
EFGWS

SEQ ID NO: 3862 - protein, 5 aa, Artificial Sequence
  Synthetic
PLRHV

SEQ ID NO: 3863 - protein, 5 aa, Artificial Sequence
  Synthetic
LRTDR

SEQ ID NO: 3864 - protein, 5 aa, Artificial Sequence
  Synthetic
CVGLF

SEQ ID NO: 3865 - protein, 5 aa, Artificial Sequence
  Synthetic
NCGSV

SEQ ID NO: 3866 - protein, 5 aa, Artificial Sequence
  Synthetic
LVSSS

SEQ ID NO: 3867 - protein, 5 aa, Artificial Sequence
  Synthetic
PDSIQ

SEQ ID NO: 3868 - protein, 5 aa, Artificial Sequence
  Synthetic
AAWPM

SEQ ID NO: 3869 - protein, 5 aa, Artificial Sequence
  Synthetic
TDVPT

SEQ ID NO: 3870 - protein, 5 aa, Artificial Sequence
  Synthetic
PFSFR

SEQ ID NO: 3871 - protein, 5 aa, Artificial Sequence
  Synthetic
ADGER

SEQ ID NO: 3872 - protein, 5 aa, Artificial Sequence
  Synthetic
GHSFS

SEQ ID NO: 3873 - protein, 5 aa, Artificial Sequence
  Synthetic
TSVAR

SEQ ID NO: 3874 - protein, 5 aa, Artificial Sequence
  Synthetic
HFLNS

SEQ ID NO: 3875 - protein, 5 aa, Artificial Sequence
  Synthetic
LSHLR

SEQ ID NO: 3876 - protein, 5 aa, Artificial Sequence
  Synthetic
PGYSL

SEQ ID NO: 3877 - protein, 5 aa, Artificial Sequence
  Synthetic
TSGCD

SEQ ID NO: 3878 - protein, 5 aa, Artificial Sequence
  Synthetic
VFRRA

SEQ ID NO: 3879 - protein, 5 aa, Artificial Sequence
  Synthetic
GLDRY

SEQ ID NO: 3880 - protein, 5 aa, Artificial Sequence
  Synthetic
RAAVT

SEQ ID NO: 3881 - protein, 5 aa, Artificial Sequence
  Synthetic
NYPEH

SEQ ID NO: 3882 - protein, 5 aa, Artificial Sequence
  Synthetic
MPGVV

SEQ ID NO: 3883 - protein, 5 aa, Artificial Sequence
  Synthetic
IGGSR

SEQ ID NO: 3884 - protein, 5 aa, Artificial Sequence
  Synthetic
HAPQD

SEQ ID NO: 3885 - protein, 5 aa, Artificial Sequence
  Synthetic
FYTIS

SEQ ID NO: 3886 - protein, 5 aa, Artificial Sequence
  Synthetic
NDVDG

SEQ ID NO: 3887 - protein, 5 aa, Artificial Sequence
  Synthetic
RAGRC

SEQ ID NO: 3888 - protein, 5 aa, Artificial Sequence
  Synthetic
GFTAP

SEQ ID NO: 3889 - protein, 5 aa, Artificial Sequence
  Synthetic
CDGTT

SEQ ID NO: 3890 - protein, 5 aa, Artificial Sequence
  Synthetic
FGDIG

SEQ ID NO: 3891 - protein, 5 aa, Artificial Sequence
  Synthetic
MLLKS

SEQ ID NO: 3892 - protein, 5 aa, Artificial Sequence
  Synthetic
GILCE

SEQ ID NO: 3893 - protein, 5 aa, Artificial Sequence
  Synthetic
NGGVL

SEQ ID NO: 3894 - protein, 5 aa, Artificial Sequence
  Synthetic
NSGST

SEQ ID NO: 3895 - protein, 5 aa, Artificial Sequence
  Synthetic
MILGS

SEQ ID NO: 3896 - skipped

SEQ ID NO: 3897 - protein, 5 aa, Artificial Sequence
  Synthetic
RTQRF

SEQ ID NO: 3898 - protein, 5 aa, Artificial Sequence
  Synthetic
NQWPA

SEQ ID NO: 3899 - protein, 5 aa, Artificial Sequence
  Synthetic
SSQTE

SEQ ID NO: 3900 - protein, 5 aa, Artificial Sequence
  Synthetic
PVGRF

SEQ ID NO: 3901 - skipped

SEQ ID NO: 3902 - protein, 5 aa, Artificial Sequence
  Synthetic
PSSCR

SEQ ID NO: 3903 - protein, 5 aa, Artificial Sequence
  Synthetic
KFYRG

SEQ ID NO: 3904 - protein, 5 aa, Artificial Sequence
  Synthetic
RRPVL

SEQ ID NO: 3905 - protein, 5 aa, Artificial Sequence
  Synthetic
GSMLH

SEQ ID NO: 3906 - protein, 5 aa, Artificial Sequence
  Synthetic
ISASI

SEQ ID NO: 3907 - protein, 5 aa, Artificial Sequence
  Synthetic
EFGEC

SEQ ID NO: 3908 - protein, 5 aa, Artificial Sequence
  Synthetic
YGHGP

SEQ ID NO: 3909 - protein, 5 aa, Artificial Sequence
  Synthetic
SDRGV

SEQ ID NO: 3910 - protein, 5 aa, Artificial Sequence
  Synthetic
VLNHH

SEQ ID NO: 3911 - protein, 5 aa, Artificial Sequence
  Synthetic
FWDRV

SEQ ID NO: 3912 - protein, 5 aa, Artificial Sequence
  Synthetic
IRDVC

SEQ ID NO: 3913 - protein, 5 aa, Artificial Sequence
  Synthetic
WSTCE

SEQ ID NO: 3914 - protein, 5 aa, Artificial Sequence
  Synthetic
RSWFV

SEQ ID NO: 3915 - protein, 5 aa, Artificial Sequence
  Synthetic
WFMGA

SEQ ID NO: 3916 - protein, 5 aa, Artificial Sequence
  Synthetic
NPSYD

SEQ ID NO: 3917 - protein, 5 aa, Artificial Sequence
  Synthetic
YCGIW

SEQ ID NO: 3918 - protein, 5 aa, Artificial Sequence
  Synthetic
CGGFA

SEQ ID NO: 3919 - protein, 5 aa, Artificial Sequence
  Synthetic
RSVEW

SEQ ID NO: 3920 - protein, 5 aa, Artificial Sequence
  Synthetic
RVGPV

SEQ ID NO: 3921 - protein, 5 aa, Artificial Sequence
  Synthetic
SGALS

SEQ ID NO: 3922 - protein, 5 aa, Artificial Sequence
  Synthetic
NGDLC

SEQ ID NO: 3923 - protein, 5 aa, Artificial Sequence
  Synthetic
AHESH

SEQ ID NO: 3924 - protein, 5 aa, Artificial Sequence
  Synthetic
NCSCR

SEQ ID NO: 3925 - protein, 5 aa, Artificial Sequence
  Synthetic
GWNFT

SEQ ID NO: 3926 - protein, 5 aa, Artificial Sequence
  Synthetic
RSKWV

SEQ ID NO: 3927 - protein, 5 aa, Artificial Sequence
  Synthetic
FTGFM

SEQ ID NO: 3928 - protein, 5 aa, Artificial Sequence
  Synthetic
VGGDY

SEQ ID NO: 3929 - protein, 5 aa, Artificial Sequence
  Synthetic
FGASR

SEQ ID NO: 3930 - protein, 5 aa, Artificial Sequence
  Synthetic
ARGLV

SEQ ID NO: 3931 - protein, 5 aa, Artificial Sequence
  Synthetic
CGIRH

SEQ ID NO: 3932 - skipped

SEQ ID NO: 3933 - protein, 5 aa, Artificial Sequence
  Synthetic
DMSTT

SEQ ID NO: 3934 - protein, 5 aa, Artificial Sequence
  Synthetic
LGVCS

SEQ ID NO: 3935 - protein, 5 aa, Artificial Sequence
  Synthetic
GYRQH

SEQ ID NO: 3936 - protein, 5 aa, Artificial Sequence
  Synthetic
PANGE

SEQ ID NO: 3937 - protein, 5 aa, Artificial Sequence
  Synthetic
ASEVW

SEQ ID NO: 3938 - protein, 5 aa, Artificial Sequence
  Synthetic
DSVFR

SEQ ID NO: 3939 - protein, 5 aa, Artificial Sequence
  Synthetic
IRWTA

SEQ ID NO: 3940 - protein, 5 aa, Artificial Sequence
  Synthetic
HDCLP

SEQ ID NO: 3941 - protein, 5 aa, Artificial Sequence
  Synthetic
GDGFG

SEQ ID NO: 3942 - protein, 5 aa, Artificial Sequence
  Synthetic
EISCW

SEQ ID NO: 3943 - protein, 5 aa, Artificial Sequence
  Synthetic
LTSLQ

SEQ ID NO: 3944 - protein, 5 aa, Artificial Sequence
  Synthetic
YGCPS

SEQ ID NO: 3945 - protein, 5 aa, Artificial Sequence
  Synthetic
LSAIC

SEQ ID NO: 3946 - protein, 5 aa, Artificial Sequence
  Synthetic
TRGME

SEQ ID NO: 3947 - protein, 5 aa, Artificial Sequence
  Synthetic
RNPCC

SEQ ID NO: 3948 - protein, 5 aa, Artificial Sequence
  Synthetic
NGSGD

SEQ ID NO: 3949 - protein, 5 aa, Artificial Sequence
  Synthetic
TNTYW

SEQ ID NO: 3950 - protein, 5 aa, Artificial Sequence
  Synthetic
KFSFH

SEQ ID NO: 3951 - protein, 5 aa, Artificial Sequence
  Synthetic
YGSLD

SEQ ID NO: 3952 - protein, 5 aa, Artificial Sequence
  Synthetic
NDSSI

SEQ ID NO: 3953 - protein, 5 aa, Artificial Sequence
  Synthetic
GDANR

SEQ ID NO: 3954 - protein, 5 aa, Artificial Sequence
  Synthetic
CLFIR

SEQ ID NO: 3955 - protein, 5 aa, Artificial Sequence
  Synthetic
AVSGN

SEQ ID NO: 3956 - protein, 5 aa, Artificial Sequence
  Synthetic
SWGTR

SEQ ID NO: 3957 - protein, 5 aa, Artificial Sequence
  Synthetic
SCPSG

SEQ ID NO: 3958 - protein, 5 aa, Artificial Sequence
  Synthetic
AVRPY

SEQ ID NO: 3959 - protein, 5 aa, Artificial Sequence
  Synthetic
GFNSL

SEQ ID NO: 3960 - protein, 5 aa, Artificial Sequence
  Synthetic
RLLHE

SEQ ID NO: 3961 - protein, 5 aa, Artificial Sequence
  Synthetic
FGSVR

SEQ ID NO: 3962 - protein, 5 aa, Artificial Sequence
  Synthetic
GVSGL

SEQ ID NO: 3963 - protein, 5 aa, Artificial Sequence
  Synthetic
PCSSR

SEQ ID NO: 3964 - protein, 5 aa, Artificial Sequence
  Synthetic
FGSLR

SEQ ID NO: 3965 - protein, 5 aa, Artificial Sequence
  Synthetic
LGGLN

SEQ ID NO: 3966 - protein, 5 aa, Artificial Sequence
  Synthetic
CNFFF

SEQ ID NO: 3967 - skipped

SEQ ID NO: 3968 - protein, 5 aa, Artificial Sequence
  Synthetic
NYPAI

SEQ ID NO: 3969 - protein, 5 aa, Artificial Sequence
  Synthetic
ALSAH

SEQ ID NO: 3970 - protein, 5 aa, Artificial Sequence
  Synthetic
VCAFW

SEQ ID NO: 3971 - protein, 5 aa, Artificial Sequence
  Synthetic
RPVRV

SEQ ID NO: 3972 - protein, 5 aa, Artificial Sequence
  Synthetic
KMFAV

SEQ ID NO: 3973 - protein, 5 aa, Artificial Sequence
  Synthetic
WWDLF

SEQ ID NO: 3974 - protein, 5 aa, Artificial Sequence
  Synthetic
RCMCF

SEQ ID NO: 3975 - protein, 5 aa, Artificial Sequence
  Synthetic
RDPRG

SEQ ID NO: 3976 - protein, 5 aa, Artificial Sequence
  Synthetic
WERGN

SEQ ID NO: 3977 - protein, 5 aa, Artificial Sequence
  Synthetic
SGNGH

SEQ ID NO: 3978 - protein, 5 aa, Artificial Sequence
  Synthetic
RAASP

SEQ ID NO: 3979 - protein, 5 aa, Artificial Sequence
  Synthetic
CYCAT

SEQ ID NO: 3980 - protein, 5 aa, Artificial Sequence
  Synthetic
FDGLF

SEQ ID NO: 3981 - protein, 5 aa, Artificial Sequence
  Synthetic
TGNRT

SEQ ID NO: 3982 - protein, 5 aa, Artificial Sequence
  Synthetic
SGEYL

SEQ ID NO: 3983 - protein, 5 aa, Artificial Sequence
  Synthetic
IISPA

SEQ ID NO: 3984 - protein, 5 aa, Artificial Sequence
  Synthetic
SYVER

SEQ ID NO: 3985 - protein, 5 aa, Artificial Sequence
  Synthetic
FAPDA

SEQ ID NO: 3986 - protein, 5 aa, Artificial Sequence
  Synthetic
CLDWC

SEQ ID NO: 3987 - protein, 5 aa, Artificial Sequence
  Synthetic
PIAPV

SEQ ID NO: 3988 - protein, 5 aa, Artificial Sequence
  Synthetic
KATAR

SEQ ID NO: 3989 - protein, 5 aa, Artificial Sequence
  Synthetic
CLMEY

SEQ ID NO: 3990 - protein, 5 aa, Artificial Sequence
  Synthetic
PVFAC

SEQ ID NO: 3991 - protein, 5 aa, Artificial Sequence
  Synthetic
IACGP

SEQ ID NO: 3992 - protein, 5 aa, Artificial Sequence
  Synthetic
SWCGS

SEQ ID NO: 3993 - protein, 5 aa, Artificial Sequence
  Synthetic
PNIDG

SEQ ID NO: 3994 - protein, 5 aa, Artificial Sequence
  Synthetic
ACQSL

SEQ ID NO: 3995 - protein, 5 aa, Artificial Sequence
  Synthetic
SDYHV

SEQ ID NO: 3996 - protein, 5 aa, Artificial Sequence
  Synthetic
YYILA

SEQ ID NO: 3997 - protein, 5 aa, Artificial Sequence
  Synthetic
WVNGP

SEQ ID NO: 3998 - protein, 5 aa, Artificial Sequence
  Synthetic
VGSVE

SEQ ID NO: 3999 - protein, 5 aa, Artificial Sequence
  Synthetic
ALGDF

SEQ ID NO: 4000 - protein, 5 aa, Artificial Sequence
  Synthetic
KDLSA

SEQ ID NO: 4001 - protein, 5 aa, Artificial Sequence
  Synthetic
PLRGD

SEQ ID NO: 4002 - protein, 5 aa, Artificial Sequence
  Synthetic
GSFLR

SEQ ID NO: 4003 - protein, 5 aa, Artificial Sequence
  Synthetic
SEGSR

SEQ ID NO: 4004 - protein, 5 aa, Artificial Sequence
  Synthetic
IRDPE

SEQ ID NO: 4005 - protein, 5 aa, Artificial Sequence
  Synthetic
VGGFY

SEQ ID NO: 4006 - protein, 5 aa, Artificial Sequence
  Synthetic
SAQTH

SEQ ID NO: 4007 - protein, 5 aa, Artificial Sequence
  Synthetic
FGNNG

SEQ ID NO: 4008 - protein, 5 aa, Artificial Sequence
  Synthetic
PMYSL

SEQ ID NO: 4009 - protein, 5 aa, Artificial Sequence
  Synthetic
LSLSR

SEQ ID NO: 4010 - protein, 5 aa, Artificial Sequence
  Synthetic
SDASA

SEQ ID NO: 4011 - protein, 5 aa, Artificial Sequence
  Synthetic
RSGEF

SEQ ID NO: 4012 - protein, 5 aa, Artificial Sequence
  Synthetic
QAVSV

SEQ ID NO: 4013 - protein, 4 aa, Artificial Sequence
  Synthetic
PSAG

SEQ ID NO: 4014 - protein, 5 aa, Artificial Sequence
  Synthetic
YWSDK

SEQ ID NO: 4015 - protein, 5 aa, Artificial Sequence
  Synthetic
RSLQF

SEQ ID NO: 4016 - protein, 5 aa, Artificial Sequence
  Synthetic
FHTQA

SEQ ID NO: 4017 - protein, 5 aa, Artificial Sequence
  Synthetic
DVGAW

SEQ ID NO: 4018 - protein, 5 aa, Artificial Sequence
  Synthetic
TAASC

SEQ ID NO: 4019 - protein, 5 aa, Artificial Sequence
  Synthetic
FNHAY

SEQ ID NO: 4020 - protein, 5 aa, Artificial Sequence
  Synthetic
CYGIS

SEQ ID NO: 4021 - protein, 5 aa, Artificial Sequence
  Synthetic
RVAFE

SEQ ID NO: 4022 - protein, 5 aa, Artificial Sequence
  Synthetic
RDWNI

SEQ ID NO: 4023 - protein, 5 aa, Artificial Sequence
  Synthetic
ESHDC

SEQ ID NO: 4024 - protein, 5 aa, Artificial Sequence
  Synthetic
MLTGH

SEQ ID NO: 4025 - protein, 5 aa, Artificial Sequence
  Synthetic
PNRGF

SEQ ID NO: 4026 - protein, 5 aa, Artificial Sequence
  Synthetic
RAEGV

SEQ ID NO: 4027 - protein, 5 aa, Artificial Sequence
  Synthetic
HGQDV

SEQ ID NO: 4028 - protein, 5 aa, Artificial Sequence
  Synthetic
AHSMD

SEQ ID NO: 4029 - protein, 5 aa, Artificial Sequence
  Synthetic
NDFRD

SEQ ID NO: 4030 - protein, 5 aa, Artificial Sequence
  Synthetic
CSGDW

SEQ ID NO: 4031 - protein, 5 aa, Artificial Sequence
  Synthetic
MDNVV

SEQ ID NO: 4032 - protein, 5 aa, Artificial Sequence
  Synthetic
VFAGN

SEQ ID NO: 4033 - protein, 5 aa, Artificial Sequence
  Synthetic
RVNDV

SEQ ID NO: 4034 - protein, 5 aa, Artificial Sequence
  Synthetic
SWPSQ

SEQ ID NO: 4035 - protein, 5 aa, Artificial Sequence
  Synthetic
LGGVA

SEQ ID NO: 4036 - protein, 5 aa, Artificial Sequence
  Synthetic
PDVSL

SEQ ID NO: 4037 - protein, 5 aa, Artificial Sequence
  Synthetic
SMSLA

SEQ ID NO: 4038 - protein, 5 aa, Artificial Sequence
  Synthetic
SAYST

SEQ ID NO: 4039 - protein, 4 aa, Artificial Sequence
  Synthetic
CLGW

SEQ ID NO: 4040 - protein, 5 aa, Artificial Sequence
  Synthetic
GLGVD

SEQ ID NO: 4041 - protein, 5 aa, Artificial Sequence
  Synthetic
VDGYC

SEQ ID NO: 4042 - protein, 5 aa, Artificial Sequence
  Synthetic
WRTSD

SEQ ID NO: 4043 - protein, 5 aa, Artificial Sequence
  Synthetic
LAESV

SEQ ID NO: 4044 - protein, 5 aa, Artificial Sequence
  Synthetic
QVLKV

SEQ ID NO: 4045 - protein, 5 aa, Artificial Sequence
  Synthetic
MIGNT

SEQ ID NO: 4046 - protein, 5 aa, Artificial Sequence
  Synthetic
YHHAG

SEQ ID NO: 4047 - protein, 5 aa, Artificial Sequence
  Synthetic
FRPPH

SEQ ID NO: 4048 - protein, 5 aa, Artificial Sequence
  Synthetic
RMSDS

SEQ ID NO: 4049 - protein, 5 aa, Artificial Sequence
  Synthetic
ATRPE

SEQ ID NO: 4050 - protein, 5 aa, Artificial Sequence
  Synthetic
LSHES

SEQ ID NO: 4051 - protein, 5 aa, Artificial Sequence
  Synthetic
GWDEI

SEQ ID NO: 4052 - protein, 5 aa, Artificial Sequence
  Synthetic
PHNLG

SEQ ID NO: 4053 - protein, 5 aa, Artificial Sequence
  Synthetic
MSCVC

SEQ ID NO: 4054 - protein, 5 aa, Artificial Sequence
  Synthetic
GYVGD

SEQ ID NO: 4055 - protein, 5 aa, Artificial Sequence
  Synthetic
HCFNS

SEQ ID NO: 4056 - protein, 5 aa, Artificial Sequence
  Synthetic
SPGSG

SEQ ID NO: 4057 - protein, 5 aa, Artificial Sequence
  Synthetic
RNFLF

SEQ ID NO: 4058 - protein, 5 aa, Artificial Sequence
  Synthetic
SSGLC

SEQ ID NO: 4059 - protein, 5 aa, Artificial Sequence
  Synthetic
YFSTL

SEQ ID NO: 4060 - protein, 5 aa, Artificial Sequence
  Synthetic
RDDTA

SEQ ID NO: 4061 - protein, 5 aa, Artificial Sequence
  Synthetic
LTREA

SEQ ID NO: 4062 - protein, 5 aa, Artificial Sequence
  Synthetic
SKAGI

SEQ ID NO: 4063 - protein, 5 aa, Artificial Sequence
  Synthetic
TSCEA

SEQ ID NO: 4064 - protein, 5 aa, Artificial Sequence
  Synthetic
DRGYR

SEQ ID NO: 4065 - protein, 5 aa, Artificial Sequence
  Synthetic
ADGWF

SEQ ID NO: 4066 - protein, 5 aa, Artificial Sequence
  Synthetic
TGYPG

SEQ ID NO: 4067 - protein, 5 aa, Artificial Sequence
  Synthetic
GSCLT

SEQ ID NO: 4068 - protein, 5 aa, Artificial Sequence
  Synthetic
YSTLL

SEQ ID NO: 4069 - protein, 5 aa, Artificial Sequence
  Synthetic
PIGTK

SEQ ID NO: 4070 - protein, 5 aa, Artificial Sequence
  Synthetic
WHHAA

SEQ ID NO: 4071 - protein, 5 aa, Artificial Sequence
  Synthetic
RDGHS

SEQ ID NO: 4072 - protein, 5 aa, Artificial Sequence
  Synthetic
SWWCV

SEQ ID NO: 4073 - protein, 5 aa, Artificial Sequence
  Synthetic
TSPSC

SEQ ID NO: 4074 - protein, 5 aa, Artificial Sequence
  Synthetic
HGSFM

SEQ ID NO: 4075 - protein, 5 aa, Artificial Sequence
  Synthetic
NSLIC

SEQ ID NO: 4076 - protein, 4 aa, Artificial Sequence
  Synthetic
RWGA

SEQ ID NO: 4077 - protein, 5 aa, Artificial Sequence
  Synthetic
IETGD

SEQ ID NO: 4078 - protein, 5 aa, Artificial Sequence
  Synthetic
VESGG

SEQ ID NO: 4079 - protein, 5 aa, Artificial Sequence
  Synthetic
NFSQC

SEQ ID NO: 4080 - protein, 5 aa, Artificial Sequence
  Synthetic
SVSWF

SEQ ID NO: 4081 - protein, 5 aa, Artificial Sequence
  Synthetic
GAAEV

SEQ ID NO: 4082 - protein, 5 aa, Artificial Sequence
  Synthetic
CLNYV

SEQ ID NO: 4083 - protein, 5 aa, Artificial Sequence
  Synthetic
CDGTR

SEQ ID NO: 4084 - protein, 4 aa, Artificial Sequence
  Synthetic
SSGG

SEQ ID NO: 4085 - protein, 5 aa, Artificial Sequence
  Synthetic
CGVLS

SEQ ID NO: 4086 - protein, 5 aa, Artificial Sequence
  Synthetic
LSALC

SEQ ID NO: 4087 - protein, 5 aa, Artificial Sequence
  Synthetic
VQYGT

SEQ ID NO: 4088 - protein, 5 aa, Artificial Sequence
  Synthetic
LSVML

SEQ ID NO: 4089 - protein, 5 aa, Artificial Sequence
  Synthetic
RHNVD

SEQ ID NO: 4090 - protein, 5 aa, Artificial Sequence
  Synthetic
SYESR

SEQ ID NO: 4091 - protein, 5 aa, Artificial Sequence
  Synthetic
HCALR

SEQ ID NO: 4092 - protein, 5 aa, Artificial Sequence
  Synthetic
TIANV

SEQ ID NO: 4093 - protein, 5 aa, Artificial Sequence
  Synthetic
LGCSL

SEQ ID NO: 4094 - protein, 5 aa, Artificial Sequence
  Synthetic
FSDKF

SEQ ID NO: 4095 - protein, 4 aa, Artificial Sequence
  Synthetic
RCCQ

SEQ ID NO: 4096 - protein, 5 aa, Artificial Sequence
  Synthetic
ALRNT

SEQ ID NO: 4097 - protein, 5 aa, Artificial Sequence
  Synthetic
DRGDT

SEQ ID NO: 4098 - protein, 5 aa, Artificial Sequence
  Synthetic
GRWGG

SEQ ID NO: 4099 - protein, 5 aa, Artificial Sequence
  Synthetic
PDSIT

SEQ ID NO: 4100 - protein, 5 aa, Artificial Sequence
  Synthetic
MGFCH

SEQ ID NO: 4101 - protein, 5 aa, Artificial Sequence
  Synthetic
HAGYR

SEQ ID NO: 4102 - protein, 5 aa, Artificial Sequence
  Synthetic
SAASN

SEQ ID NO: 4103 - protein, 5 aa, Artificial Sequence
  Synthetic
RMSIG

SEQ ID NO: 4104 - protein, 5 aa, Artificial Sequence
  Synthetic
VGSFV

SEQ ID NO: 4105 - protein, 5 aa, Artificial Sequence
  Synthetic
LFRTV

SEQ ID NO: 4106 - protein, 5 aa, Artificial Sequence
  Synthetic
LHNGI

SEQ ID NO: 4107 - protein, 5 aa, Artificial Sequence
  Synthetic
MSDLQ

SEQ ID NO: 4108 - protein, 5 aa, Artificial Sequence
  Synthetic
GFTET

SEQ ID NO: 4109 - protein, 5 aa, Artificial Sequence
  Synthetic
SNWLF

SEQ ID NO: 4110 - protein, 5 aa, Artificial Sequence
  Synthetic
ARLEN

SEQ ID NO: 4111 - protein, 5 aa, Artificial Sequence
  Synthetic
TWGHV

SEQ ID NO: 4112 - protein, 5 aa, Artificial Sequence
  Synthetic
CHGVT

SEQ ID NO: 4113 - protein, 5 aa, Artificial Sequence
  Synthetic
VSGLA

SEQ ID NO: 4114 - protein, 5 aa, Artificial Sequence
  Synthetic
AFGNG

SEQ ID NO: 4115 - protein, 5 aa, Artificial Sequence
  Synthetic
CDASL

SEQ ID NO: 4116 - protein, 5 aa, Artificial Sequence
  Synthetic
LSESY

SEQ ID NO: 4117 - protein, 5 aa, Artificial Sequence
  Synthetic
HVPFA

SEQ ID NO: 4118 - protein, 5 aa, Artificial Sequence
  Synthetic
ANNAE

SEQ ID NO: 4119 - protein, 5 aa, Artificial Sequence
  Synthetic
PCLNN

SEQ ID NO: 4120 - protein, 5 aa, Artificial Sequence
  Synthetic
PCDDG

SEQ ID NO: 4121 - protein, 5 aa, Artificial Sequence
  Synthetic
DVHAL

SEQ ID NO: 4122 - protein, 5 aa, Artificial Sequence
  Synthetic
SLYPH

SEQ ID NO: 4123 - protein, 5 aa, Artificial Sequence
  Synthetic
GIDMT

SEQ ID NO: 4124 - protein, 5 aa, Artificial Sequence
  Synthetic
SSSTS

SEQ ID NO: 4125 - protein, 5 aa, Artificial Sequence
  Synthetic
RSGGG

SEQ ID NO: 4126 - protein, 5 aa, Artificial Sequence
  Synthetic
MSFSL

SEQ ID NO: 4127 - protein, 5 aa, Artificial Sequence
  Synthetic
PRVET

SEQ ID NO: 4128 - protein, 5 aa, Artificial Sequence
  Synthetic
AHVGF

SEQ ID NO: 4129 - protein, 5 aa, Artificial Sequence
  Synthetic
LVQVM

SEQ ID NO: 4130 - protein, 5 aa, Artificial Sequence
  Synthetic
MATDN

SEQ ID NO: 4131 - protein, 5 aa, Artificial Sequence
  Synthetic
HQSCY

SEQ ID NO: 4132 - protein, 5 aa, Artificial Sequence
  Synthetic
QGCYD

SEQ ID NO: 4133 - protein, 5 aa, Artificial Sequence
  Synthetic
IGLAL

SEQ ID NO: 4134 - protein, 5 aa, Artificial Sequence
  Synthetic
VWADQ

SEQ ID NO: 4135 - protein, 4 aa, Artificial Sequence
  Synthetic
PRYS

SEQ ID NO: 4136 - protein, 5 aa, Artificial Sequence
  Synthetic
TDAKA

SEQ ID NO: 4137 - protein, 5 aa, Artificial Sequence
  Synthetic
VQEYC

SEQ ID NO: 4138 - protein, 5 aa, Artificial Sequence
  Synthetic
VSNCA

SEQ ID NO: 4139 - protein, 5 aa, Artificial Sequence
  Synthetic
FYLGV

SEQ ID NO: 4140 - protein, 5 aa, Artificial Sequence
  Synthetic
GNVRC

SEQ ID NO: 4141 - protein, 5 aa, Artificial Sequence
  Synthetic
GVHRI

SEQ ID NO: 4142 - protein, 5 aa, Artificial Sequence
  Synthetic
CVSAF

SEQ ID NO: 4143 - protein, 5 aa, Artificial Sequence
  Synthetic
RSVAS

SEQ ID NO: 4144 - protein, 5 aa, Artificial Sequence
  Synthetic
RHAQH

SEQ ID NO: 4145 - protein, 5 aa, Artificial Sequence
  Synthetic
VHCDA

SEQ ID NO: 4146 - protein, 5 aa, Artificial Sequence
  Synthetic
VDGVP

SEQ ID NO: 4147 - protein, 5 aa, Artificial Sequence
  Synthetic
LTHMG

SEQ ID NO: 4148 - protein, 5 aa, Artificial Sequence
  Synthetic
VGMRC

SEQ ID NO: 4149 - protein, 5 aa, Artificial Sequence
  Synthetic
CHPSQ

SEQ ID NO: 4150 - protein, 5 aa, Artificial Sequence
  Synthetic
SSGVT

SEQ ID NO: 4151 - protein, 5 aa, Artificial Sequence
  Synthetic
NRGFR

SEQ ID NO: 4152 - protein, 5 aa, Artificial Sequence
  Synthetic
SQLTL

SEQ ID NO: 4153 - protein, 5 aa, Artificial Sequence
  Synthetic
VCAAM

SEQ ID NO: 4154 - protein, 5 aa, Artificial Sequence
  Synthetic
KGDGM

SEQ ID NO: 4155 - protein, 5 aa, Artificial Sequence
  Synthetic
CYTSS

SEQ ID NO: 4156 - protein, 5 aa, Artificial Sequence
  Synthetic
RHVDV

SEQ ID NO: 4157 - protein, 5 aa, Artificial Sequence
  Synthetic
DYYER

SEQ ID NO: 4158 - protein, 5 aa, Artificial Sequence
  Synthetic
VCEFL

SEQ ID NO: 4159 - protein, 5 aa, Artificial Sequence
  Synthetic
IQLGD

SEQ ID NO: 4160 - protein, 5 aa, Artificial Sequence
  Synthetic
QFSSD

SEQ ID NO: 4161 - protein, 5 aa, Artificial Sequence
  Synthetic
TDSYV

SEQ ID NO: 4162 - protein, 5 aa, Artificial Sequence
  Synthetic
EAAAG

SEQ ID NO: 4163 - protein, 5 aa, Artificial Sequence
  Synthetic
MAHSL

SEQ ID NO: 4164 - protein, 5 aa, Artificial Sequence
  Synthetic
YATSR

SEQ ID NO: 4165 - protein, 5 aa, Artificial Sequence
  Synthetic
RDGFI

SEQ ID NO: 4166 - protein, 5 aa, Artificial Sequence
  Synthetic
ITWCV

SEQ ID NO: 4167 - protein, 5 aa, Artificial Sequence
  Synthetic
TDGSL

SEQ ID NO: 4168 - protein, 5 aa, Artificial Sequence
  Synthetic
HWFKS

SEQ ID NO: 4169 - protein, 5 aa, Artificial Sequence
  Synthetic
LGSHD

SEQ ID NO: 4170 - protein, 5 aa, Artificial Sequence
  Synthetic
VTTSH

SEQ ID NO: 4171 - protein, 5 aa, Artificial Sequence
  Synthetic
TTIDS

SEQ ID NO: 4172 - protein, 5 aa, Artificial Sequence
  Synthetic
LHFLN

SEQ ID NO: 4173 - protein, 5 aa, Artificial Sequence
  Synthetic
GSHKV

SEQ ID NO: 4174 - protein, 5 aa, Artificial Sequence
  Synthetic
PARCH

SEQ ID NO: 4175 - protein, 5 aa, Artificial Sequence
  Synthetic
VTGGR

SEQ ID NO: 4176 - protein, 5 aa, Artificial Sequence
  Synthetic
SCVAS

SEQ ID NO: 4177 - protein, 5 aa, Artificial Sequence
  Synthetic
RGGVL

SEQ ID NO: 4178 - protein, 5 aa, Artificial Sequence
  Synthetic
HSCTD

SEQ ID NO: 4179 - protein, 5 aa, Artificial Sequence
  Synthetic
SVSCF

SEQ ID NO: 4180 - protein, 5 aa, Artificial Sequence
  Synthetic
HAVSR

SEQ ID NO: 4181 - protein, 5 aa, Artificial Sequence
  Synthetic
NVPDL

SEQ ID NO: 4182 - protein, 5 aa, Artificial Sequence
  Synthetic
LYSRG

SEQ ID NO: 4183 - protein, 5 aa, Artificial Sequence
  Synthetic
GYACA

SEQ ID NO: 4184 - protein, 5 aa, Artificial Sequence
  Synthetic
YDNVQ

SEQ ID NO: 4185 - protein, 5 aa, Artificial Sequence
  Synthetic
PGGGE

SEQ ID NO: 4186 - protein, 5 aa, Artificial Sequence
  Synthetic
AHSSC

SEQ ID NO: 4187 - protein, 5 aa, Artificial Sequence
  Synthetic
HDYTA

SEQ ID NO: 4188 - protein, 5 aa, Artificial Sequence
  Synthetic
LHAFG

SEQ ID NO: 4189 - protein, 5 aa, Artificial Sequence
  Synthetic
SHLGP

SEQ ID NO: 4190 - protein, 5 aa, Artificial Sequence
  Synthetic
PGDRF

SEQ ID NO: 4191 - protein, 5 aa, Artificial Sequence
  Synthetic
RGGPG

SEQ ID NO: 4192 - protein, 5 aa, Artificial Sequence
  Synthetic
SCLAD

SEQ ID NO: 4193 - protein, 5 aa, Artificial Sequence
  Synthetic
GFCWG

SEQ ID NO: 4194 - protein, 5 aa, Artificial Sequence
  Synthetic
FDNNF

SEQ ID NO: 4195 - protein, 5 aa, Artificial Sequence
  Synthetic
RAATP

SEQ ID NO: 4196 - protein, 5 aa, Artificial Sequence
  Synthetic
GTTGW

SEQ ID NO: 4197 - protein, 5 aa, Artificial Sequence
  Synthetic
FGGLR

SEQ ID NO: 4198 - protein, 5 aa, Artificial Sequence
  Synthetic
LALLD

SEQ ID NO: 4199 - protein, 5 aa, Artificial Sequence
  Synthetic
RSLLS

SEQ ID NO: 4200 - protein, 5 aa, Artificial Sequence
  Synthetic
CARAG

SEQ ID NO: 4201 - protein, 5 aa, Artificial Sequence
  Synthetic
CLPCQ

SEQ ID NO: 4202 - protein, 5 aa, Artificial Sequence
  Synthetic
LAGIE

SEQ ID NO: 4203 - protein, 5 aa, Artificial Sequence
  Synthetic
NMGIT

SEQ ID NO: 4204 - protein, 5 aa, Artificial Sequence
  Synthetic
LPIGH

SEQ ID NO: 4205 - protein, 5 aa, Artificial Sequence
  Synthetic
SCGRD

SEQ ID NO: 4206 - protein, 5 aa, Artificial Sequence
  Synthetic
PVFGS

SEQ ID NO: 4207 - protein, 5 aa, Artificial Sequence
  Synthetic
AFDVD

SEQ ID NO: 4208 - protein, 5 aa, Artificial Sequence
  Synthetic
SMCGH

SEQ ID NO: 4209 - protein, 5 aa, Artificial Sequence
  Synthetic
VILAS

SEQ ID NO: 4210 - protein, 5 aa, Artificial Sequence
  Synthetic
HGSST

SEQ ID NO: 4211 - protein, 5 aa, Artificial Sequence
  Synthetic
LLGTN

SEQ ID NO: 4212 - protein, 5 aa, Artificial Sequence
  Synthetic
SASFS

SEQ ID NO: 4213 - protein, 5 aa, Artificial Sequence
  Synthetic
RCGAV

SEQ ID NO: 4214 - protein, 5 aa, Artificial Sequence
  Synthetic
LCGCC

SEQ ID NO: 4215 - protein, 5 aa, Artificial Sequence
  Synthetic
TGFIC

SEQ ID NO: 4216 - protein, 5 aa, Artificial Sequence
  Synthetic
MQLHG

SEQ ID NO: 4217 - protein, 5 aa, Artificial Sequence
  Synthetic
GPQFC

SEQ ID NO: 4218 - protein, 5 aa, Artificial Sequence
  Synthetic
SRVQY

SEQ ID NO: 4219 - protein, 5 aa, Artificial Sequence
  Synthetic
SYGGY

SEQ ID NO: 4220 - protein, 5 aa, Artificial Sequence
  Synthetic
QSGVG

SEQ ID NO: 4221 - protein, 5 aa, Artificial Sequence
  Synthetic
RHTFV

SEQ ID NO: 4222 - protein, 5 aa, Artificial Sequence
  Synthetic
RRDDD

SEQ ID NO: 4223 - protein, 5 aa, Artificial Sequence
  Synthetic
AVSCC

SEQ ID NO: 4224 - protein, 5 aa, Artificial Sequence
  Synthetic
NLDDY

SEQ ID NO: 4225 - protein, 5 aa, Artificial Sequence
  Synthetic
LRSCC

SEQ ID NO: 4226 - protein, 5 aa, Artificial Sequence
  Synthetic
CYQGA

SEQ ID NO: 4227 - protein, 5 aa, Artificial Sequence
  Synthetic
TVQSR

SEQ ID NO: 4228 - protein, 5 aa, Artificial Sequence
  Synthetic
VDCTT

SEQ ID NO: 4229 - protein, 5 aa, Artificial Sequence
  Synthetic
LDAYR

SEQ ID NO: 4230 - protein, 5 aa, Artificial Sequence
  Synthetic
MWSGS

SEQ ID NO: 4231 - protein, 5 aa, Artificial Sequence
  Synthetic
HDGLI

SEQ ID NO: 4232 - protein, 5 aa, Artificial Sequence
  Synthetic
QYAGG

SEQ ID NO: 4233 - protein, 5 aa, Artificial Sequence
  Synthetic
CDSGN

SEQ ID NO: 4234 - protein, 5 aa, Artificial Sequence
  Synthetic
TGHPN

SEQ ID NO: 4235 - protein, 5 aa, Artificial Sequence
  Synthetic
GSRLI

SEQ ID NO: 4236 - protein, 5 aa, Artificial Sequence
  Synthetic
TWHMH

SEQ ID NO: 4237 - protein, 5 aa, Artificial Sequence
  Synthetic
IVACS

SEQ ID NO: 4238 - protein, 5 aa, Artificial Sequence
  Synthetic
GGPFT

SEQ ID NO: 4239 - protein, 5 aa, Artificial Sequence
  Synthetic
TWPHD

SEQ ID NO: 4240 - protein, 5 aa, Artificial Sequence
  Synthetic
NYTYS

SEQ ID NO: 4241 - protein, 5 aa, Artificial Sequence
  Synthetic
EFSFH

SEQ ID NO: 4242 - protein, 5 aa, Artificial Sequence
  Synthetic
VHKEL

SEQ ID NO: 4243 - protein, 5 aa, Artificial Sequence
  Synthetic
AVGQI

SEQ ID NO: 4244 - protein, 5 aa, Artificial Sequence
  Synthetic
WVHCV

SEQ ID NO: 4245 - protein, 5 aa, Artificial Sequence
  Synthetic
RDRVD

SEQ ID NO: 4246 - protein, 5 aa, Artificial Sequence
  Synthetic
CAGRP

SEQ ID NO: 4247 - protein, 5 aa, Artificial Sequence
  Synthetic
RAPDL

SEQ ID NO: 4248 - protein, 5 aa, Artificial Sequence
  Synthetic
KRSYT

SEQ ID NO: 4249 - protein, 5 aa, Artificial Sequence
  Synthetic
VHSFR

SEQ ID NO: 4250 - protein, 5 aa, Artificial Sequence
  Synthetic
GAYNG

SEQ ID NO: 4251 - protein, 5 aa, Artificial Sequence
  Synthetic
YSHAC

SEQ ID NO: 4252 - protein, 5 aa, Artificial Sequence
  Synthetic
GFFKL

SEQ ID NO: 4253 - protein, 5 aa, Artificial Sequence
  Synthetic
TVSYI

SEQ ID NO: 4254 - protein, 5 aa, Artificial Sequence
  Synthetic
LSSRW

SEQ ID NO: 4255 - protein, 5 aa, Artificial Sequence
  Synthetic
TWRER

SEQ ID NO: 4256 - protein, 5 aa, Artificial Sequence
  Synthetic
GLERR

SEQ ID NO: 4257 - protein, 5 aa, Artificial Sequence
  Synthetic
SSFSF

SEQ ID NO: 4258 - protein, 5 aa, Artificial Sequence
  Synthetic
IGWGR

SEQ ID NO: 4259 - protein, 5 aa, Artificial Sequence
  Synthetic
CVPAG

SEQ ID NO: 4260 - protein, 5 aa, Artificial Sequence
  Synthetic
AFTNN

SEQ ID NO: 4261 - protein, 5 aa, Artificial Sequence
  Synthetic
GIVGW

SEQ ID NO: 4262 - protein, 5 aa, Artificial Sequence
  Synthetic
DEDRA

SEQ ID NO: 4263 - protein, 5 aa, Artificial Sequence
  Synthetic
RCYRI

SEQ ID NO: 4264 - protein, 5 aa, Artificial Sequence
  Synthetic
SYLCE

SEQ ID NO: 4265 - protein, 5 aa, Artificial Sequence
  Synthetic
RIGST

SEQ ID NO: 4266 - protein, 5 aa, Artificial Sequence
  Synthetic
FFGFH

SEQ ID NO: 4267 - protein, 5 aa, Artificial Sequence
  Synthetic
TDMRH

SEQ ID NO: 4268 - protein, 5 aa, Artificial Sequence
  Synthetic
FGSRE

SEQ ID NO: 4269 - protein, 5 aa, Artificial Sequence
  Synthetic
AHAGG

SEQ ID NO: 4270 - protein, 5 aa, Artificial Sequence
  Synthetic
SFIFN

SEQ ID NO: 4271 - protein, 5 aa, Artificial Sequence
  Synthetic
FFNGR

SEQ ID NO: 4272 - protein, 5 aa, Artificial Sequence
  Synthetic
FRADS

SEQ ID NO: 4273 - protein, 5 aa, Artificial Sequence
  Synthetic
LWMVR

SEQ ID NO: 4274 - protein, 5 aa, Artificial Sequence
  Synthetic
GGLVD

SEQ ID NO: 4275 - protein, 5 aa, Artificial Sequence
  Synthetic
NRGRG

SEQ ID NO: 4276 - protein, 4 aa, Artificial Sequence
  Synthetic
LGAR

SEQ ID NO: 4277 - protein, 5 aa, Artificial Sequence
  Synthetic
YGARG

SEQ ID NO: 4278 - protein, 5 aa, Artificial Sequence
  Synthetic
TITTN

SEQ ID NO: 4279 - protein, 5 aa, Artificial Sequence
  Synthetic
RCLAQ

SEQ ID NO: 4280 - protein, 5 aa, Artificial Sequence
  Synthetic
ANDII

SEQ ID NO: 4281 - protein, 5 aa, Artificial Sequence
  Synthetic
WYANF

SEQ ID NO: 4282 - protein, 5 aa, Artificial Sequence
  Synthetic
LDTIR

SEQ ID NO: 4283 - protein, 5 aa, Artificial Sequence
  Synthetic
YASVG

SEQ ID NO: 4284 - protein, 5 aa, Artificial Sequence
  Synthetic
LPAIY

SEQ ID NO: 4285 - protein, 5 aa, Artificial Sequence
  Synthetic
RPFGD

SEQ ID NO: 4286 - protein, 5 aa, Artificial Sequence
  Synthetic
RVFCV

SEQ ID NO: 4287 - protein, 5 aa, Artificial Sequence
  Synthetic
SCSGW

SEQ ID NO: 4288 - protein, 5 aa, Artificial Sequence
  Synthetic
CSVYD

SEQ ID NO: 4289 - protein, 5 aa, Artificial Sequence
  Synthetic
TCGCY

SEQ ID NO: 4290 - protein, 5 aa, Artificial Sequence
  Synthetic
CSHRL

SEQ ID NO: 4291 - protein, 5 aa, Artificial Sequence
  Synthetic
YTRSR

SEQ ID NO: 4292 - protein, 5 aa, Artificial Sequence
  Synthetic
HNYQL

SEQ ID NO: 4293 - protein, 5 aa, Artificial Sequence
  Synthetic
LDCGR

SEQ ID NO: 4294 - protein, 5 aa, Artificial Sequence
  Synthetic
SGGVG

SEQ ID NO: 4295 - protein, 5 aa, Artificial Sequence
  Synthetic
VDSMS

SEQ ID NO: 4296 - protein, 5 aa, Artificial Sequence
  Synthetic
TGSQE

SEQ ID NO: 4297 - protein, 5 aa, Artificial Sequence
  Synthetic
VDRQL

SEQ ID NO: 4298 - protein, 5 aa, Artificial Sequence
  Synthetic
VNSWD

SEQ ID NO: 4299 - protein, 5 aa, Artificial Sequence
  Synthetic
LFEGV

SEQ ID NO: 4300 - protein, 5 aa, Artificial Sequence
  Synthetic
VSAQI

SEQ ID NO: 4301 - protein, 5 aa, Artificial Sequence
  Synthetic
WQPAR

SEQ ID NO: 4302 - protein, 5 aa, Artificial Sequence
  Synthetic
CGAAT

SEQ ID NO: 4303 - protein, 5 aa, Artificial Sequence
  Synthetic
LNSDW

SEQ ID NO: 4304 - protein, 5 aa, Artificial Sequence
  Synthetic
YSLRV

SEQ ID NO: 4305 - protein, 5 aa, Artificial Sequence
  Synthetic
HSGRD

SEQ ID NO: 4306 - protein, 5 aa, Artificial Sequence
  Synthetic
TLATR

SEQ ID NO: 4307 - protein, 5 aa, Artificial Sequence
  Synthetic
SDSSR

SEQ ID NO: 4308 - protein, 5 aa, Artificial Sequence
  Synthetic
LVSGT

SEQ ID NO: 4309 - protein, 5 aa, Artificial Sequence
  Synthetic
LGGEE

SEQ ID NO: 4310 - protein, 5 aa, Artificial Sequence
  Synthetic
PESLC

SEQ ID NO: 4311 - protein, 5 aa, Artificial Sequence
  Synthetic
NTALI

SEQ ID NO: 4312 - protein, 5 aa, Artificial Sequence
  Synthetic
FCFGW

SEQ ID NO: 4313 - protein, 5 aa, Artificial Sequence
  Synthetic
GFGNC

SEQ ID NO: 4314 - protein, 5 aa, Artificial Sequence
  Synthetic
VVFSL

SEQ ID NO: 4315 - protein, 5 aa, Artificial Sequence
  Synthetic
GPRGS

SEQ ID NO: 4316 - protein, 5 aa, Artificial Sequence
  Synthetic
TAHSH

SEQ ID NO: 4317 - protein, 5 aa, Artificial Sequence
  Synthetic
CAGGL

SEQ ID NO: 4318 - protein, 5 aa, Artificial Sequence
  Synthetic
TYEPG

SEQ ID NO: 4319 - protein, 5 aa, Artificial Sequence
  Synthetic
VYGGC

SEQ ID NO: 4320 - protein, 5 aa, Artificial Sequence
  Synthetic
CVRGD

SEQ ID NO: 4321 - protein, 5 aa, Artificial Sequence
  Synthetic
WFVED

SEQ ID NO: 4322 - protein, 5 aa, Artificial Sequence
  Synthetic
TDSVI

SEQ ID NO: 4323 - protein, 5 aa, Artificial Sequence
  Synthetic
DVAGI

SEQ ID NO: 4324 - protein, 5 aa, Artificial Sequence
  Synthetic
MHCNH

SEQ ID NO: 4325 - protein, 5 aa, Artificial Sequence
  Synthetic
HPVSV

SEQ ID NO: 4326 - protein, 5 aa, Artificial Sequence
  Synthetic
MHNDY

SEQ ID NO: 4327 - protein, 5 aa, Artificial Sequence
  Synthetic
FMNSC

SEQ ID NO: 4328 - protein, 5 aa, Artificial Sequence
  Synthetic
SGSWR

SEQ ID NO: 4329 - protein, 5 aa, Artificial Sequence
  Synthetic
GEFFR

SEQ ID NO: 4330 - protein, 5 aa, Artificial Sequence
  Synthetic
WSSSF

SEQ ID NO: 4331 - protein, 5 aa, Artificial Sequence
  Synthetic
RHNLV

SEQ ID NO: 4332 - protein, 5 aa, Artificial Sequence
  Synthetic
DVSHA

SEQ ID NO: 4333 - protein, 5 aa, Artificial Sequence
  Synthetic
SNLRL

SEQ ID NO: 4334 - protein, 5 aa, Artificial Sequence
  Synthetic
EDGHG

SEQ ID NO: 4335 - protein, 5 aa, Artificial Sequence
  Synthetic
TSARD

SEQ ID NO: 4336 - protein, 5 aa, Artificial Sequence
  Synthetic
SCGTA

SEQ ID NO: 4337 - protein, 5 aa, Artificial Sequence
  Synthetic
VGIEI

SEQ ID NO: 4338 - protein, 5 aa, Artificial Sequence
  Synthetic
RGSRD

SEQ ID NO: 4339 - protein, 5 aa, Artificial Sequence
  Synthetic
HRDPT

SEQ ID NO: 4340 - protein, 5 aa, Artificial Sequence
  Synthetic
GYVRC

SEQ ID NO: 4341 - protein, 5 aa, Artificial Sequence
  Synthetic
HRYVQ

SEQ ID NO: 4342 - protein, 5 aa, Artificial Sequence
  Synthetic
NGEDP

SEQ ID NO: 4343 - protein, 5 aa, Artificial Sequence
  Synthetic
SRLEH

SEQ ID NO: 4344 - protein, 4 aa, Artificial Sequence
  Synthetic
SVNG

SEQ ID NO: 4345 - protein, 5 aa, Artificial Sequence
  Synthetic
PPLPR

SEQ ID NO: 4346 - protein, 5 aa, Artificial Sequence
  Synthetic
RVGLT

SEQ ID NO: 4347 - protein, 5 aa, Artificial Sequence
  Synthetic
PDMSV

SEQ ID NO: 4348 - protein, 5 aa, Artificial Sequence
  Synthetic
GIIGV

SEQ ID NO: 4349 - protein, 5 aa, Artificial Sequence
  Synthetic
CFEYY

SEQ ID NO: 4350 - protein, 5 aa, Artificial Sequence
  Synthetic
GCSFV

SEQ ID NO: 4351 - protein, 5 aa, Artificial Sequence
  Synthetic
STMAS

SEQ ID NO: 4352 - protein, 5 aa, Artificial Sequence
  Synthetic
PAIMC

SEQ ID NO: 4353 - protein, 5 aa, Artificial Sequence
  Synthetic
GCGPY

SEQ ID NO: 4354 - protein, 5 aa, Artificial Sequence
  Synthetic
RGSHC

SEQ ID NO: 4355 - protein, 5 aa, Artificial Sequence
  Synthetic
GAIAV

SEQ ID NO: 4356 - protein, 5 aa, Artificial Sequence
  Synthetic
RFGDV

SEQ ID NO: 4357 - protein, 5 aa, Artificial Sequence
  Synthetic
PSFGY

SEQ ID NO: 4358 - protein, 5 aa, Artificial Sequence
  Synthetic
PGATG

SEQ ID NO: 4359 - protein, 5 aa, Artificial Sequence
  Synthetic
NGICV

SEQ ID NO: 4360 - protein, 4 aa, Artificial Sequence
  Synthetic
PSTF

SEQ ID NO: 4361 - protein, 5 aa, Artificial Sequence
  Synthetic
IAPVN

SEQ ID NO: 4362 - protein, 5 aa, Artificial Sequence
  Synthetic
MFLFV

SEQ ID NO: 4363 - protein, 5 aa, Artificial Sequence
  Synthetic
RDHYV

SEQ ID NO: 4364 - protein, 5 aa, Artificial Sequence
  Synthetic
ATHLN

SEQ ID NO: 4365 - protein, 5 aa, Artificial Sequence
  Synthetic
PVFAT

SEQ ID NO: 4366 - protein, 5 aa, Artificial Sequence
  Synthetic
VDASS

SEQ ID NO: 4367 - protein, 5 aa, Artificial Sequence
  Synthetic
VGSIS

SEQ ID NO: 4368 - protein, 5 aa, Artificial Sequence
  Synthetic
VLGVP

SEQ ID NO: 4369 - protein, 5 aa, Artificial Sequence
  Synthetic
TCSFE

SEQ ID NO: 4370 - protein, 5 aa, Artificial Sequence
  Synthetic
YGNMI

SEQ ID NO: 4371 - skipped

SEQ ID NO: 4372 - protein, 5 aa, Artificial Sequence
  Synthetic
FARKG

SEQ ID NO: 4373 - protein, 5 aa, Artificial Sequence
  Synthetic
SWQSS

SEQ ID NO: 4374 - protein, 5 aa, Artificial Sequence
  Synthetic
MCFND

SEQ ID NO: 4375 - protein, 5 aa, Artificial Sequence
  Synthetic
TGGCC

SEQ ID NO: 4376 - protein, 5 aa, Artificial Sequence
  Synthetic
PDLAS

SEQ ID NO: 4377 - protein, 5 aa, Artificial Sequence
  Synthetic
EMEWL

SEQ ID NO: 4378 - protein, 5 aa, Artificial Sequence
  Synthetic
TAGGH

SEQ ID NO: 4379 - protein, 5 aa, Artificial Sequence
  Synthetic
ELGCD

SEQ ID NO: 4380 - protein, 5 aa, Artificial Sequence
  Synthetic
TCGPR

SEQ ID NO: 4381 - protein, 5 aa, Artificial Sequence
  Synthetic
ALHKV

SEQ ID NO: 4382 - protein, 5 aa, Artificial Sequence
  Synthetic
SSGAL

SEQ ID NO: 4383 - protein, 5 aa, Artificial Sequence
  Synthetic
GLKRA

SEQ ID NO: 4384 - protein, 5 aa, Artificial Sequence
  Synthetic
NDMCG

SEQ ID NO: 4385 - protein, 5 aa, Artificial Sequence
  Synthetic
PHYRG

SEQ ID NO: 4386 - protein, 5 aa, Artificial Sequence
  Synthetic
AVSDH

SEQ ID NO: 4387 - protein, 5 aa, Artificial Sequence
  Synthetic
CLLDR

SEQ ID NO: 4388 - protein, 5 aa, Artificial Sequence
  Synthetic
AGSLG

SEQ ID NO: 4389 - protein, 5 aa, Artificial Sequence
  Synthetic
RSDTD

SEQ ID NO: 4390 - protein, 5 aa, Artificial Sequence
  Synthetic
TRACN

SEQ ID NO: 4391 - protein, 5 aa, Artificial Sequence
  Synthetic
ILTRW

SEQ ID NO: 4392 - protein, 5 aa, Artificial Sequence
  Synthetic
EEDGI

SEQ ID NO: 4393 - protein, 5 aa, Artificial Sequence
  Synthetic
SVTHA

SEQ ID NO: 4394 - protein, 5 aa, Artificial Sequence
  Synthetic
DWGQS

SEQ ID NO: 4395 - protein, 5 aa, Artificial Sequence
  Synthetic
SRACT

SEQ ID NO: 4396 - protein, 5 aa, Artificial Sequence
  Synthetic
KQSLG

SEQ ID NO: 4397 - protein, 5 aa, Artificial Sequence
  Synthetic
RSFLV

SEQ ID NO: 4398 - protein, 5 aa, Artificial Sequence
  Synthetic
PGRYV

SEQ ID NO: 4399 - protein, 5 aa, Artificial Sequence
  Synthetic
HDDNM

SEQ ID NO: 4400 - protein, 5 aa, Artificial Sequence
  Synthetic
RTCSS

SEQ ID NO: 4401 - protein, 5 aa, Artificial Sequence
  Synthetic
GCNRN

SEQ ID NO: 4402 - protein, 5 aa, Artificial Sequence
  Synthetic
IDGVS

SEQ ID NO: 4403 - protein, 5 aa, Artificial Sequence
  Synthetic
KLTES

SEQ ID NO: 4404 - protein, 5 aa, Artificial Sequence
  Synthetic
CPERR

SEQ ID NO: 4405 - protein, 5 aa, Artificial Sequence
  Synthetic
LRCAG

SEQ ID NO: 4406 - protein, 5 aa, Artificial Sequence
  Synthetic
GYGTV

SEQ ID NO: 4407 - protein, 5 aa, Artificial Sequence
  Synthetic
GVLVN

SEQ ID NO: 4408 - protein, 5 aa, Artificial Sequence
  Synthetic
MTCKS

SEQ ID NO: 4409 - protein, 5 aa, Artificial Sequence
  Synthetic
VHPCN

SEQ ID NO: 4410 - protein, 5 aa, Artificial Sequence
  Synthetic
CCFFF

SEQ ID NO: 4411 - protein, 5 aa, Artificial Sequence
  Synthetic
VGCGS

SEQ ID NO: 4412 - protein, 5 aa, Artificial Sequence
  Synthetic
NRLPA

SEQ ID NO: 4413 - protein, 5 aa, Artificial Sequence
  Synthetic
PFDDD

SEQ ID NO: 4414 - protein, 5 aa, Artificial Sequence
  Synthetic
CGCGV

SEQ ID NO: 4415 - protein, 5 aa, Artificial Sequence
  Synthetic
VFFCD

SEQ ID NO: 4416 - protein, 5 aa, Artificial Sequence
  Synthetic
MCGTL

SEQ ID NO: 4417 - protein, 5 aa, Artificial Sequence
  Synthetic
SAGLA

SEQ ID NO: 4418 - protein, 5 aa, Artificial Sequence
  Synthetic
MRGCN

SEQ ID NO: 4419 - protein, 5 aa, Artificial Sequence
  Synthetic
NRATH

SEQ ID NO: 4420 - protein, 5 aa, Artificial Sequence
  Synthetic
IDMVS

SEQ ID NO: 4421 - protein, 5 aa, Artificial Sequence
  Synthetic
LDSHG

SEQ ID NO: 4422 - protein, 5 aa, Artificial Sequence
  Synthetic
NEWVC

SEQ ID NO: 4423 - protein, 5 aa, Artificial Sequence
  Synthetic
VSTLL

SEQ ID NO: 4424 - protein, 5 aa, Artificial Sequence
  Synthetic
PQSNR

SEQ ID NO: 4425 - protein, 5 aa, Artificial Sequence
  Synthetic
CYGEG

SEQ ID NO: 4426 - protein, 5 aa, Artificial Sequence
  Synthetic
PFGGL

SEQ ID NO: 4427 - protein, 5 aa, Artificial Sequence
  Synthetic
NAPSH

SEQ ID NO: 4428 - protein, 5 aa, Artificial Sequence
  Synthetic
QGPWG

SEQ ID NO: 4429 - protein, 5 aa, Artificial Sequence
  Synthetic
NAAKT

SEQ ID NO: 4430 - protein, 5 aa, Artificial Sequence
  Synthetic
MWGDR

SEQ ID NO: 4431 - protein, 5 aa, Artificial Sequence
  Synthetic
VSSVL

SEQ ID NO: 4432 - protein, 5 aa, Artificial Sequence
  Synthetic
GSFID

SEQ ID NO: 4433 - protein, 5 aa, Artificial Sequence
  Synthetic
LSPIL

SEQ ID NO: 4434 - protein, 5 aa, Artificial Sequence
  Synthetic
WTTSR

SEQ ID NO: 4435 - protein, 5 aa, Artificial Sequence
  Synthetic
SHTFE

SEQ ID NO: 4436 - protein, 5 aa, Artificial Sequence
  Synthetic
NALHD

SEQ ID NO: 4437 - protein, 5 aa, Artificial Sequence
  Synthetic
QAGDP

SEQ ID NO: 4438 - protein, 5 aa, Artificial Sequence
  Synthetic
STTHL

SEQ ID NO: 4439 - protein, 5 aa, Artificial Sequence
  Synthetic
CNLLV

SEQ ID NO: 4440 - protein, 5 aa, Artificial Sequence
  Synthetic
IDSAH

SEQ ID NO: 4441 - protein, 5 aa, Artificial Sequence
  Synthetic
VLDSP

SEQ ID NO: 4442 - protein, 5 aa, Artificial Sequence
  Synthetic
PACPP

SEQ ID NO: 4443 - protein, 5 aa, Artificial Sequence
  Synthetic
PGIGI

SEQ ID NO: 4444 - protein, 5 aa, Artificial Sequence
  Synthetic
RVYAL

SEQ ID NO: 4445 - protein, 5 aa, Artificial Sequence
  Synthetic
WRVGG

SEQ ID NO: 4446 - protein, 5 aa, Artificial Sequence
  Synthetic
NYITM

SEQ ID NO: 4447 - protein, 5 aa, Artificial Sequence
  Synthetic
MDFEH

SEQ ID NO: 4448 - protein, 5 aa, Artificial Sequence
  Synthetic
FLTAY

SEQ ID NO: 4449 - protein, 5 aa, Artificial Sequence
  Synthetic
HVPGR

SEQ ID NO: 4450 - protein, 5 aa, Artificial Sequence
  Synthetic
GISLC

SEQ ID NO: 4451 - protein, 5 aa, Artificial Sequence
  Synthetic
LSGQW

SEQ ID NO: 4452 - protein, 5 aa, Artificial Sequence
  Synthetic
KNDTL

SEQ ID NO: 4453 - protein, 5 aa, Artificial Sequence
  Synthetic
GSRAW

SEQ ID NO: 4454 - protein, 5 aa, Artificial Sequence
  Synthetic
SRGSA

SEQ ID NO: 4455 - protein, 5 aa, Artificial Sequence
  Synthetic
GECGF

SEQ ID NO: 4456 - protein, 5 aa, Artificial Sequence
  Synthetic
PGDAA

SEQ ID NO: 4457 - protein, 5 aa, Artificial Sequence
  Synthetic
TGPVG

SEQ ID NO: 4458 - protein, 5 aa, Artificial Sequence
  Synthetic
VTRSS

SEQ ID NO: 4459 - protein, 5 aa, Artificial Sequence
  Synthetic
MRYDN

SEQ ID NO: 4460 - protein, 5 aa, Artificial Sequence
  Synthetic
YTRGF

SEQ ID NO: 4461 - protein, 5 aa, Artificial Sequence
  Synthetic
TLSCD

SEQ ID NO: 4462 - protein, 5 aa, Artificial Sequence
  Synthetic
ARTFH

SEQ ID NO: 4463 - protein, 5 aa, Artificial Sequence
  Synthetic
TISEL

SEQ ID NO: 4464 - protein, 5 aa, Artificial Sequence
  Synthetic
LFAPF

SEQ ID NO: 4465 - protein, 5 aa, Artificial Sequence
  Synthetic
PHGYR

SEQ ID NO: 4466 - protein, 5 aa, Artificial Sequence
  Synthetic
VVPGV

SEQ ID NO: 4467 - protein, 5 aa, Artificial Sequence
  Synthetic
LACAI

SEQ ID NO: 4468 - protein, 5 aa, Artificial Sequence
  Synthetic
CGCRI

SEQ ID NO: 4469 - protein, 5 aa, Artificial Sequence
  Synthetic
GVAQS

SEQ ID NO: 4470 - protein, 5 aa, Artificial Sequence
  Synthetic
CYGVL

SEQ ID NO: 4471 - protein, 5 aa, Artificial Sequence
  Synthetic
CYRDA

SEQ ID NO: 4472 - protein, 5 aa, Artificial Sequence
  Synthetic
MPYWA

SEQ ID NO: 4473 - protein, 5 aa, Artificial Sequence
  Synthetic
ACDPL

SEQ ID NO: 4474 - protein, 5 aa, Artificial Sequence
  Synthetic
SQCGV

SEQ ID NO: 4475 - protein, 5 aa, Artificial Sequence
  Synthetic
YASVS

SEQ ID NO: 4476 - protein, 5 aa, Artificial Sequence
  Synthetic
RTDGG

SEQ ID NO: 4477 - protein, 5 aa, Artificial Sequence
  Synthetic
LSHTV

SEQ ID NO: 4478 - protein, 5 aa, Artificial Sequence
  Synthetic
EYGYR

SEQ ID NO: 4479 - protein, 5 aa, Artificial Sequence
  Synthetic
CARQT

SEQ ID NO: 4480 - protein, 5 aa, Artificial Sequence
  Synthetic
PARAW

SEQ ID NO: 4481 - protein, 5 aa, Artificial Sequence
  Synthetic
LDDIR

SEQ ID NO: 4482 - protein, 5 aa, Artificial Sequence
  Synthetic
LRWPG

SEQ ID NO: 4483 - protein, 5 aa, Artificial Sequence
  Synthetic
IGSSL

SEQ ID NO: 4484 - protein, 5 aa, Artificial Sequence
  Synthetic
NAGVH

SEQ ID NO: 4485 - protein, 5 aa, Artificial Sequence
  Synthetic
GSQSQ

SEQ ID NO: 4486 - protein, 5 aa, Artificial Sequence
  Synthetic
SEAPK

SEQ ID NO: 4487 - protein, 5 aa, Artificial Sequence
  Synthetic
LCGYD

SEQ ID NO: 4488 - protein, 5 aa, Artificial Sequence
  Synthetic
AYSAV

SEQ ID NO: 4489 - protein, 5 aa, Artificial Sequence
  Synthetic
LAQYG

SEQ ID NO: 4490 - protein, 5 aa, Artificial Sequence
  Synthetic
NSGTH

SEQ ID NO: 4491 - protein, 5 aa, Artificial Sequence
  Synthetic
DVGDG

SEQ ID NO: 4492 - protein, 5 aa, Artificial Sequence
  Synthetic
LYAAY

SEQ ID NO: 4493 - protein, 5 aa, Artificial Sequence
  Synthetic
GFPII

SEQ ID NO: 4494 - protein, 5 aa, Artificial Sequence
  Synthetic
QSPAV

SEQ ID NO: 4495 - protein, 4 aa, Artificial Sequence
  Synthetic
ASYR

SEQ ID NO: 4496 - protein, 5 aa, Artificial Sequence
  Synthetic
ASYRY

SEQ ID NO: 4497 - protein, 5 aa, Artificial Sequence
  Synthetic
ASYRY

SEQ ID NO: 4498 - protein, 5 aa, Artificial Sequence
  Synthetic
ASYRY

SEQ ID NO: 4499 - protein, 5 aa, Artificial Sequence
  Synthetic
ATLRG

SEQ ID NO: 4500 - protein, 5 aa, Artificial Sequence
  Synthetic
ETWMH

SEQ ID NO: 4501 - protein, 5 aa, Artificial Sequence
  Synthetic
CNART

SEQ ID NO: 4502 - protein, 5 aa, Artificial Sequence
  Synthetic
CGVPF

SEQ ID NO: 4503 - protein, 5 aa, Artificial Sequence
  Synthetic
GCHLV

SEQ ID NO: 4504 - protein, 5 aa, Artificial Sequence
  Synthetic
ANYMN

SEQ ID NO: 4505 - protein, 5 aa, Artificial Sequence
  Synthetic
PGFNL

SEQ ID NO: 4506 - protein, 5 aa, Artificial Sequence
  Synthetic
ANLNR

SEQ ID NO: 4507 - protein, 5 aa, Artificial Sequence
  Synthetic
YPGCH

SEQ ID NO: 4508 - protein, 5 aa, Artificial Sequence
  Synthetic
AYGCV

SEQ ID NO: 4509 - protein, 5 aa, Artificial Sequence
  Synthetic
YFLQH

SEQ ID NO: 4510 - protein, 5 aa, Artificial Sequence
  Synthetic
NGWHM

SEQ ID NO: 4511 - protein, 5 aa, Artificial Sequence
  Synthetic
ASYRY

SEQ ID NO: 4512 - protein, 5 aa, Artificial Sequence
  Synthetic
GTGYE

SEQ ID NO: 4513 - protein, 5 aa, Artificial Sequence
  Synthetic
GYAIS

SEQ ID NO: 4514 - protein, 5 aa, Artificial Sequence
  Synthetic
FHTCG

SEQ ID NO: 4515 - protein, 5 aa, Artificial Sequence
  Synthetic
DVVSF

SEQ ID NO: 4516 - protein, 5 aa, Artificial Sequence
  Synthetic
SGLVW

SEQ ID NO: 4517 - protein, 5 aa, Artificial Sequence
  Synthetic
CQSVR

SEQ ID NO: 4518 - protein, 5 aa, Artificial Sequence
  Synthetic
AYGCV

SEQ ID NO: 4519 - protein, 5 aa, Artificial Sequence
  Synthetic
LRAPT

SEQ ID NO: 4520 - protein, 5 aa, Artificial Sequence
  Synthetic
ELSRW

SEQ ID NO: 4521 - protein, 5 aa, Artificial Sequence
  Synthetic
YSNLH

SEQ ID NO: 4522 - protein, 5 aa, Artificial Sequence
  Synthetic
GWSSS

SEQ ID NO: 4523 - protein, 5 aa, Artificial Sequence
  Synthetic
GDGFD

SEQ ID NO: 4524 - protein, 5 aa, Artificial Sequence
  Synthetic
CCGEP

SEQ ID NO: 4525 - protein, 5 aa, Artificial Sequence
  Synthetic
IGGCL

SEQ ID NO: 4526 - protein, 5 aa, Artificial Sequence
  Synthetic
NNLNS

SEQ ID NO: 4527 - protein, 5 aa, Artificial Sequence
  Synthetic
GNVPN

SEQ ID NO: 4528 - protein, 5 aa, Artificial Sequence
  Synthetic
MHAQS

SEQ ID NO: 4529 - protein, 5 aa, Artificial Sequence
  Synthetic
SYSLR

SEQ ID NO: 4530 - protein, 5 aa, Artificial Sequence
  Synthetic
LLSSS

SEQ ID NO: 4531 - protein, 5 aa, Artificial Sequence
  Synthetic
VRDWS

SEQ ID NO: 4532 - protein, 5 aa, Artificial Sequence
  Synthetic
SVHCC

SEQ ID NO: 4533 - protein, 5 aa, Artificial Sequence
  Synthetic
PMGVA

SEQ ID NO: 4534 - protein, 5 aa, Artificial Sequence
  Synthetic
IFQNR

SEQ ID NO: 4535 - protein, 5 aa, Artificial Sequence
  Synthetic
RAAPS

SEQ ID NO: 4536 - protein, 5 aa, Artificial Sequence
  Synthetic
IITSG

SEQ ID NO: 4537 - protein, 5 aa, Artificial Sequence
  Synthetic
MFSDI

SEQ ID NO: 4538 - protein, 4 aa, Artificial Sequence
  Synthetic
NWLH

SEQ ID NO: 4539 - protein, 5 aa, Artificial Sequence
  Synthetic
VGAGW

SEQ ID NO: 4540 - protein, 5 aa, Artificial Sequence
  Synthetic
VPGQR

SEQ ID NO: 4541 - protein, 5 aa, Artificial Sequence
  Synthetic
QYGRI

SEQ ID NO: 4542 - protein, 5 aa, Artificial Sequence
  Synthetic
CCFCS

SEQ ID NO: 4543 - protein, 5 aa, Artificial Sequence
  Synthetic
NIRRG

SEQ ID NO: 4544 - protein, 5 aa, Artificial Sequence
  Synthetic
YAVRF

SEQ ID NO: 4545 - protein, 5 aa, Artificial Sequence
  Synthetic
DFCTG

SEQ ID NO: 4546 - protein, 5 aa, Artificial Sequence
  Synthetic
VYYVA

SEQ ID NO: 4547 - protein, 5 aa, Artificial Sequence
  Synthetic
RSPQV

SEQ ID NO: 4548 - protein, 5 aa, Artificial Sequence
  Synthetic
TPWVM

SEQ ID NO: 4549 - protein, 5 aa, Artificial Sequence
  Synthetic
ANQPR

SEQ ID NO: 4550 - protein, 5 aa, Artificial Sequence
  Synthetic
LIFIM

SEQ ID NO: 4551 - protein, 5 aa, Artificial Sequence
  Synthetic
YFRHS

SEQ ID NO: 4552 - protein, 13 aa, Artificial Sequence
  Synthetic
QLVANTRLPVAVM

SEQ ID NO: 4553 - protein, 4 aa, Artificial Sequence
  Synthetic
MPFF

SEQ ID NO: 4554 - protein, 9 aa, Artificial Sequence
  Synthetic
TIFMDSDLG

SEQ ID NO: 4555 - protein, 10 aa, Artificial Sequence
  Synthetic
NPLDPNWTNS

SEQ ID NO: 4556 - protein, 6 aa, Artificial Sequence
  Synthetic
LRSFLE

SEQ ID NO: 4557 - protein, 10 aa, Artificial Sequence
  Synthetic
ICYNRRDVML

SEQ ID NO: 4558 - protein, 10 aa, Artificial Sequence
  Synthetic
AETPNILVYE

SEQ ID NO: 4559 - protein, 6 aa, Artificial Sequence
  Synthetic
FTRFTH

SEQ ID NO: 4560 - protein, 6 aa, Artificial Sequence
  Synthetic
FTSAVH

SEQ ID NO: 4561 - protein, 9 aa, Artificial Sequence
  Synthetic
VYFVNDCIV

SEQ ID NO: 4562 - protein, 9 aa, Artificial Sequence
  Synthetic
AIYRNASVL

SEQ ID NO: 4563 - protein, 10 aa, Artificial Sequence
  Synthetic
SLFGEDLSVR

SEQ ID NO: 4564 - protein, 10 aa, Artificial Sequence
  Synthetic
LDTAALFPEF

SEQ ID NO: 4565 - protein, 9 aa, Artificial Sequence
  Synthetic
MCLDGCYIC

SEQ ID NO: 4566 - protein, 10 aa, Artificial Sequence
  Synthetic
AYLGEDMSCS

SEQ ID NO: 4567 - protein, 13 aa, Artificial Sequence
  Synthetic
VFIVKYEEELLVE

SEQ ID NO: 4568 - protein, 10 aa, Artificial Sequence
  Synthetic
LTRPPFDPLW

SEQ ID NO: 4569 - protein, 6 aa, Artificial Sequence
  Synthetic
ITAMGW

SEQ ID NO: 4570 - protein, 10 aa, Artificial Sequence
  Synthetic
AVFASDGNVV

SEQ ID NO: 4571 - protein, 10 aa, Artificial Sequence
  Synthetic
WLLTYSHDVM

SEQ ID NO: 4572 - protein, 6 aa, Artificial Sequence
  Synthetic
VCSCMY

SEQ ID NO: 4573 - protein, 6 aa, Artificial Sequence
  Synthetic
RTRFGH

SEQ ID NO: 4574 - protein, 6 aa, Artificial Sequence
  Synthetic
KVVGVA

SEQ ID NO: 4575 - protein, 10 aa, Artificial Sequence
  Synthetic
SLSPDCLHIS

SEQ ID NO: 4576 - protein, 6 aa, Artificial Sequence
  Synthetic
IDCYGV

SEQ ID NO: 4577 - protein, 8 aa, Artificial Sequence
  Synthetic
ILFDTNVN

SEQ ID NO: 4578 - protein, 9 aa, Artificial Sequence
  Synthetic
VIYNGCYTM

SEQ ID NO: 4579 - protein, 13 aa, Artificial Sequence
  Synthetic
FVGCHYSNYYDFA

SEQ ID NO: 4580 - protein, 13 aa, Artificial Sequence
  Synthetic
CQNVAKSAWYAVG

SEQ ID NO: 4581 - protein, 9 aa, Artificial Sequence
  Synthetic
WLLTPGCIR

SEQ ID NO: 4582 - protein, 13 aa, Artificial Sequence
  Synthetic
HRFDTTLMCVVRA

SEQ ID NO: 4583 - protein, 6 aa, Artificial Sequence
  Synthetic
TNNTLR

SEQ ID NO: 4584 - protein, 6 aa, Artificial Sequence
  Synthetic
INNELN

SEQ ID NO: 4585 - protein, 6 aa, Artificial Sequence
  Synthetic
LVCPGS

SEQ ID NO: 4586 - protein, 6 aa, Artificial Sequence
  Synthetic
QCSVIL

SEQ ID NO: 4587 - protein, 10 aa, Artificial Sequence
  Synthetic
VRFRTHGAVT

SEQ ID NO: 4588 - protein, 10 aa, Artificial Sequence
  Synthetic
HFFTADLSVV

SEQ ID NO: 4589 - protein, 10 aa, Artificial Sequence
  Synthetic
RTVTPNYMID

SEQ ID NO: 4590 - protein, 10 aa, Artificial Sequence
  Synthetic
YLLDAHSTCN

SEQ ID NO: 4591 - protein, 9 aa, Artificial Sequence
  Synthetic
NPHLHPHLS

SEQ ID NO: 4592 - protein, 6 aa, Artificial Sequence
  Synthetic
LYNLFE

SEQ ID NO: 4593 - protein, 9 aa, Artificial Sequence
  Synthetic
IPCRWFWIE

SEQ ID NO: 4594 - protein, 10 aa, Artificial Sequence
  Synthetic
IRRASFTFYW

SEQ ID NO: 4595 - protein, 9 aa, Artificial Sequence
  Synthetic
IQWHARGRY

SEQ ID NO: 4596 - protein, 6 aa, Artificial Sequence
  Synthetic
ADMYFF

SEQ ID NO: 4597 - protein, 10 aa, Artificial Sequence
  Synthetic
PWALDPAFRA

SEQ ID NO: 4598 - protein, 10 aa, Artificial Sequence
  Synthetic
HTLSNKFFVN

SEQ ID NO: 4599 - protein, 10 aa, Artificial Sequence
  Synthetic
NIFSDTESVR

SEQ ID NO: 4600 - protein, 10 aa, Artificial Sequence
  Synthetic
FRLQSPGLVT

SEQ ID NO: 4601 - protein, 6 aa, Artificial Sequence
  Synthetic
WISCTQ

SEQ ID NO: 4602 - protein, 13 aa, Artificial Sequence
  Synthetic
HTINRYAPWLGCA

SEQ ID NO: 4603 - protein, 10 aa, Artificial Sequence
  Synthetic
MCLTLTWSIA

SEQ ID NO: 4604 - protein, 13 aa, Artificial Sequence
  Synthetic
MNHAYPIFGLADD

SEQ ID NO: 4605 - protein, 10 aa, Artificial Sequence
  Synthetic
FDPTSGTLAV

SEQ ID NO: 4606 - protein, 10 aa, Artificial Sequence
  Synthetic
CYYVNHGCCV

SEQ ID NO: 4607 - protein, 10 aa, Artificial Sequence
  Synthetic
TPWPAFIGLV

SEQ ID NO: 4608 - protein, 13 aa, Artificial Sequence
  Synthetic
SNLTSNSTGNEVT

SEQ ID NO: 4609 - protein, 10 aa, Artificial Sequence
  Synthetic
IDPTPAVVNL

SEQ ID NO: 4610 - protein, 10 aa, Artificial Sequence
  Synthetic
ISLQTNGSLQ

SEQ ID NO: 4611 - protein, 13 aa, Artificial Sequence
  Synthetic
FCLDTRSAAITVC

SEQ ID NO: 4612 - protein, 9 aa, Artificial Sequence
  Synthetic
VYLVGNTMV

SEQ ID NO: 4613 - protein, 10 aa, Artificial Sequence
  Synthetic
ALYHPMHSVL

SEQ ID NO: 4614 - protein, 6 aa, Artificial Sequence
  Synthetic
ATRWSS

SEQ ID NO: 4615 - protein, 13 aa, Artificial Sequence
  Synthetic
HIITSSFSGIESR

SEQ ID NO: 4616 - protein, 10 aa, Artificial Sequence
  Synthetic
YRLTHDKVVS

SEQ ID NO: 4617 - protein, 6 aa, Artificial Sequence
  Synthetic
WTEYSS

SEQ ID NO: 4618 - protein, 10 aa, Artificial Sequence
  Synthetic
FNLPTFYSFA

SEQ ID NO: 4619 - protein, 9 aa, Artificial Sequence
  Synthetic
GIFEMFGCR

SEQ ID NO: 4620 - protein, 10 aa, Artificial Sequence
  Synthetic
SALSSENDVR

SEQ ID NO: 4621 - protein, 9 aa, Artificial Sequence
  Synthetic
VYFAGEGPV

SEQ ID NO: 4622 - protein, 6 aa, Artificial Sequence
  Synthetic
ISRFTT

SEQ ID NO: 4623 - protein, 9 aa, Artificial Sequence
  Synthetic
RTAFHDHWN

SEQ ID NO: 4624 - protein, 10 aa, Artificial Sequence
  Synthetic
LIFDIHGYGF

SEQ ID NO: 4625 - protein, 9 aa, Artificial Sequence
  Synthetic
HPIVCDLWV

SEQ ID NO: 4626 - protein, 9 aa, Artificial Sequence
  Synthetic
CVFDTADVR

SEQ ID NO: 4627 - protein, 9 aa, Artificial Sequence
  Synthetic
AYCRQLLVT

SEQ ID NO: 4628 - protein, 6 aa, Artificial Sequence
  Synthetic
AHPSAD

SEQ ID NO: 4629 - protein, 10 aa, Artificial Sequence
  Synthetic
THYSPYFSRC

SEQ ID NO: 4630 - protein, 6 aa, Artificial Sequence
  Synthetic
FCVGYH

SEQ ID NO: 4631 - protein, 6 aa, Artificial Sequence
  Synthetic
ESTSYF

SEQ ID NO: 4632 - protein, 9 aa, Artificial Sequence
  Synthetic
PIHFLNRTV

SEQ ID NO: 4633 - protein, 10 aa, Artificial Sequence
  Synthetic
VFLSGDSVCH

SEQ ID NO: 4634 - protein, 6 aa, Artificial Sequence
  Synthetic
YNLSTV

SEQ ID NO: 4635 - protein, 6 aa, Artificial Sequence
  Synthetic
GPDFVV

SEQ ID NO: 4636 - protein, 13 aa, Artificial Sequence
  Synthetic
HEGACRRLLDQSA

SEQ ID NO: 4637 - protein, 6 aa, Artificial Sequence
  Synthetic
AHLISK

SEQ ID NO: 4638 - protein, 10 aa, Artificial Sequence
  Synthetic
AVCLDHLVIH

SEQ ID NO: 4639 - protein, 9 aa, Artificial Sequence
  Synthetic
IKIQGEELA

SEQ ID NO: 4640 - protein, 6 aa, Artificial Sequence
  Synthetic
IHYGAK

SEQ ID NO: 4641 - protein, 6 aa, Artificial Sequence
  Synthetic
HTFLST

SEQ ID NO: 4642 - protein, 10 aa, Artificial Sequence
  Synthetic
YIFNQSNCCF

SEQ ID NO: 4643 - protein, 9 aa, Artificial Sequence
  Synthetic
SYFGLRVVS

SEQ ID NO: 4644 - protein, 9 aa, Artificial Sequence
  Synthetic
LCCPVCVIV

SEQ ID NO: 4645 - protein, 10 aa, Artificial Sequence
  Synthetic
IIPYASRLHY

SEQ ID NO: 4646 - protein, 6 aa, Artificial Sequence
  Synthetic
LTNECL

SEQ ID NO: 4647 - protein, 6 aa, Artificial Sequence
  Synthetic
HTPDAS

SEQ ID NO: 4648 - protein, 13 aa, Artificial Sequence
  Synthetic
KHFNTGLQRWIYV

SEQ ID NO: 4649 - protein, 9 aa, Artificial Sequence
  Synthetic
VCLVGTSCV

SEQ ID NO: 4650 - protein, 10 aa, Artificial Sequence
  Synthetic
VSFQPRHPVV

SEQ ID NO: 4651 - protein, 10 aa, Artificial Sequence
  Synthetic
IFYDRTDRLS

SEQ ID NO: 4652 - protein, 9 aa, Artificial Sequence
  Synthetic
WNYDCLGIS

SEQ ID NO: 4653 - protein, 9 aa, Artificial Sequence
  Synthetic
AFYISFMVY

SEQ ID NO: 4654 - protein, 10 aa, Artificial Sequence
  Synthetic
LQPTPSGWRE

SEQ ID NO: 4655 - protein, 10 aa, Artificial Sequence
  Synthetic
LENPHIASKY

SEQ ID NO: 4656 - protein, 10 aa, Artificial Sequence
  Synthetic
PVPIPEESIT

SEQ ID NO: 4657 - protein, 10 aa, Artificial Sequence
  Synthetic
VSLLRTITAH

SEQ ID NO: 4658 - protein, 8 aa, Artificial Sequence
  Synthetic
VDSTLFGV

SEQ ID NO: 4659 - protein, 9 aa, Artificial Sequence
  Synthetic
DCPLFSLCF

SEQ ID NO: 4660 - protein, 10 aa, Artificial Sequence
  Synthetic
SNPPISYRVD

SEQ ID NO: 4661 - protein, 9 aa, Artificial Sequence
  Synthetic
VHYCHGQVF

SEQ ID NO: 4662 - protein, 9 aa, Artificial Sequence
  Synthetic
QLVLVIEQW

SEQ ID NO: 4663 - protein, 9 aa, Artificial Sequence
  Synthetic
WCMSGVAIM

SEQ ID NO: 4664 - protein, 13 aa, Artificial Sequence
  Synthetic
VTISIICHILHVH

SEQ ID NO: 4665 - protein, 10 aa, Artificial Sequence
  Synthetic
AIFLKSSVVL

SEQ ID NO: 4666 - protein, 10 aa, Artificial Sequence
  Synthetic
ISLQSDFSMH

SEQ ID NO: 4667 - protein, 10 aa, Artificial Sequence
  Synthetic
WTWSDHYYLS

SEQ ID NO: 4668 - protein, 9 aa, Artificial Sequence
  Synthetic
FQYQDGSVF

SEQ ID NO: 4669 - protein, 6 aa, Artificial Sequence
  Synthetic
VDNGLC

SEQ ID NO: 4670 - protein, 6 aa, Artificial Sequence
  Synthetic
SSRFGA

SEQ ID NO: 4671 - protein, 6 aa, Artificial Sequence
  Synthetic
LHLLGR

SEQ ID NO: 4672 - protein, 13 aa, Artificial Sequence
  Synthetic
LIDYTRDDGWQSV

SEQ ID NO: 4673 - protein, 9 aa, Artificial Sequence
  Synthetic
ATFVKYEVL

SEQ ID NO: 4674 - protein, 4 aa, Artificial Sequence
  Synthetic
VARR

SEQ ID NO: 4675 - protein, 6 aa, Artificial Sequence
  Synthetic
NYFDAM

SEQ ID NO: 4676 - protein, 10 aa, Artificial Sequence
  Synthetic
ATLISNVGVK

SEQ ID NO: 4677 - protein, 9 aa, Artificial Sequence
  Synthetic
TLTVITRCR

SEQ ID NO: 4678 - protein, 10 aa, Artificial Sequence
  Synthetic
TAFLGCDMLL

SEQ ID NO: 4679 - protein, 6 aa, Artificial Sequence
  Synthetic
VTRFDA

SEQ ID NO: 4680 - protein, 9 aa, Artificial Sequence
  Synthetic
VSLTHGGIV

SEQ ID NO: 4681 - protein, 9 aa, Artificial Sequence
  Synthetic
TQWLVEEVM

SEQ ID NO: 4682 - protein, 10 aa, Artificial Sequence
  Synthetic
YIFHYTSSVV

SEQ ID NO: 4683 - protein, 6 aa, Artificial Sequence
  Synthetic
SRFDSF

SEQ ID NO: 4684 - protein, 10 aa, Artificial Sequence
  Synthetic
SMLADNGVTS

SEQ ID NO: 4685 - protein, 9 aa, Artificial Sequence
  Synthetic
CYFGASYIS

SEQ ID NO: 4686 - protein, 6 aa, Artificial Sequence
  Synthetic
LRPPSC

SEQ ID NO: 4687 - protein, 10 aa, Artificial Sequence
  Synthetic
VYLLQACIVK

SEQ ID NO: 4688 - protein, 9 aa, Artificial Sequence
  Synthetic
PYWYFGEVR

SEQ ID NO: 4689 - protein, 10 aa, Artificial Sequence
  Synthetic
YSLGYLADIS

SEQ ID NO: 4690 - protein, 6 aa, Artificial Sequence
  Synthetic
CLPNAH

SEQ ID NO: 4691 - protein, 9 aa, Artificial Sequence
  Synthetic
AFLRGNRVI

SEQ ID NO: 4692 - protein, 6 aa, Artificial Sequence
  Synthetic
RYGWCT

SEQ ID NO: 4693 - protein, 10 aa, Artificial Sequence
  Synthetic
LLGYSSEVRW

SEQ ID NO: 4694 - protein, 12 aa, Artificial Sequence
  Synthetic
LHDTHLKAVDSN

SEQ ID NO: 4695 - protein, 13 aa, Artificial Sequence
  Synthetic
FWRGRIDCSIMRL

SEQ ID NO: 4696 - protein, 10 aa, Artificial Sequence
  Synthetic
YVISEAYGSD

SEQ ID NO: 4697 - protein, 9 aa, Artificial Sequence
  Synthetic
AHLHLGAVC

SEQ ID NO: 4698 - protein, 10 aa, Artificial Sequence
  Synthetic
HIVEPPRHVS

SEQ ID NO: 4699 - protein, 10 aa, Artificial Sequence
  Synthetic
LDFQNTQIDR

SEQ ID NO: 4700 - protein, 6 aa, Artificial Sequence
  Synthetic
TTRFSY

SEQ ID NO: 4701 - protein, 6 aa, Artificial Sequence
  Synthetic
FTSADT

SEQ ID NO: 4702 - protein, 6 aa, Artificial Sequence
  Synthetic
HTRFGW

SEQ ID NO: 4703 - protein, 9 aa, Artificial Sequence
  Synthetic
ASFFMGAVS

SEQ ID NO: 4704 - protein, 13 aa, Artificial Sequence
  Synthetic
TLTWHTVHGAHLE

SEQ ID NO: 4705 - protein, 10 aa, Artificial Sequence
  Synthetic
MTLHANLCIS

SEQ ID NO: 4706 - protein, 10 aa, Artificial Sequence
  Synthetic
TLSVYGFQLR

SEQ ID NO: 4707 - protein, 6 aa, Artificial Sequence
  Synthetic
FTRFRH

SEQ ID NO: 4708 - protein, 10 aa, Artificial Sequence
  Synthetic
YIFTESGAVI

SEQ ID NO: 4709 - protein, 10 aa, Artificial Sequence
  Synthetic
ISLSLDSCLQ

SEQ ID NO: 4710 - protein, 10 aa, Artificial Sequence
  Synthetic
YGSDMCSLLS

SEQ ID NO: 4711 - protein, 5 aa, Artificial Sequence
  Synthetic
LPKLT

SEQ ID NO: 4712 - protein, 6 aa, Artificial Sequence
  Synthetic
TTVFSH

SEQ ID NO: 4713 - protein, 13 aa, Artificial Sequence
  Synthetic
DLIRVSFGRLVLY

SEQ ID NO: 4714 - protein, 10 aa, Artificial Sequence
  Synthetic
TTLLRTGSCS

SEQ ID NO: 4715 - protein, 8 aa, Artificial Sequence
  Synthetic
LHGDPDDG

SEQ ID NO: 4716 - protein, 10 aa, Artificial Sequence
  Synthetic
CVNHAIIWLS

SEQ ID NO: 4717 - protein, 6 aa, Artificial Sequence
  Synthetic
TTRFKH

SEQ ID NO: 4718 - protein, 6 aa, Artificial Sequence
  Synthetic
RFGFAG

SEQ ID NO: 4719 - protein, 9 aa, Artificial Sequence
  Synthetic
MCLESTLVR

SEQ ID NO: 4720 - protein, 13 aa, Artificial Sequence
  Synthetic
PYTPIDSVLDGIR

SEQ ID NO: 4721 - protein, 10 aa, Artificial Sequence
  Synthetic
VLFHPTFDPE

SEQ ID NO: 4722 - protein, 13 aa, Artificial Sequence
  Synthetic
VVMDTDIVGRDVI

SEQ ID NO: 4723 - protein, 10 aa, Artificial Sequence
  Synthetic
VAYVTALSIC

SEQ ID NO: 4724 - protein, 10 aa, Artificial Sequence
  Synthetic
LQFNPHYPLC

SEQ ID NO: 4725 - protein, 10 aa, Artificial Sequence
  Synthetic
FPTLHDSTAF

SEQ ID NO: 4726 - protein, 13 aa, Artificial Sequence
  Synthetic
NAVSSRGRWYGCI

SEQ ID NO: 4727 - protein, 10 aa, Artificial Sequence
  Synthetic
SRLTHQMYVL

SEQ ID NO: 4728 - protein, 10 aa, Artificial Sequence
  Synthetic
PYYDCLLGVL

SEQ ID NO: 4729 - protein, 9 aa, Artificial Sequence
  Synthetic
EVWRYVSVA

SEQ ID NO: 4730 - protein, 10 aa, Artificial Sequence
  Synthetic
LNDKHSYYSW

SEQ ID NO: 4731 - protein, 13 aa, Artificial Sequence
  Synthetic
LATLHYGGFSGAG

SEQ ID NO: 4732 - protein, 13 aa, Artificial Sequence
  Synthetic
ITQHPDASFLLAD

SEQ ID NO: 4733 - protein, 10 aa, Artificial Sequence
  Synthetic
LACITTSQSW

SEQ ID NO: 4734 - protein, 10 aa, Artificial Sequence
  Synthetic
MICRATVEVV

SEQ ID NO: 4735 - protein, 9 aa, Artificial Sequence
  Synthetic
HMCSSFNVS

SEQ ID NO: 4736 - protein, 9 aa, Artificial Sequence
  Synthetic
MYGSSLSCY

SEQ ID NO: 4737 - protein, 9 aa, Artificial Sequence
  Synthetic
ARLCWDGVA

SEQ ID NO: 4738 - protein, 9 aa, Artificial Sequence
  Synthetic
ERPHHSIQF

SEQ ID NO: 4739 - protein, 13 aa, Artificial Sequence
  Synthetic
YLIETNEGAVVRC

SEQ ID NO: 4740 - protein, 13 aa, Artificial Sequence
  Synthetic
VDTSPVREMMRVK

SEQ ID NO: 4741 - protein, 13 aa, Artificial Sequence
  Synthetic
YIYVLTCSRGTVR

SEQ ID NO: 4742 - protein, 9 aa, Artificial Sequence
  Synthetic
STHHMGFST

SEQ ID NO: 4743 - protein, 9 aa, Artificial Sequence
  Synthetic
MRFVGGSVR

SEQ ID NO: 4744 - protein, 10 aa, Artificial Sequence
  Synthetic
LSCTQRCVRW

SEQ ID NO: 4745 - protein, 8 aa, Artificial Sequence
  Synthetic
AVLDRVVR

SEQ ID NO: 4746 - protein, 6 aa, Artificial Sequence
  Synthetic
FCSADR

SEQ ID NO: 4747 - protein, 13 aa, Artificial Sequence
  Synthetic
QHVSYYNCLLSWS

SEQ ID NO: 4748 - protein, 10 aa, Artificial Sequence
  Synthetic
ARVDASGVVS

SEQ ID NO: 4749 - protein, 13 aa, Artificial Sequence
  Synthetic
RMLGMAKGSIRWS

SEQ ID NO: 4750 - protein, 10 aa, Artificial Sequence
  Synthetic
TWNAAHFWDC

SEQ ID NO: 4751 - protein, 6 aa, Artificial Sequence
  Synthetic
FTRFSH

SEQ ID NO: 4752 - protein, 6 aa, Artificial Sequence
  Synthetic
TVVYLF

SEQ ID NO: 4753 - protein, 10 aa, Artificial Sequence
  Synthetic
LLQNHGNMVY

SEQ ID NO: 4754 - protein, 10 aa, Artificial Sequence
  Synthetic
ALLAPARCVL

SEQ ID NO: 4755 - protein, 10 aa, Artificial Sequence
  Synthetic
VHRDHDTSLV

SEQ ID NO: 4756 - protein, 10 aa, Artificial Sequence
  Synthetic
HRLCDTGSVR

SEQ ID NO: 4757 - protein, 11 aa, Artificial Sequence
  Synthetic
AWALLCEASES

SEQ ID NO: 4758 - protein, 6 aa, Artificial Sequence
  Synthetic
CTRFRA

SEQ ID NO: 4759 - protein, 13 aa, Artificial Sequence
  Synthetic
QTMSYPGVWLIIQ

SEQ ID NO: 4760 - protein, 13 aa, Artificial Sequence
  Synthetic
TACATTPGEVDVH

SEQ ID NO: 4761 - protein, 13 aa, Artificial Sequence
  Synthetic
ITISGARSYMSSH

SEQ ID NO: 4762 - protein, 10 aa, Artificial Sequence
  Synthetic
MYLKSRSEIG

SEQ ID NO: 4763 - protein, 8 aa, Artificial Sequence
  Synthetic
LIANPVVR

SEQ ID NO: 4764 - protein, 10 aa, Artificial Sequence
  Synthetic
RPTHALVSVY

SEQ ID NO: 4765 - protein, 10 aa, Artificial Sequence
  Synthetic
FYFSTHFNVI

SEQ ID NO: 4766 - protein, 10 aa, Artificial Sequence
  Synthetic
DKNTWPNSCS

SEQ ID NO: 4767 - protein, 10 aa, Artificial Sequence
  Synthetic
AILRPAAVCS

SEQ ID NO: 4768 - protein, 13 aa, Artificial Sequence
  Synthetic
FPSDCMDCGGLVF

SEQ ID NO: 4769 - protein, 13 aa, Artificial Sequence
  Synthetic
HIITKSKFGTCVT

SEQ ID NO: 4770 - protein, 9 aa, Artificial Sequence
  Synthetic
IYVCTGQVD

SEQ ID NO: 4771 - protein, 10 aa, Artificial Sequence
  Synthetic
FRPDHSGSCV

SEQ ID NO: 4772 - protein, 6 aa, Artificial Sequence
  Synthetic
NDPSAV

SEQ ID NO: 4773 - protein, 13 aa, Artificial Sequence
  Synthetic
VIINVTDLMGPTI

SEQ ID NO: 4774 - protein, 6 aa, Artificial Sequence
  Synthetic
TITEPF

SEQ ID NO: 4775 - protein, 13 aa, Artificial Sequence
  Synthetic
TCYIDGERNGRWF

SEQ ID NO: 4776 - protein, 10 aa, Artificial Sequence
  Synthetic
FTFCSPTSRI

SEQ ID NO: 4777 - protein, 10 aa, Artificial Sequence
  Synthetic
ANLRPNDTVY

SEQ ID NO: 4778 - protein, 10 aa, Artificial Sequence
  Synthetic
YAYVSIGVMR

SEQ ID NO: 4779 - protein, 6 aa, Artificial Sequence
  Synthetic
FTFAPR

SEQ ID NO: 4780 - protein, 10 aa, Artificial Sequence
  Synthetic
ATFSDTNGVI

SEQ ID NO: 4781 - protein, 9 aa, Artificial Sequence
  Synthetic
LTVRVQYLC

SEQ ID NO: 4782 - protein, 10 aa, Artificial Sequence
  Synthetic
NDLANDIQFS

SEQ ID NO: 4783 - protein, 9 aa, Artificial Sequence
  Synthetic
AFLWLGSVA

SEQ ID NO: 4784 - protein, 10 aa, Artificial Sequence
  Synthetic
WRVRHADIWF

SEQ ID NO: 4785 - protein, 10 aa, Artificial Sequence
  Synthetic
YDLLAHGTVR

SEQ ID NO: 4786 - protein, 10 aa, Artificial Sequence
  Synthetic
HFSTGDNIVL

SEQ ID NO: 4787 - protein, 6 aa, Artificial Sequence
  Synthetic
YHCLGR

SEQ ID NO: 4788 - protein, 10 aa, Artificial Sequence
  Synthetic
ICLEERMVCK

SEQ ID NO: 4789 - protein, 10 aa, Artificial Sequence
  Synthetic
ACFIHFRGVF

SEQ ID NO: 4790 - protein, 9 aa, Artificial Sequence
  Synthetic
QTECHPLLQ

SEQ ID NO: 4791 - protein, 10 aa, Artificial Sequence
  Synthetic
DYATLVICGY

SEQ ID NO: 4792 - protein, 10 aa, Artificial Sequence
  Synthetic
HVLLSSSESY

SEQ ID NO: 4793 - protein, 10 aa, Artificial Sequence
  Synthetic
HAIDSKGLRT

SEQ ID NO: 4794 - protein, 6 aa, Artificial Sequence
  Synthetic
VSWWED

SEQ ID NO: 4795 - protein, 10 aa, Artificial Sequence
  Synthetic
LCHHDTFVVH

SEQ ID NO: 4796 - protein, 10 aa, Artificial Sequence
  Synthetic
ASYTLTGVVD

SEQ ID NO: 4797 - protein, 9 aa, Artificial Sequence
  Synthetic
TWYCDLGFF

SEQ ID NO: 4798 - protein, 11 aa, Artificial Sequence
  Synthetic
AAFLTTVMGVI

SEQ ID NO: 4799 - protein, 10 aa, Artificial Sequence
  Synthetic
IAFRTHDCVL

SEQ ID NO: 4800 - protein, 10 aa, Artificial Sequence
  Synthetic
RALAISHAVL

SEQ ID NO: 4801 - protein, 10 aa, Artificial Sequence
  Synthetic
SHLTNFLLVH

SEQ ID NO: 4802 - protein, 10 aa, Artificial Sequence
  Synthetic
HAWDTNVSVT

SEQ ID NO: 4803 - protein, 5 aa, Artificial Sequence
  Synthetic
VDDYC

SEQ ID NO: 4804 - protein, 13 aa, Artificial Sequence
  Synthetic
TVGSYHLDCLCVC

SEQ ID NO: 4805 - protein, 10 aa, Artificial Sequence
  Synthetic
TYLESDHFSR

SEQ ID NO: 4806 - protein, 6 aa, Artificial Sequence
  Synthetic
LHCSLF

SEQ ID NO: 4807 - protein, 9 aa, Artificial Sequence
  Synthetic
STVMYSTSL

SEQ ID NO: 4808 - protein, 9 aa, Artificial Sequence
  Synthetic
LNCIDCDFA

SEQ ID NO: 4809 - protein, 10 aa, Artificial Sequence
  Synthetic
TTLCPNGWCF

SEQ ID NO: 4810 - protein, 6 aa, Artificial Sequence
  Synthetic
IDSFGW

SEQ ID NO: 4811 - protein, 6 aa, Artificial Sequence
  Synthetic
RYGLGC

SEQ ID NO: 4812 - protein, 10 aa, Artificial Sequence
  Synthetic
WHFPDNGLVE

SEQ ID NO: 4813 - protein, 10 aa, Artificial Sequence
  Synthetic
LITHDTGVAF

SEQ ID NO: 4814 - protein, 10 aa, Artificial Sequence
  Synthetic
LIAVSEDVLY

SEQ ID NO: 4815 - protein, 10 aa, Artificial Sequence
  Synthetic
TSLDADGTYF

SEQ ID NO: 4816 - protein, 10 aa, Artificial Sequence
  Synthetic
LRVITHYGVW

SEQ ID NO: 4817 - protein, 10 aa, Artificial Sequence
  Synthetic
SYAMHQCIEY

SEQ ID NO: 4818 - protein, 9 aa, Artificial Sequence
  Synthetic
AYFVNGAVI

SEQ ID NO: 4819 - protein, 13 aa, Artificial Sequence
  Synthetic
VCYNYNGGDDPCR

SEQ ID NO: 4820 - protein, 6 aa, Artificial Sequence
  Synthetic
VQFLGA

SEQ ID NO: 4821 - protein, 6 aa, Artificial Sequence
  Synthetic
TTRFSH

SEQ ID NO: 4822 - protein, 13 aa, Artificial Sequence
  Synthetic
EQLYFDPWGLNVV

SEQ ID NO: 4823 - protein, 9 aa, Artificial Sequence
  Synthetic
IRFVSSGFD

SEQ ID NO: 4824 - protein, 13 aa, Artificial Sequence
  Synthetic
HISFFNGTIVSSY

SEQ ID NO: 4825 - protein, 10 aa, Artificial Sequence
  Synthetic
HIFDQYEGCS

SEQ ID NO: 4826 - protein, 9 aa, Artificial Sequence
  Synthetic
SYIGLGTVV

SEQ ID NO: 4827 - protein, 13 aa, Artificial Sequence
  Synthetic
HSLSSYSGFVYLC

SEQ ID NO: 4828 - protein, 10 aa, Artificial Sequence
  Synthetic
YVFCHPCMVA

SEQ ID NO: 4829 - protein, 9 aa, Artificial Sequence
  Synthetic
GPYIYYHRV

SEQ ID NO: 4830 - protein, 10 aa, Artificial Sequence
  Synthetic
ACFTANRGVS

SEQ ID NO: 4831 - protein, 6 aa, Artificial Sequence
  Synthetic
QTSCET

SEQ ID NO: 4832 - protein, 10 aa, Artificial Sequence
  Synthetic
AIKSRYVTVP

SEQ ID NO: 4833 - protein, 10 aa, Artificial Sequence
  Synthetic
VNLDSDMCCR

SEQ ID NO: 4834 - protein, 9 aa, Artificial Sequence
  Synthetic
CLLSGEYVA

SEQ ID NO: 4835 - protein, 10 aa, Artificial Sequence
  Synthetic
AYMFHNCGVK

SEQ ID NO: 4836 - protein, 10 aa, Artificial Sequence
  Synthetic
YHVTGNTVLI

SEQ ID NO: 4837 - protein, 13 aa, Artificial Sequence
  Synthetic
VFVNDCSGCNTVI

SEQ ID NO: 4838 - protein, 10 aa, Artificial Sequence
  Synthetic
VVLHANACVL

SEQ ID NO: 4839 - protein, 10 aa, Artificial Sequence
  Synthetic
DSGLMPWKHG

SEQ ID NO: 4840 - protein, 9 aa, Artificial Sequence
  Synthetic
ARFIHPVVV

SEQ ID NO: 4841 - protein, 10 aa, Artificial Sequence
  Synthetic
MMVDQFSVCC

SEQ ID NO: 4842 - protein, 6 aa, Artificial Sequence
  Synthetic
NSITHT

SEQ ID NO: 4843 - protein, 6 aa, Artificial Sequence
  Synthetic
FICAED

SEQ ID NO: 4844 - protein, 9 aa, Artificial Sequence
  Synthetic
VNLVAGDCV

SEQ ID NO: 4845 - protein, 8 aa, Artificial Sequence
  Synthetic
LAPMIDYF

SEQ ID NO: 4846 - protein, 13 aa, Artificial Sequence
  Synthetic
ATLDSLGSVPTVS

SEQ ID NO: 4847 - protein, 10 aa, Artificial Sequence
  Synthetic
FCFSTDLGVV

SEQ ID NO: 4848 - protein, 10 aa, Artificial Sequence
  Synthetic
VCLAHYECLL

SEQ ID NO: 4849 - protein, 9 aa, Artificial Sequence
  Synthetic
HIFTGVKSR

SEQ ID NO: 4850 - protein, 10 aa, Artificial Sequence
  Synthetic
TLHTDLWGAQ

SEQ ID NO: 4851 - protein, 10 aa, Artificial Sequence
  Synthetic
LATDPTWGSE

SEQ ID NO: 4852 - protein, 9 aa, Artificial Sequence
  Synthetic
QCFYLGSVT

SEQ ID NO: 4853 - protein, 9 aa, Artificial Sequence
  Synthetic
LCWSNSGRR

SEQ ID NO: 4854 - protein, 6 aa, Artificial Sequence
  Synthetic
IDIWGC

SEQ ID NO: 4855 - protein, 5 aa, Artificial Sequence
  Synthetic
VTPHM

SEQ ID NO: 4856 - protein, 6 aa, Artificial Sequence
  Synthetic
YDFLTW

SEQ ID NO: 4857 - protein, 10 aa, Artificial Sequence
  Synthetic
VVFLNHFSNV

SEQ ID NO: 4858 - protein, 9 aa, Artificial Sequence
  Synthetic
SILAGSTGA

SEQ ID NO: 4859 - protein, 9 aa, Artificial Sequence
  Synthetic
AYVSLGSVY

SEQ ID NO: 4860 - protein, 6 aa, Artificial Sequence
  Synthetic
QDHWAD

SEQ ID NO: 4861 - protein, 9 aa, Artificial Sequence
  Synthetic
DKFFRAHVV

SEQ ID NO: 4862 - protein, 6 aa, Artificial Sequence
  Synthetic
VRYGGH

SEQ ID NO: 4863 - protein, 10 aa, Artificial Sequence
  Synthetic
VLLINMGRLE

SEQ ID NO: 4864 - protein, 6 aa, Artificial Sequence
  Synthetic
VHPDTC

SEQ ID NO: 4865 - protein, 9 aa, Artificial Sequence
  Synthetic
MNWCWRGRC

SEQ ID NO: 4866 - protein, 10 aa, Artificial Sequence
  Synthetic
SIFIDHGCVD

SEQ ID NO: 4867 - protein, 9 aa, Artificial Sequence
  Synthetic
NIHNAGYTD

SEQ ID NO: 4868 - protein, 6 aa, Artificial Sequence
  Synthetic
FVSCIF

SEQ ID NO: 4869 - protein, 9 aa, Artificial Sequence
  Synthetic
PIFNSLGLS

SEQ ID NO: 4870 - protein, 6 aa, Artificial Sequence
  Synthetic
WTSCSR

SEQ ID NO: 4871 - protein, 5 aa, Artificial Sequence
  Synthetic
LDSEW

SEQ ID NO: 4872 - protein, 10 aa, Artificial Sequence
  Synthetic
CVFVGTCQRR

SEQ ID NO: 4873 - protein, 10 aa, Artificial Sequence
  Synthetic
GHVITSVLIF

SEQ ID NO: 4874 - protein, 13 aa, Artificial Sequence
  Synthetic
LLLTNTDFGRAAR

SEQ ID NO: 4875 - protein, 10 aa, Artificial Sequence
  Synthetic
IAMNTAWDVC

SEQ ID NO: 4876 - protein, 10 aa, Artificial Sequence
  Synthetic
DCASFVIVGY

SEQ ID NO: 4877 - protein, 13 aa, Artificial Sequence
  Synthetic
VACRLYGHSLNLE

SEQ ID NO: 4878 - protein, 13 aa, Artificial Sequence
  Synthetic
HIMCCHCMPARCF

SEQ ID NO: 4879 - protein, 9 aa, Artificial Sequence
  Synthetic
ILASGAGVS

SEQ ID NO: 4880 - protein, 6 aa, Artificial Sequence
  Synthetic
QHTCEL

SEQ ID NO: 4881 - protein, 10 aa, Artificial Sequence
  Synthetic
LSILPTSRVG

SEQ ID NO: 4882 - protein, 10 aa, Artificial Sequence
  Synthetic
SLCNRLEMYI

SEQ ID NO: 4883 - protein, 9 aa, Artificial Sequence
  Synthetic
VTWSVLGVL

SEQ ID NO: 4884 - protein, 6 aa, Artificial Sequence
  Synthetic
LPLFAD

SEQ ID NO: 4885 - protein, 9 aa, Artificial Sequence
  Synthetic
IYWSSGRVC

SEQ ID NO: 4886 - protein, 13 aa, Artificial Sequence
  Synthetic
LLWLCPGSFGEYF

SEQ ID NO: 4887 - protein, 10 aa, Artificial Sequence
  Synthetic
DSYARYIFPF

SEQ ID NO: 4888 - protein, 10 aa, Artificial Sequence
  Synthetic
SYITHTVDNC

SEQ ID NO: 4889 - protein, 10 aa, Artificial Sequence
  Synthetic
AASHHGLNII

SEQ ID NO: 4890 - protein, 10 aa, Artificial Sequence
  Synthetic
FTISYPGYFR

SEQ ID NO: 4891 - protein, 10 aa, Artificial Sequence
  Synthetic
IVFNYNNCVD

SEQ ID NO: 4892 - protein, 10 aa, Artificial Sequence
  Synthetic
VMLDKQMHTC

SEQ ID NO: 4893 - protein, 10 aa, Artificial Sequence
  Synthetic
LAYPVESCFD

SEQ ID NO: 4894 - protein, 9 aa, Artificial Sequence
  Synthetic
NIFRDDCNR

SEQ ID NO: 4895 - protein, 6 aa, Artificial Sequence
  Synthetic
LSRFSH

SEQ ID NO: 4896 - protein, 10 aa, Artificial Sequence
  Synthetic
TTLFTDCRCQ

SEQ ID NO: 4897 - protein, 6 aa, Artificial Sequence
  Synthetic
YKLKQS

SEQ ID NO: 4898 - protein, 13 aa, Artificial Sequence
  Synthetic
ASSFEVCMAMGLC

SEQ ID NO: 4899 - protein, 6 aa, Artificial Sequence
  Synthetic
NSGYGY

SEQ ID NO: 4900 - protein, 6 aa, Artificial Sequence
  Synthetic
YFSLEC

SEQ ID NO: 4901 - protein, 10 aa, Artificial Sequence
  Synthetic
MKYHKSGDMV

SEQ ID NO: 4902 - protein, 10 aa, Artificial Sequence
  Synthetic
FYPIPNLVCA

SEQ ID NO: 4903 - protein, 9 aa, Artificial Sequence
  Synthetic
VLYVNGLAA

SEQ ID NO: 4904 - protein, 10 aa, Artificial Sequence
  Synthetic
IANGLTTRML

SEQ ID NO: 4905 - protein, 10 aa, Artificial Sequence
  Synthetic
LNSTCLGVRW

SEQ ID NO: 4906 - protein, 6 aa, Artificial Sequence
  Synthetic
FASQWV

SEQ ID NO: 4907 - protein, 6 aa, Artificial Sequence
  Synthetic
APWRVD

SEQ ID NO: 4908 - protein, 6 aa, Artificial Sequence
  Synthetic
ITFCLT

SEQ ID NO: 4909 - protein, 10 aa, Artificial Sequence
  Synthetic
LTTSPNRVFW

SEQ ID NO: 4910 - protein, 6 aa, Artificial Sequence
  Synthetic
PTRFGA

SEQ ID NO: 4911 - protein, 13 aa, Artificial Sequence
  Synthetic
RIYIELMIYWGLV

SEQ ID NO: 4912 - protein, 6 aa, Artificial Sequence
  Synthetic
HPEGSW

SEQ ID NO: 4913 - protein, 6 aa, Artificial Sequence
  Synthetic
VAFYSK

SEQ ID NO: 4914 - protein, 13 aa, Artificial Sequence
  Synthetic
HVFRPSCYCGYVT

SEQ ID NO: 4915 - protein, 13 aa, Artificial Sequence
  Synthetic
YRLAEPYEECLME

SEQ ID NO: 4916 - protein, 6 aa, Artificial Sequence
  Synthetic
RNWWIE

SEQ ID NO: 4917 - protein, 10 aa, Artificial Sequence
  Synthetic
AIFKHCSEVS

SEQ ID NO: 4918 - protein, 9 aa, Artificial Sequence
  Synthetic
CLFRNSSVA

SEQ ID NO: 4919 - protein, 6 aa, Artificial Sequence
  Synthetic
MTRFGW

SEQ ID NO: 4920 - protein, 9 aa, Artificial Sequence
  Synthetic
AFFNWNDIY

SEQ ID NO: 4921 - protein, 10 aa, Artificial Sequence
  Synthetic
FSLIHHSCCN

SEQ ID NO: 4922 - protein, 10 aa, Artificial Sequence
  Synthetic
AFYHNESQCL

SEQ ID NO: 4923 - protein, 13 aa, Artificial Sequence
  Synthetic
IRYISCSPGGELL

SEQ ID NO: 4924 - protein, 6 aa, Artificial Sequence
  Synthetic
WSTFLG

SEQ ID NO: 4925 - protein, 6 aa, Artificial Sequence
  Synthetic
FVSCAD

SEQ ID NO: 4926 - protein, 5 aa, Artificial Sequence
  Synthetic
LYAPH

SEQ ID NO: 4927 - protein, 6 aa, Artificial Sequence
  Synthetic
SVCFSF

SEQ ID NO: 4928 - protein, 10 aa, Artificial Sequence
  Synthetic
LHPIRYYISW

SEQ ID NO: 4929 - protein, 10 aa, Artificial Sequence
  Synthetic
AHLNLDSSLL

SEQ ID NO: 4930 - protein, 9 aa, Artificial Sequence
  Synthetic
TTVAMYCRR

SEQ ID NO: 4931 - protein, 9 aa, Artificial Sequence
  Synthetic
GHNSALGRS

SEQ ID NO: 4932 - protein, 10 aa, Artificial Sequence
  Synthetic
AQFQNNLCLQ

SEQ ID NO: 4933 - protein, 10 aa, Artificial Sequence
  Synthetic
LISTSSDASY

SEQ ID NO: 4934 - protein, 6 aa, Artificial Sequence
  Synthetic
PTRYMH

SEQ ID NO: 4935 - protein, 9 aa, Artificial Sequence
  Synthetic
ITYYEDLVA

SEQ ID NO: 4936 - protein, 9 aa, Artificial Sequence
  Synthetic
VIYTGVEVM

SEQ ID NO: 4937 - protein, 10 aa, Artificial Sequence
  Synthetic
LIYDKSSLGL

SEQ ID NO: 4938 - protein, 13 aa, Artificial Sequence
  Synthetic
PHCTSTNGFVIVS

SEQ ID NO: 4939 - protein, 6 aa, Artificial Sequence
  Synthetic
VTFNLN

SEQ ID NO: 4940 - protein, 10 aa, Artificial Sequence
  Synthetic
SLINLRLEVV

SEQ ID NO: 4941 - protein, 9 aa, Artificial Sequence
  Synthetic
VQFNGTAVA

SEQ ID NO: 4942 - protein, 6 aa, Artificial Sequence
  Synthetic
YSPCCS

SEQ ID NO: 4943 - protein, 6 aa, Artificial Sequence
  Synthetic
ISDIGV

SEQ ID NO: 4944 - protein, 9 aa, Artificial Sequence
  Synthetic
HCWSGGIRC

SEQ ID NO: 4945 - protein, 9 aa, Artificial Sequence
  Synthetic
FQCLACEFS

SEQ ID NO: 4946 - protein, 10 aa, Artificial Sequence
  Synthetic
AVLNSDALVT

SEQ ID NO: 4947 - protein, 4 aa, Artificial Sequence
  Synthetic
VSDY

SEQ ID NO: 4948 - protein, 10 aa, Artificial Sequence
  Synthetic
GTFLEDYFYR

SEQ ID NO: 4949 - protein, 10 aa, Artificial Sequence
  Synthetic
YSHDLNSVVR

SEQ ID NO: 4950 - protein, 10 aa, Artificial Sequence
  Synthetic
AFFSSTGTVE

SEQ ID NO: 4951 - protein, 9 aa, Artificial Sequence
  Synthetic
AAYLAGGVS

SEQ ID NO: 4952 - protein, 9 aa, Artificial Sequence
  Synthetic
VYLAGGVGY

SEQ ID NO: 4953 - protein, 9 aa, Artificial Sequence
  Synthetic
VLPAMRLRY

SEQ ID NO: 4954 - protein, 10 aa, Artificial Sequence
  Synthetic
QILSHFDIVS

SEQ ID NO: 4955 - protein, 5 aa, Artificial Sequence
  Synthetic
VDGFW

SEQ ID NO: 4956 - protein, 10 aa, Artificial Sequence
  Synthetic
AFWTTGDRVE

SEQ ID NO: 4957 - protein, 6 aa, Artificial Sequence
  Synthetic
LVVPYY

SEQ ID NO: 4958 - protein, 6 aa, Artificial Sequence
  Synthetic
VINIRC

SEQ ID NO: 4959 - protein, 6 aa, Artificial Sequence
  Synthetic
NIRGFS

SEQ ID NO: 4960 - protein, 6 aa, Artificial Sequence
  Synthetic
YSRFLH

SEQ ID NO: 4961 - protein, 13 aa, Artificial Sequence
  Synthetic
HVLIPLVGLGVRA

SEQ ID NO: 4962 - protein, 10 aa, Artificial Sequence
  Synthetic
IEPAVEFFKF

SEQ ID NO: 4963 - protein, 10 aa, Artificial Sequence
  Synthetic
LRIGENCEVH

SEQ ID NO: 4964 - protein, 10 aa, Artificial Sequence
  Synthetic
LATRPNCPSN

SEQ ID NO: 4965 - protein, 7 aa, Artificial Sequence
  Synthetic
ISGDFGY

SEQ ID NO: 4966 - protein, 10 aa, Artificial Sequence
  Synthetic
ATMADDHLVS

SEQ ID NO: 4967 - protein, 5 aa, Artificial Sequence
  Synthetic
ICEHY

SEQ ID NO: 4968 - protein, 10 aa, Artificial Sequence
  Synthetic
QYYLGPNYFF

SEQ ID NO: 4969 - protein, 10 aa, Artificial Sequence
  Synthetic
LSITPDTCYW

SEQ ID NO: 4970 - protein, 10 aa, Artificial Sequence
  Synthetic
HYLHRSQCVM

SEQ ID NO: 4971 - protein, 13 aa, Artificial Sequence
  Synthetic
FCRRVVDGLWLRY

SEQ ID NO: 4972 - protein, 10 aa, Artificial Sequence
  Synthetic
LTIELDNSLI

SEQ ID NO: 4973 - protein, 10 aa, Artificial Sequence
  Synthetic
LALFRGPCML

SEQ ID NO: 4974 - protein, 10 aa, Artificial Sequence
  Synthetic
ALIDSEGYLA

SEQ ID NO: 4975 - protein, 11 aa, Artificial Sequence
  Synthetic
IYYSVSKSNNS

SEQ ID NO: 4976 - protein, 13 aa, Artificial Sequence
  Synthetic
VCFSQILMHTATV

SEQ ID NO: 4977 - protein, 6 aa, Artificial Sequence
  Synthetic
SACCDY

SEQ ID NO: 4978 - protein, 13 aa, Artificial Sequence
  Synthetic
LIEGSHSGFQSTY

SEQ ID NO: 4979 - protein, 6 aa, Artificial Sequence
  Synthetic
IDDWGC

SEQ ID NO: 4980 - protein, 13 aa, Artificial Sequence
  Synthetic
HYSLDTDEFMEVA

SEQ ID NO: 4981 - protein, 10 aa, Artificial Sequence
  Synthetic
ITVDHLISVL

SEQ ID NO: 4982 - protein, 6 aa, Artificial Sequence
  Synthetic
YITPVS

SEQ ID NO: 4983 - protein, 10 aa, Artificial Sequence
  Synthetic
FFFYHRCHRC

SEQ ID NO: 4984 - protein, 6 aa, Artificial Sequence
  Synthetic
IDDYGW

SEQ ID NO: 4985 - protein, 10 aa, Artificial Sequence
  Synthetic
WLYFAPGLLM

SEQ ID NO: 4986 - protein, 9 aa, Artificial Sequence
  Synthetic
SCFHWGMVR

SEQ ID NO: 4987 - protein, 10 aa, Artificial Sequence
  Synthetic
TLLLSNSRSD

SEQ ID NO: 4988 - protein, 5 aa, Artificial Sequence
  Synthetic
PICLG

SEQ ID NO: 4989 - protein, 10 aa, Artificial Sequence
  Synthetic
FVPSKVCCGK

SEQ ID NO: 4990 - protein, 13 aa, Artificial Sequence
  Synthetic
HCIMSGFGMPWVV

SEQ ID NO: 4991 - protein, 6 aa, Artificial Sequence
  Synthetic
MIRRLG

SEQ ID NO: 4992 - protein, 10 aa, Artificial Sequence
  Synthetic
ASFSSHCLVA

SEQ ID NO: 4993 - protein, 10 aa, Artificial Sequence
  Synthetic
LASHLKNEVH

SEQ ID NO: 4994 - protein, 10 aa, Artificial Sequence
  Synthetic
ASVTQNLTVL

SEQ ID NO: 4995 - protein, 6 aa, Artificial Sequence
  Synthetic
NSRWIH

SEQ ID NO: 4996 - protein, 10 aa, Artificial Sequence
  Synthetic
FILQTDGMFF

SEQ ID NO: 4997 - protein, 6 aa, Artificial Sequence
  Synthetic
IDDFGH

SEQ ID NO: 4998 - protein, 9 aa, Artificial Sequence
  Synthetic
NADPTLLGI

SEQ ID NO: 4999 - protein, 9 aa, Artificial Sequence
  Synthetic
ETAYAVNGP

SEQ ID NO: 5000 - protein, 6 aa, Artificial Sequence
  Synthetic
HVFDSL

SEQ ID NO: 5001 - protein, 10 aa, Artificial Sequence
  Synthetic
LVLARDCRLV

SEQ ID NO: 5002 - protein, 10 aa, Artificial Sequence
  Synthetic
FPAATESQFY

SEQ ID NO: 5003 - protein, 10 aa, Artificial Sequence
  Synthetic
HNPGVLGHWW

SEQ ID NO: 5004 - protein, 9 aa, Artificial Sequence
  Synthetic
HYYCDMDVS

SEQ ID NO: 5005 - protein, 10 aa, Artificial Sequence
  Synthetic
CILAALSFET

SEQ ID NO: 5006 - protein, 5 aa, Artificial Sequence
  Synthetic
YNLVL

SEQ ID NO: 5007 - protein, 13 aa, Artificial Sequence
  Synthetic
LRSFLTVSVSSLV

SEQ ID NO: 5008 - protein, 10 aa, Artificial Sequence
  Synthetic
VTWKYSHCVA

SEQ ID NO: 5009 - protein, 10 aa, Artificial Sequence
  Synthetic
WCLSDIDTCL

SEQ ID NO: 5010 - protein, 10 aa, Artificial Sequence
  Synthetic
HLLSRTLNVS

SEQ ID NO: 5011 - protein, 9 aa, Artificial Sequence
  Synthetic
VALLGNCIC

SEQ ID NO: 5012 - protein, 9 aa, Artificial Sequence
  Synthetic
GQVDFTVCW

SEQ ID NO: 5013 - protein, 6 aa, Artificial Sequence
  Synthetic
SNGGYH

SEQ ID NO: 5014 - protein, 13 aa, Artificial Sequence
  Synthetic
ITCNTISSGLWTF

SEQ ID NO: 5015 - protein, 10 aa, Artificial Sequence
  Synthetic
SQFHHGRCSL

SEQ ID NO: 5016 - protein, 10 aa, Artificial Sequence
  Synthetic
LSWPDTSPLI

SEQ ID NO: 5017 - protein, 10 aa, Artificial Sequence
  Synthetic
LIFDHNSGML

SEQ ID NO: 5018 - protein, 9 aa, Artificial Sequence
  Synthetic
CIFIFHSLR

SEQ ID NO: 5019 - protein, 10 aa, Artificial Sequence
  Synthetic
LFPQLSPRPA

SEQ ID NO: 5020 - protein, 6 aa, Artificial Sequence
  Synthetic
TTRFTH

SEQ ID NO: 5021 - protein, 6 aa, Artificial Sequence
  Synthetic
ITRFSG

SEQ ID NO: 5022 - protein, 10 aa, Artificial Sequence
  Synthetic
SLPGTNGWAD

SEQ ID NO: 5023 - protein, 9 aa, Artificial Sequence
  Synthetic
AFLMGARTI

SEQ ID NO: 5024 - protein, 10 aa, Artificial Sequence
  Synthetic
VIMQNIYVLK

SEQ ID NO: 5025 - protein, 9 aa, Artificial Sequence
  Synthetic
AILSGRFVC

SEQ ID NO: 5026 - protein, 9 aa, Artificial Sequence
  Synthetic
KCYYSDAIV

SEQ ID NO: 5027 - protein, 13 aa, Artificial Sequence
  Synthetic
AIFDPTQEGGGAV

SEQ ID NO: 5028 - protein, 10 aa, Artificial Sequence
  Synthetic
FSANCRDISR

SEQ ID NO: 5029 - protein, 9 aa, Artificial Sequence
  Synthetic
ALYSLFSTR

SEQ ID NO: 5030 - protein, 9 aa, Artificial Sequence
  Synthetic
WTPTRLVVV

SEQ ID NO: 5031 - protein, 10 aa, Artificial Sequence
  Synthetic
GIYYDCHCIT

SEQ ID NO: 5032 - protein, 10 aa, Artificial Sequence
  Synthetic
TTGYDTGALP

SEQ ID NO: 5033 - protein, 13 aa, Artificial Sequence
  Synthetic
TVMCYVMGFSGTD

SEQ ID NO: 5034 - protein, 10 aa, Artificial Sequence
  Synthetic
HDFHPHYRGG

SEQ ID NO: 5035 - protein, 10 aa, Artificial Sequence
  Synthetic
FPTPNSAGVF

SEQ ID NO: 5036 - protein, 9 aa, Artificial Sequence
  Synthetic
MCLLCNGVI

SEQ ID NO: 5037 - protein, 13 aa, Artificial Sequence
  Synthetic
VYCIDHSVSTDVL

SEQ ID NO: 5038 - protein, 9 aa, Artificial Sequence
  Synthetic
YLLVDGIVV

SEQ ID NO: 5039 - protein, 6 aa, Artificial Sequence
  Synthetic
HIGTVS

SEQ ID NO: 5040 - protein, 13 aa, Artificial Sequence
  Synthetic
RHLIRDLNGVLVR

SEQ ID NO: 5041 - protein, 5 aa, Artificial Sequence
  Synthetic
CSEWW

SEQ ID NO: 5042 - protein, 10 aa, Artificial Sequence
  Synthetic
SVFLINLSVV

SEQ ID NO: 5043 - protein, 10 aa, Artificial Sequence
  Synthetic
AVFHPDLGVH

SEQ ID NO: 5044 - protein, 12 aa, Artificial Sequence
  Synthetic
CILSYRRAEEAE

SEQ ID NO: 5045 - protein, 6 aa, Artificial Sequence
  Synthetic
FHSSQS

SEQ ID NO: 5046 - protein, 8 aa, Artificial Sequence
  Synthetic
DNTPIMIG

SEQ ID NO: 5047 - protein, 6 aa, Artificial Sequence
  Synthetic
VLFPSC

SEQ ID NO: 5048 - protein, 9 aa, Artificial Sequence
  Synthetic
TNFLSRNAS

SEQ ID NO: 5049 - protein, 13 aa, Artificial Sequence
  Synthetic
TGSPIPFIYFAHG

SEQ ID NO: 5050 - protein, 6 aa, Artificial Sequence
  Synthetic
ERYPYS

SEQ ID NO: 5051 - protein, 6 aa, Artificial Sequence
  Synthetic
MHIYGE

SEQ ID NO: 5052 - protein, 10 aa, Artificial Sequence
  Synthetic
RGDPLHPVWY

SEQ ID NO: 5053 - protein, 10 aa, Artificial Sequence
  Synthetic
LHHTNDDNYR

SEQ ID NO: 5054 - protein, 13 aa, Artificial Sequence
  Synthetic
GLLDDHACFGHGR

SEQ ID NO: 5055 - protein, 10 aa, Artificial Sequence
  Synthetic
QALTANFFVS

SEQ ID NO: 5056 - protein, 10 aa, Artificial Sequence
  Synthetic
LAPRFGFVAW

SEQ ID NO: 5057 - protein, 13 aa, Artificial Sequence
  Synthetic
VLIHRINGSFAML

SEQ ID NO: 5058 - protein, 6 aa, Artificial Sequence
  Synthetic
MRFFEN

SEQ ID NO: 5059 - protein, 10 aa, Artificial Sequence
  Synthetic
AYYRSSIMVE

SEQ ID NO: 5060 - protein, 13 aa, Artificial Sequence
  Synthetic
HYIVSNYLMVYVC

SEQ ID NO: 5061 - protein, 10 aa, Artificial Sequence
  Synthetic
YMFTPRSDVS

SEQ ID NO: 5062 - protein, 10 aa, Artificial Sequence
  Synthetic
LASGTNGVFF

SEQ ID NO: 5063 - protein, 10 aa, Artificial Sequence
  Synthetic
FELPDHFSFS

SEQ ID NO: 5064 - protein, 10 aa, Artificial Sequence
  Synthetic
VKHVSHLQTV

SEQ ID NO: 5065 - protein, 9 aa, Artificial Sequence
  Synthetic
AYMTLVDVT

SEQ ID NO: 5066 - protein, 13 aa, Artificial Sequence
  Synthetic
AINPICIAYMALL

SEQ ID NO: 5067 - protein, 13 aa, Artificial Sequence
  Synthetic
FSIPTFGYVAPVR

SEQ ID NO: 5068 - protein, 6 aa, Artificial Sequence
  Synthetic
FISVCI

SEQ ID NO: 5069 - protein, 10 aa, Artificial Sequence
  Synthetic
DTNWDYVYPS

SEQ ID NO: 5070 - protein, 9 aa, Artificial Sequence
  Synthetic
AYVRGASVT

SEQ ID NO: 5071 - protein, 9 aa, Artificial Sequence
  Synthetic
QAFGCWGHV

SEQ ID NO: 5072 - protein, 10 aa, Artificial Sequence
  Synthetic
ANTSSMVKPV

SEQ ID NO: 5073 - protein, 10 aa, Artificial Sequence
  Synthetic
AVYLRRGSVA

SEQ ID NO: 5074 - protein, 10 aa, Artificial Sequence
  Synthetic
IYSLDDVGCM

SEQ ID NO: 5075 - protein, 5 aa, Artificial Sequence
  Synthetic
VDSYY

SEQ ID NO: 5076 - protein, 6 aa, Artificial Sequence
  Synthetic
PLHFHY

SEQ ID NO: 5077 - protein, 9 aa, Artificial Sequence
  Synthetic
YHFVAGNVN

SEQ ID NO: 5078 - protein, 6 aa, Artificial Sequence
  Synthetic
EDMEGY

SEQ ID NO: 5079 - protein, 5 aa, Artificial Sequence
  Synthetic
LVEFL

SEQ ID NO: 5080 - protein, 6 aa, Artificial Sequence
  Synthetic
FTSCIT

SEQ ID NO: 5081 - protein, 10 aa, Artificial Sequence
  Synthetic
TIMQSPSLVH

SEQ ID NO: 5082 - protein, 6 aa, Artificial Sequence
  Synthetic
VDDFGI

SEQ ID NO: 5083 - protein, 9 aa, Artificial Sequence
  Synthetic
SHFNDTTRM

SEQ ID NO: 5084 - protein, 10 aa, Artificial Sequence
  Synthetic
TYTHDGYYLS

SEQ ID NO: 5085 - protein, 10 aa, Artificial Sequence
  Synthetic
NAILSTNTHD

SEQ ID NO: 5086 - protein, 10 aa, Artificial Sequence
  Synthetic
SIYLNENVIL

SEQ ID NO: 5087 - protein, 10 aa, Artificial Sequence
  Synthetic
VTFHNECIVR

SEQ ID NO: 5088 - protein, 13 aa, Artificial Sequence
  Synthetic
RDTAFSLCQNGWT

SEQ ID NO: 5089 - protein, 6 aa, Artificial Sequence
  Synthetic
AYYELG

SEQ ID NO: 5090 - protein, 10 aa, Artificial Sequence
  Synthetic
LFLDSSGLVF

SEQ ID NO: 5091 - protein, 10 aa, Artificial Sequence
  Synthetic
VVGRCTNMHW

SEQ ID NO: 5092 - protein, 9 aa, Artificial Sequence
  Synthetic
HYLNVSCSL

SEQ ID NO: 5093 - protein, 9 aa, Artificial Sequence
  Synthetic
ATFTTFVVT

SEQ ID NO: 5094 - protein, 10 aa, Artificial Sequence
  Synthetic
HYSIPTEHCL

SEQ ID NO: 5095 - protein, 10 aa, Artificial Sequence
  Synthetic
IALSLSGFIL

SEQ ID NO: 5096 - protein, 9 aa, Artificial Sequence
  Synthetic
ARYTAVAVV

SEQ ID NO: 5097 - protein, 10 aa, Artificial Sequence
  Synthetic
PCWSHRLGVF

SEQ ID NO: 5098 - protein, 13 aa, Artificial Sequence
  Synthetic
VHVSVHSGLVCIC

SEQ ID NO: 5099 - protein, 10 aa, Artificial Sequence
  Synthetic
IVFNPIGGVL

SEQ ID NO: 5100 - protein, 10 aa, Artificial Sequence
  Synthetic
RIVFDEYHIA

SEQ ID NO: 5101 - protein, 13 aa, Artificial Sequence
  Synthetic
ATVLVPSYHCAGC

SEQ ID NO: 5102 - protein, 10 aa, Artificial Sequence
  Synthetic
FSWFHIDALL

SEQ ID NO: 5103 - protein, 13 aa, Artificial Sequence
  Synthetic
HCFSFTRNNLPVE

SEQ ID NO: 5104 - protein, 10 aa, Artificial Sequence
  Synthetic
AYMDIHTCVN

SEQ ID NO: 5105 - protein, 10 aa, Artificial Sequence
  Synthetic
TDLPAEFLCA

SEQ ID NO: 5106 - protein, 6 aa, Artificial Sequence
  Synthetic
CFDGRF

SEQ ID NO: 5107 - protein, 5 aa, Artificial Sequence
  Synthetic
VTPIW

SEQ ID NO: 5108 - protein, 10 aa, Artificial Sequence
  Synthetic
TCLSDCHLCC

SEQ ID NO: 5109 - protein, 9 aa, Artificial Sequence
  Synthetic
MLWDMDACH

SEQ ID NO: 5110 - protein, 13 aa, Artificial Sequence
  Synthetic
AFVLPHRENTDVL

SEQ ID NO: 5111 - protein, 6 aa, Artificial Sequence
  Synthetic
VTRFAY

SEQ ID NO: 5112 - protein, 13 aa, Artificial Sequence
  Synthetic
VIVVHSGSTSEAC

SEQ ID NO: 5113 - protein, 10 aa, Artificial Sequence
  Synthetic
AYLSIDDIIY

SEQ ID NO: 5114 - protein, 9 aa, Artificial Sequence
  Synthetic
FTWSSLGRR

SEQ ID NO: 5115 - protein, 9 aa, Artificial Sequence
  Synthetic
GYLCGRDVS

SEQ ID NO: 5116 - protein, 9 aa, Artificial Sequence
  Synthetic
LILSNSILM

SEQ ID NO: 5117 - protein, 6 aa, Artificial Sequence
  Synthetic
VSQVGG

SEQ ID NO: 5118 - protein, 10 aa, Artificial Sequence
  Synthetic
LYSWSDSCLF

SEQ ID NO: 5119 - protein, 6 aa, Artificial Sequence
  Synthetic
SMLGCS

SEQ ID NO: 5120 - protein, 10 aa, Artificial Sequence
  Synthetic
VPPHYHELVK

SEQ ID NO: 5121 - protein, 6 aa, Artificial Sequence
  Synthetic
CPCCFS

SEQ ID NO: 5122 - protein, 9 aa, Artificial Sequence
  Synthetic
FPAIYPDWR

SEQ ID NO: 5123 - protein, 13 aa, Artificial Sequence
  Synthetic
AVLSLTNMTLLVQ

SEQ ID NO: 5124 - protein, 10 aa, Artificial Sequence
  Synthetic
LGPMHHDGGL

SEQ ID NO: 5125 - protein, 10 aa, Artificial Sequence
  Synthetic
YALADYGLVF

SEQ ID NO: 5126 - protein, 10 aa, Artificial Sequence
  Synthetic
YLYSHFSAVV

SEQ ID NO: 5127 - protein, 13 aa, Artificial Sequence
  Synthetic
AYYSKAALVGRVL

SEQ ID NO: 5128 - protein, 13 aa, Artificial Sequence
  Synthetic
FHARSTMAGQDIY

SEQ ID NO: 5129 - protein, 9 aa, Artificial Sequence
  Synthetic
AAYVSRSVD

SEQ ID NO: 5130 - protein, 5 aa, Artificial Sequence
  Synthetic
WPWTI

SEQ ID NO: 5131 - protein, 6 aa, Artificial Sequence
  Synthetic
SCSSDI

SEQ ID NO: 5132 - protein, 6 aa, Artificial Sequence
  Synthetic
SNLEGT

SEQ ID NO: 5133 - protein, 10 aa, Artificial Sequence
  Synthetic
VHLASSLEFL

SEQ ID NO: 5134 - protein, 5 aa, Artificial Sequence
  Synthetic
LDSIY

SEQ ID NO: 5135 - protein, 13 aa, Artificial Sequence
  Synthetic
YVYEESFRHPVVR

SEQ ID NO: 5136 - protein, 10 aa, Artificial Sequence
  Synthetic
ARFLSISARV

SEQ ID NO: 5137 - protein, 13 aa, Artificial Sequence
  Synthetic
VCLLRTVSPIHAV

SEQ ID NO: 5138 - protein, 9 aa, Artificial Sequence
  Synthetic
QYFIRDYPL

SEQ ID NO: 5139 - protein, 13 aa, Artificial Sequence
  Synthetic
HDIYSNDGLVVIG

SEQ ID NO: 5140 - protein, 10 aa, Artificial Sequence
  Synthetic
FPAVNSESCF

SEQ ID NO: 5141 - protein, 9 aa, Artificial Sequence
  Synthetic
YTFVSVGCE

SEQ ID NO: 5142 - protein, 6 aa, Artificial Sequence
  Synthetic
ITRWSM

SEQ ID NO: 5143 - protein, 13 aa, Artificial Sequence
  Synthetic
HCPDPNFSPVLIV

SEQ ID NO: 5144 - protein, 10 aa, Artificial Sequence
  Synthetic
VFFVNGSGTL

SEQ ID NO: 5145 - protein, 6 aa, Artificial Sequence
  Synthetic
WYSCLQ

SEQ ID NO: 5146 - protein, 9 aa, Artificial Sequence
  Synthetic
GILCYDGFV

SEQ ID NO: 5147 - protein, 9 aa, Artificial Sequence
  Synthetic
AFFFVYDVS

SEQ ID NO: 5148 - protein, 13 aa, Artificial Sequence
  Synthetic
VLAFKCHGGFECC

SEQ ID NO: 5149 - protein, 10 aa, Artificial Sequence
  Synthetic
QLLQPTFHVT

SEQ ID NO: 5150 - protein, 6 aa, Artificial Sequence
  Synthetic
ATGSTA

SEQ ID NO: 5151 - protein, 10 aa, Artificial Sequence
  Synthetic
SGPDTTLFRL

SEQ ID NO: 5152 - protein, 10 aa, Artificial Sequence
  Synthetic
TFLCSCLGSL

SEQ ID NO: 5153 - protein, 10 aa, Artificial Sequence
  Synthetic
RSFNEDADFY

SEQ ID NO: 5154 - protein, 9 aa, Artificial Sequence
  Synthetic
LRFEPVAVW

SEQ ID NO: 5155 - protein, 13 aa, Artificial Sequence
  Synthetic
DLLTHAVGLCRHE

SEQ ID NO: 5156 - protein, 10 aa, Artificial Sequence
  Synthetic
ARFGDHHMVH

SEQ ID NO: 5157 - protein, 9 aa, Artificial Sequence
  Synthetic
SSYKDGGIV

SEQ ID NO: 5158 - protein, 10 aa, Artificial Sequence
  Synthetic
VHLKHVGLLQ

SEQ ID NO: 5159 - protein, 9 aa, Artificial Sequence
  Synthetic
VTFSSDGPV

SEQ ID NO: 5160 - protein, 13 aa, Artificial Sequence
  Synthetic
NWWLDEWKSNDVS

SEQ ID NO: 5161 - protein, 6 aa, Artificial Sequence
  Synthetic
RSLFDH

SEQ ID NO: 5162 - protein, 10 aa, Artificial Sequence
  Synthetic
FDLTTPWLPA

SEQ ID NO: 5163 - protein, 9 aa, Artificial Sequence
  Synthetic
HHYFHGTVF

SEQ ID NO: 5164 - protein, 10 aa, Artificial Sequence
  Synthetic
AYSHCGPSEG

SEQ ID NO: 5165 - protein, 10 aa, Artificial Sequence
  Synthetic
HMYNGFDSII

SEQ ID NO: 5166 - protein, 9 aa, Artificial Sequence
  Synthetic
TTFGEAGRK

SEQ ID NO: 5167 - protein, 13 aa, Artificial Sequence
  Synthetic
YAVHAILSDSDVT

SEQ ID NO: 5168 - protein, 6 aa, Artificial Sequence
  Synthetic
LYGPFA

SEQ ID NO: 5169 - protein, 10 aa, Artificial Sequence
  Synthetic
YLYSALWGSI

SEQ ID NO: 5170 - protein, 9 aa, Artificial Sequence
  Synthetic
WMEADGECF

SEQ ID NO: 5171 - protein, 10 aa, Artificial Sequence
  Synthetic
LHGERKPTPP

SEQ ID NO: 5172 - protein, 9 aa, Artificial Sequence
  Synthetic
GYLWCTYVL

SEQ ID NO: 5173 - protein, 10 aa, Artificial Sequence
  Synthetic
FPSATTAWGY

SEQ ID NO: 5174 - protein, 10 aa, Artificial Sequence
  Synthetic
YIDAYSPTES

SEQ ID NO: 5175 - protein, 13 aa, Artificial Sequence
  Synthetic
YNFVARAGLTSIC

SEQ ID NO: 5176 - protein, 10 aa, Artificial Sequence
  Synthetic
TIPSPAFGGD

SEQ ID NO: 5177 - protein, 13 aa, Artificial Sequence
  Synthetic
TVLDLAFAGSYTF

SEQ ID NO: 5178 - protein, 10 aa, Artificial Sequence
  Synthetic
AYWLNHSTVT

SEQ ID NO: 5179 - protein, 13 aa, Artificial Sequence
  Synthetic
AEDIIRVGVIPWV

SEQ ID NO: 5180 - protein, 10 aa, Artificial Sequence
  Synthetic
SYLCDGLDVK

SEQ ID NO: 5181 - protein, 13 aa, Artificial Sequence
  Synthetic
HATDLRDSQLCIR

SEQ ID NO: 5182 - protein, 9 aa, Artificial Sequence
  Synthetic
HRLTDVGLV

SEQ ID NO: 5183 - protein, 13 aa, Artificial Sequence
  Synthetic
HAIHADSAELSVR

SEQ ID NO: 5184 - protein, 6 aa, Artificial Sequence
  Synthetic
FATVSS

SEQ ID NO: 5185 - protein, 9 aa, Artificial Sequence
  Synthetic
YCMAYDAVL

SEQ ID NO: 5186 - protein, 6 aa, Artificial Sequence
  Synthetic
WLSCAG

SEQ ID NO: 5187 - protein, 6 aa, Artificial Sequence
  Synthetic
GAVWPF

SEQ ID NO: 5188 - protein, 10 aa, Artificial Sequence
  Synthetic
IFLYTQKVSE

SEQ ID NO: 5189 - protein, 6 aa, Artificial Sequence
  Synthetic
ELTNGL

SEQ ID NO: 5190 - protein, 12 aa, Artificial Sequence
  Synthetic
VMALFMAGLTLS

SEQ ID NO: 5191 - protein, 10 aa, Artificial Sequence
  Synthetic
IMLRRTYVCY

SEQ ID NO: 5192 - protein, 9 aa, Artificial Sequence
  Synthetic
KGLSGVSVT

SEQ ID NO: 5193 - protein, 10 aa, Artificial Sequence
  Synthetic
AYITLSSDVV

SEQ ID NO: 5194 - protein, 10 aa, Artificial Sequence
  Synthetic
PVPDDNVMFF

SEQ ID NO: 5195 - protein, 13 aa, Artificial Sequence
  Synthetic
AILNEYQYRIGVT

SEQ ID NO: 5196 - protein, 10 aa, Artificial Sequence
  Synthetic
CVYIPHGGVN

SEQ ID NO: 5197 - protein, 10 aa, Artificial Sequence
  Synthetic
LFDQHDGSVL

SEQ ID NO: 5198 - protein, 9 aa, Artificial Sequence
  Synthetic
VYWSQRVVI

SEQ ID NO: 5199 - protein, 10 aa, Artificial Sequence
  Synthetic
KSRCSPQFSC

SEQ ID NO: 5200 - protein, 10 aa, Artificial Sequence
  Synthetic
ASAHYQNIIL

SEQ ID NO: 5201 - protein, 10 aa, Artificial Sequence
  Synthetic
VYYCRLSSVN

SEQ ID NO: 5202 - protein, 9 aa, Artificial Sequence
  Synthetic
PYFSSGAVF

SEQ ID NO: 5203 - protein, 5 aa, Artificial Sequence
  Synthetic
IDSSS

SEQ ID NO: 5204 - protein, 13 aa, Artificial Sequence
  Synthetic
TALVAQGYHYDAT

SEQ ID NO: 5205 - protein, 13 aa, Artificial Sequence
  Synthetic
HIRTRSSDGFWYE

SEQ ID NO: 5206 - protein, 13 aa, Artificial Sequence
  Synthetic
SHIHLPLNRWVVT

SEQ ID NO: 5207 - protein, 13 aa, Artificial Sequence
  Synthetic
ACLTSTGFLSYVK

SEQ ID NO: 5208 - protein, 6 aa, Artificial Sequence
  Synthetic
VAFFGN

SEQ ID NO: 5209 - protein, 10 aa, Artificial Sequence
  Synthetic
SLYVFPSAHR

SEQ ID NO: 5210 - protein, 13 aa, Artificial Sequence
  Synthetic
AIMRNVGLDYEIN

SEQ ID NO: 5211 - protein, 10 aa, Artificial Sequence
  Synthetic
VCYEPSVGAV

SEQ ID NO: 5212 - protein, 10 aa, Artificial Sequence
  Synthetic
LCVAPTRLAW

SEQ ID NO: 5213 - protein, 10 aa, Artificial Sequence
  Synthetic
PTRMLTGLDI

SEQ ID NO: 5214 - protein, 10 aa, Artificial Sequence
  Synthetic
QVLTTHNAQV

SEQ ID NO: 5215 - protein, 9 aa, Artificial Sequence
  Synthetic
AHFNAGVIC

SEQ ID NO: 5216 - protein, 4 aa, Artificial Sequence
  Synthetic
WGHG

SEQ ID NO: 5217 - protein, 13 aa, Artificial Sequence
  Synthetic
ESKSGHCVGVEVS

SEQ ID NO: 5218 - protein, 13 aa, Artificial Sequence
  Synthetic
HTVQIVCFSIILL

SEQ ID NO: 5219 - protein, 6 aa, Artificial Sequence
  Synthetic
TWVLSQ

SEQ ID NO: 5220 - protein, 10 aa, Artificial Sequence
  Synthetic
VLYVRNSWPL

SEQ ID NO: 5221 - protein, 5 aa, Artificial Sequence
  Synthetic
VDDWF

SEQ ID NO: 5222 - protein, 10 aa, Artificial Sequence
  Synthetic
PFTIAAFGPY

SEQ ID NO: 5223 - protein, 10 aa, Artificial Sequence
  Synthetic
HLWMHAPVGF

SEQ ID NO: 5224 - protein, 10 aa, Artificial Sequence
  Synthetic
LVVTTSGHVG

SEQ ID NO: 5225 - protein, 10 aa, Artificial Sequence
  Synthetic
TLVPANDFPC

SEQ ID NO: 5226 - protein, 5 aa, Artificial Sequence
  Synthetic
PCYCI

SEQ ID NO: 5227 - protein, 13 aa, Artificial Sequence
  Synthetic
TTPIGDYHYSLGP

SEQ ID NO: 5228 - protein, 9 aa, Artificial Sequence
  Synthetic
ARFHANSVR

SEQ ID NO: 5229 - protein, 6 aa, Artificial Sequence
  Synthetic
EYDEAK

SEQ ID NO: 5230 - protein, 13 aa, Artificial Sequence
  Synthetic
VTASMSENLMLCR

SEQ ID NO: 5231 - protein, 13 aa, Artificial Sequence
  Synthetic
RNSCSAIYGESCV

SEQ ID NO: 5232 - protein, 6 aa, Artificial Sequence
  Synthetic
YNRWSG

SEQ ID NO: 5233 - protein, 9 aa, Artificial Sequence
  Synthetic
YWISCVGYV

SEQ ID NO: 5234 - protein, 5 aa, Artificial Sequence
  Synthetic
LYDWT

SEQ ID NO: 5235 - protein, 9 aa, Artificial Sequence
  Synthetic
FSFSLMSRS

SEQ ID NO: 5236 - protein, 10 aa, Artificial Sequence
  Synthetic
LLTCTALGSR

SEQ ID NO: 5237 - protein, 9 aa, Artificial Sequence
  Synthetic
INFADGRRR

SEQ ID NO: 5238 - protein, 9 aa, Artificial Sequence
  Synthetic
LTAYKDRCT

SEQ ID NO: 5239 - protein, 13 aa, Artificial Sequence
  Synthetic
NIYSDAVCHGVWS

SEQ ID NO: 5240 - protein, 9 aa, Artificial Sequence
  Synthetic
LAAFEYGAL

SEQ ID NO: 5241 - protein, 6 aa, Artificial Sequence
  Synthetic
FHHRDA

SEQ ID NO: 5242 - protein, 13 aa, Artificial Sequence
  Synthetic
HFFASRSSIPTVQ

SEQ ID NO: 5243 - protein, 6 aa, Artificial Sequence
  Synthetic
GHIFVH

SEQ ID NO: 5244 - protein, 9 aa, Artificial Sequence
  Synthetic
HNWGCLGRQ

SEQ ID NO: 5245 - protein, 6 aa, Artificial Sequence
  Synthetic
MGATVY

SEQ ID NO: 5246 - protein, 7 aa, Artificial Sequence
  Synthetic
IGSPYGH

SEQ ID NO: 5247 - protein, 10 aa, Artificial Sequence
  Synthetic
ATSNYSSSIV

SEQ ID NO: 5248 - protein, 10 aa, Artificial Sequence
  Synthetic
LTFVTRDTRL

SEQ ID NO: 5249 - protein, 10 aa, Artificial Sequence
  Synthetic
WIHRDTLYCE

SEQ ID NO: 5250 - protein, 10 aa, Artificial Sequence
  Synthetic
ANINQNHGVF

SEQ ID NO: 5251 - protein, 6 aa, Artificial Sequence
  Synthetic
QTSNVD

SEQ ID NO: 5252 - protein, 10 aa, Artificial Sequence
  Synthetic
LLWSNDSFPR

SEQ ID NO: 5253 - protein, 10 aa, Artificial Sequence
  Synthetic
HRYSANGSYP

SEQ ID NO: 5254 - protein, 10 aa, Artificial Sequence
  Synthetic
DIVLPSGQVG

SEQ ID NO: 5255 - protein, 4 aa, Artificial Sequence
  Synthetic
CGEY

SEQ ID NO: 5256 - protein, 10 aa, Artificial Sequence
  Synthetic
LSTCVHGYRP

SEQ ID NO: 5257 - protein, 10 aa, Artificial Sequence
  Synthetic
AYFDNHSRVD

SEQ ID NO: 5258 - protein, 10 aa, Artificial Sequence
  Synthetic
LLTTTYGQLF

SEQ ID NO: 5259 - protein, 10 aa, Artificial Sequence
  Synthetic
YRRLPHVGVW

SEQ ID NO: 5260 - protein, 9 aa, Artificial Sequence
  Synthetic
FNWQPRGRV

SEQ ID NO: 5261 - protein, 13 aa, Artificial Sequence
  Synthetic
HALCLTCTQGVIL

SEQ ID NO: 5262 - protein, 6 aa, Artificial Sequence
  Synthetic
VDLCLL

SEQ ID NO: 5263 - protein, 6 aa, Artificial Sequence
  Synthetic
LQVGFG

SEQ ID NO: 5264 - protein, 10 aa, Artificial Sequence
  Synthetic
ALYISSNHVH

SEQ ID NO: 5265 - protein, 9 aa, Artificial Sequence
  Synthetic
AYWAPGGVF

SEQ ID NO: 5266 - protein, 10 aa, Artificial Sequence
  Synthetic
NSYRGVGLIL

SEQ ID NO: 5267 - protein, 10 aa, Artificial Sequence
  Synthetic
IHLVRNKLLA

SEQ ID NO: 5268 - protein, 10 aa, Artificial Sequence
  Synthetic
AHVGLNCCVI

SEQ ID NO: 5269 - protein, 10 aa, Artificial Sequence
  Synthetic
TIFSHGPVLT

SEQ ID NO: 5270 - protein, 9 aa, Artificial Sequence
  Synthetic
VIYSPAAVE

SEQ ID NO: 5271 - protein, 10 aa, Artificial Sequence
  Synthetic
FQPSACCSVR

SEQ ID NO: 5272 - protein, 10 aa, Artificial Sequence
  Synthetic
FPAYSACFHF

SEQ ID NO: 5273 - protein, 6 aa, Artificial Sequence
  Synthetic
FLTNVL

SEQ ID NO: 5274 - protein, 13 aa, Artificial Sequence
  Synthetic
AYCCSASGRYTVA

SEQ ID NO: 5275 - protein, 6 aa, Artificial Sequence
  Synthetic
YCFGDS

SEQ ID NO: 5276 - protein, 10 aa, Artificial Sequence
  Synthetic
FCYNTSCVIE

SEQ ID NO: 5277 - protein, 10 aa, Artificial Sequence
  Synthetic
AALVTLVSVV

SEQ ID NO: 5278 - protein, 13 aa, Artificial Sequence
  Synthetic
LYATGSSEELTIH

SEQ ID NO: 5279 - protein, 10 aa, Artificial Sequence
  Synthetic
YCIDCLFTVV

SEQ ID NO: 5280 - protein, 10 aa, Artificial Sequence
  Synthetic
NIHVTGYGNC

SEQ ID NO: 5281 - protein, 10 aa, Artificial Sequence
  Synthetic
VYLSRLSNVL

SEQ ID NO: 5282 - protein, 6 aa, Artificial Sequence
  Synthetic
NDIYWV

SEQ ID NO: 5283 - protein, 9 aa, Artificial Sequence
  Synthetic
NSWFGDNVC

SEQ ID NO: 5284 - protein, 10 aa, Artificial Sequence
  Synthetic
SPSGYCLFLL

SEQ ID NO: 5285 - protein, 10 aa, Artificial Sequence
  Synthetic
ACYNTTAICA

SEQ ID NO: 5286 - protein, 10 aa, Artificial Sequence
  Synthetic
YCNSRTGVVV

SEQ ID NO: 5287 - protein, 9 aa, Artificial Sequence
  Synthetic
NMWISSALG

SEQ ID NO: 5288 - protein, 10 aa, Artificial Sequence
  Synthetic
FRLSLSGSII

SEQ ID NO: 5289 - protein, 13 aa, Artificial Sequence
  Synthetic
VMLLYSRDHCCAQ

SEQ ID NO: 5290 - protein, 10 aa, Artificial Sequence
  Synthetic
HHYEHNYMLN

SEQ ID NO: 5291 - protein, 6 aa, Artificial Sequence
  Synthetic
VSPSLS

SEQ ID NO: 5292 - protein, 10 aa, Artificial Sequence
  Synthetic
YYYCALNCLD

SEQ ID NO: 5293 - protein, 9 aa, Artificial Sequence
  Synthetic
IAHRCYCCF

SEQ ID NO: 5294 - protein, 9 aa, Artificial Sequence
  Synthetic
HFFARHFVD

SEQ ID NO: 5295 - protein, 10 aa, Artificial Sequence
  Synthetic
AVLTVCGLVT

SEQ ID NO: 5296 - protein, 13 aa, Artificial Sequence
  Synthetic
PLFYNVLTGSLSG

SEQ ID NO: 5297 - protein, 6 aa, Artificial Sequence
  Synthetic
VCQARW

SEQ ID NO: 5298 - protein, 13 aa, Artificial Sequence
  Synthetic
FLIDRRDDFVLCM

SEQ ID NO: 5299 - protein, 10 aa, Artificial Sequence
  Synthetic
TLIDSQGYVA

SEQ ID NO: 5300 - protein, 10 aa, Artificial Sequence
  Synthetic
HVYSLTGAVM

SEQ ID NO: 5301 - protein, 10 aa, Artificial Sequence
  Synthetic
TYFAHSSVLT

SEQ ID NO: 5302 - protein, 10 aa, Artificial Sequence
  Synthetic
LYNLSTSVME

SEQ ID NO: 5303 - protein, 6 aa, Artificial Sequence
  Synthetic
MICSYR

SEQ ID NO: 5304 - protein, 6 aa, Artificial Sequence
  Synthetic
LDTGLC

SEQ ID NO: 5305 - protein, 10 aa, Artificial Sequence
  Synthetic
PIVTGHGTVV

SEQ ID NO: 5306 - protein, 10 aa, Artificial Sequence
  Synthetic
FPSIHSEDCY

SEQ ID NO: 5307 - protein, 10 aa, Artificial Sequence
  Synthetic
WFFRNDLDPQ

SEQ ID NO: 5308 - protein, 10 aa, Artificial Sequence
  Synthetic
FAVCTGLGVF

SEQ ID NO: 5309 - protein, 6 aa, Artificial Sequence
  Synthetic
SPDFSL

SEQ ID NO: 5310 - protein, 10 aa, Artificial Sequence
  Synthetic
GVYVQWRGVY

SEQ ID NO: 5311 - protein, 10 aa, Artificial Sequence
  Synthetic
CCLREDLTCF

SEQ ID NO: 5312 - protein, 5 aa, Artificial Sequence
  Synthetic
VDQSW

SEQ ID NO: 5313 - protein, 6 aa, Artificial Sequence
  Synthetic
YTLCAG

SEQ ID NO: 5314 - protein, 6 aa, Artificial Sequence
  Synthetic
AVNCCL

SEQ ID NO: 5315 - protein, 6 aa, Artificial Sequence
  Synthetic
IDMYGC

SEQ ID NO: 5316 - protein, 10 aa, Artificial Sequence
  Synthetic
LGTLTPVSCD

SEQ ID NO: 5317 - protein, 6 aa, Artificial Sequence
  Synthetic
ICQWGC

SEQ ID NO: 5318 - protein, 10 aa, Artificial Sequence
  Synthetic
PNGTVPHCSI

SEQ ID NO: 5319 - protein, 10 aa, Artificial Sequence
  Synthetic
FALLTTAGFF

SEQ ID NO: 5320 - protein, 10 aa, Artificial Sequence
  Synthetic
LHLDPNDRVL

SEQ ID NO: 5321 - protein, 9 aa, Artificial Sequence
  Synthetic
YQWRLSGRF

SEQ ID NO: 5322 - protein, 12 aa, Artificial Sequence
  Synthetic
WPIARQSDLRRF

SEQ ID NO: 5323 - protein, 13 aa, Artificial Sequence
  Synthetic
SAYTCMGPQVVRL

SEQ ID NO: 5324 - protein, 6 aa, Artificial Sequence
  Synthetic
SHFGIR

SEQ ID NO: 5325 - protein, 6 aa, Artificial Sequence
  Synthetic
TGGTYH

SEQ ID NO: 5326 - protein, 6 aa, Artificial Sequence
  Synthetic
CPRLDW

SEQ ID NO: 5327 - protein, 10 aa, Artificial Sequence
  Synthetic
VLYSPIGITK

SEQ ID NO: 5328 - protein, 9 aa, Artificial Sequence
  Synthetic
HCVLETYMT

SEQ ID NO: 5329 - protein, 9 aa, Artificial Sequence
  Synthetic
DPNPYIWPS

SEQ ID NO: 5330 - protein, 10 aa, Artificial Sequence
  Synthetic
MICTPTLEVK

SEQ ID NO: 5331 - protein, 6 aa, Artificial Sequence
  Synthetic
NPGCFP

SEQ ID NO: 5332 - protein, 13 aa, Artificial Sequence
  Synthetic
FPFEPASDTWEVF

SEQ ID NO: 5333 - protein, 10 aa, Artificial Sequence
  Synthetic
HLWCPHSNSS

SEQ ID NO: 5334 - protein, 13 aa, Artificial Sequence
  Synthetic
PELHQWDWWYGRT

SEQ ID NO: 5335 - protein, 13 aa, Artificial Sequence
  Synthetic
YMARIRAGCITVL

SEQ ID NO: 5336 - protein, 10 aa, Artificial Sequence
  Synthetic
LSSTRVAVLW

SEQ ID NO: 5337 - protein, 9 aa, Artificial Sequence
  Synthetic
HFFDASGFH

SEQ ID NO: 5338 - protein, 10 aa, Artificial Sequence
  Synthetic
SVLTQFGLVL

SEQ ID NO: 5339 - protein, 9 aa, Artificial Sequence
  Synthetic
YTYSIFGVV

SEQ ID NO: 5340 - protein, 10 aa, Artificial Sequence
  Synthetic
VTHTDPWGEL

SEQ ID NO: 5341 - protein, 10 aa, Artificial Sequence
  Synthetic
ITYDTISANR

SEQ ID NO: 5342 - protein, 8 aa, Artificial Sequence
  Synthetic
DHNFTFAP

SEQ ID NO: 5343 - protein, 6 aa, Artificial Sequence
  Synthetic
ICDYGV

SEQ ID NO: 5344 - protein, 6 aa, Artificial Sequence
  Synthetic
VSLTLR

SEQ ID NO: 5345 - protein, 6 aa, Artificial Sequence
  Synthetic
RAFYYN

SEQ ID NO: 5346 - protein, 7 aa, Artificial Sequence
  Synthetic
VCPTMGW

SEQ ID NO: 5347 - protein, 9 aa, Artificial Sequence
  Synthetic
VKWAHQVCQ

SEQ ID NO: 5348 - protein, 6 aa, Artificial Sequence
  Synthetic
LSVWCC

SEQ ID NO: 5349 - protein, 6 aa, Artificial Sequence
  Synthetic
RFGISA

SEQ ID NO: 5350 - protein, 10 aa, Artificial Sequence
  Synthetic
AYWSPLRQST

SEQ ID NO: 5351 - protein, 6 aa, Artificial Sequence
  Synthetic
STRFRH

SEQ ID NO: 5352 - protein, 9 aa, Artificial Sequence
  Synthetic
ASLYGSKIC

SEQ ID NO: 5353 - protein, 10 aa, Artificial Sequence
  Synthetic
LTLLSLSVLR

SEQ ID NO: 5354 - protein, 9 aa, Artificial Sequence
  Synthetic
TTFDLSGKR

SEQ ID NO: 5355 - protein, 9 aa, Artificial Sequence
  Synthetic
SYDPWTMAY

SEQ ID NO: 5356 - protein, 6 aa, Artificial Sequence
  Synthetic
FLSVEA

SEQ ID NO: 5357 - protein, 10 aa, Artificial Sequence
  Synthetic
YAWKSLGCIV

SEQ ID NO: 5358 - protein, 9 aa, Artificial Sequence
  Synthetic
SVYELHMLS

SEQ ID NO: 5359 - protein, 6 aa, Artificial Sequence
  Synthetic
FVSSVM

SEQ ID NO: 5360 - protein, 10 aa, Artificial Sequence
  Synthetic
LVATSTRVCW

SEQ ID NO: 5361 - protein, 5 aa, Artificial Sequence
  Synthetic
QYIEC

SEQ ID NO: 5362 - protein, 9 aa, Artificial Sequence
  Synthetic
CVWDKFNVL

SEQ ID NO: 5363 - protein, 10 aa, Artificial Sequence
  Synthetic
LIEHVDSSSF

SEQ ID NO: 5364 - protein, 10 aa, Artificial Sequence
  Synthetic
TYTMFSRSAC

SEQ ID NO: 5365 - protein, 9 aa, Artificial Sequence
  Synthetic
RTWGLMGRM

SEQ ID NO: 5366 - protein, 9 aa, Artificial Sequence
  Synthetic
YYYNLHSLI

SEQ ID NO: 5367 - protein, 6 aa, Artificial Sequence
  Synthetic
IDSYGR

SEQ ID NO: 5368 - protein, 10 aa, Artificial Sequence
  Synthetic
STFESHPFVR

SEQ ID NO: 5369 - protein, 6 aa, Artificial Sequence
  Synthetic
CHGGWM

SEQ ID NO: 5370 - protein, 6 aa, Artificial Sequence
  Synthetic
DPDRRV

SEQ ID NO: 5371 - protein, 10 aa, Artificial Sequence
  Synthetic
WLMHPDCLVV

SEQ ID NO: 5372 - protein, 5 aa, Artificial Sequence
  Synthetic
LCLNW

SEQ ID NO: 5373 - protein, 9 aa, Artificial Sequence
  Synthetic
LGYIGLFGF

SEQ ID NO: 5374 - protein, 10 aa, Artificial Sequence
  Synthetic
QSLNNNGFFS

SEQ ID NO: 5375 - protein, 10 aa, Artificial Sequence
  Synthetic
DLLNDVVHSA

SEQ ID NO: 5376 - protein, 10 aa, Artificial Sequence
  Synthetic
VSRDANADMC

SEQ ID NO: 5377 - protein, 10 aa, Artificial Sequence
  Synthetic
SFRVGHAGFG

SEQ ID NO: 5378 - protein, 10 aa, Artificial Sequence
  Synthetic
ALFRPREDVI

SEQ ID NO: 5379 - protein, 10 aa, Artificial Sequence
  Synthetic
SMCRRENMLC

SEQ ID NO: 5380 - protein, 10 aa, Artificial Sequence
  Synthetic
WHFLTHDKII

SEQ ID NO: 5381 - protein, 10 aa, Artificial Sequence
  Synthetic
YSRFVITPFG

SEQ ID NO: 5382 - protein, 10 aa, Artificial Sequence
  Synthetic
VEPHLYDLWS

SEQ ID NO: 5383 - protein, 10 aa, Artificial Sequence
  Synthetic
AFTTLSKYAS

SEQ ID NO: 5384 - protein, 9 aa, Artificial Sequence
  Synthetic
SIFHHPYVY

SEQ ID NO: 5385 - protein, 9 aa, Artificial Sequence
  Synthetic
WRYVSGDIL

SEQ ID NO: 5386 - protein, 6 aa, Artificial Sequence
  Synthetic
WASFVD

SEQ ID NO: 5387 - protein, 5 aa, Artificial Sequence
  Synthetic
MSCIG

SEQ ID NO: 5388 - protein, 10 aa, Artificial Sequence
  Synthetic
LTQDTRRCSW

SEQ ID NO: 5389 - protein, 13 aa, Artificial Sequence
  Synthetic
NSVGVIMTCWWRT

SEQ ID NO: 5390 - protein, 6 aa, Artificial Sequence
  Synthetic
CTTDLF

SEQ ID NO: 5391 - protein, 6 aa, Artificial Sequence
  Synthetic
HIFDSF

SEQ ID NO: 5392 - protein, 10 aa, Artificial Sequence
  Synthetic
NHPSHTCVMC

SEQ ID NO: 5393 - protein, 10 aa, Artificial Sequence
  Synthetic
IMYASDFWVF

SEQ ID NO: 5394 - protein, 9 aa, Artificial Sequence
  Synthetic
AYFVDGIIT

SEQ ID NO: 5395 - protein, 10 aa, Artificial Sequence
  Synthetic
VYFRSMFCVH

SEQ ID NO: 5396 - protein, 6 aa, Artificial Sequence
  Synthetic
FVQCTL

SEQ ID NO: 5397 - protein, 10 aa, Artificial Sequence
  Synthetic
TCFVNHMKIS

SEQ ID NO: 5398 - protein, 10 aa, Artificial Sequence
  Synthetic
TYVSHPCHLY

SEQ ID NO: 5399 - protein, 13 aa, Artificial Sequence
  Synthetic
AYATYNLDRGYSM

SEQ ID NO: 5400 - protein, 9 aa, Artificial Sequence
  Synthetic
VSIVQGTTG

SEQ ID NO: 5401 - protein, 10 aa, Artificial Sequence
  Synthetic
LITDTAGGSF

SEQ ID NO: 5402 - protein, 10 aa, Artificial Sequence
  Synthetic
FCATYQETCY

SEQ ID NO: 5403 - protein, 9 aa, Artificial Sequence
  Synthetic
PVVLRRNII

SEQ ID NO: 5404 - protein, 9 aa, Artificial Sequence
  Synthetic
LACSLTGIC

SEQ ID NO: 5405 - protein, 9 aa, Artificial Sequence
  Synthetic
LTSPLSDSS

SEQ ID NO: 5406 - protein, 13 aa, Artificial Sequence
  Synthetic
GMVRDWSTRLSSE

SEQ ID NO: 5407 - protein, 10 aa, Artificial Sequence
  Synthetic
WPSLPTGGTP

SEQ ID NO: 5408 - protein, 13 aa, Artificial Sequence
  Synthetic
SNHVPSEPKPSVF

SEQ ID NO: 5409 - protein, 9 aa, Artificial Sequence
  Synthetic
LTSPLSDSS

SEQ ID NO: 5410 - protein, 13 aa, Artificial Sequence
  Synthetic
LIPAESGLVPLVD

SEQ ID NO: 5411 - protein, 9 aa, Artificial Sequence
  Synthetic
MRCPPHFFV

SEQ ID NO: 5412 - protein, 4 aa, Artificial Sequence
  Synthetic
AHLV

SEQ ID NO: 5413 - protein, 6 aa, Artificial Sequence
  Synthetic
TTDSVT

SEQ ID NO: 5414 - protein, 6 aa, Artificial Sequence
  Synthetic
YLIRHA

SEQ ID NO: 5415 - protein, 10 aa, Artificial Sequence
  Synthetic
SHYTALVCNV

SEQ ID NO: 5416 - protein, 10 aa, Artificial Sequence
  Synthetic
CNCNAPSFVQ

SEQ ID NO: 5417 - protein, 6 aa, Artificial Sequence
  Synthetic
LGPHVP

SEQ ID NO: 5418 - protein, 13 aa, Artificial Sequence
  Synthetic
LLSRPKRCFVMVM

SEQ ID NO: 5419 - protein, 6 aa, Artificial Sequence
  Synthetic
NFQASN

SEQ ID NO: 5420 - protein, 9 aa, Artificial Sequence
  Synthetic
LTSPLSDSS

SEQ ID NO: 5421 - protein, 9 aa, Artificial Sequence
  Synthetic
LTSPLSDSS

SEQ ID NO: 5422 - protein, 6 aa, Artificial Sequence
  Synthetic
YLMVTG

SEQ ID NO: 5423 - protein, 6 aa, Artificial Sequence
  Synthetic
TIYGVY

SEQ ID NO: 5424 - protein, 6 aa, Artificial Sequence
  Synthetic
WPILSA

SEQ ID NO: 5425 - protein, 6 aa, Artificial Sequence
  Synthetic
MTSEVT

SEQ ID NO: 5426 - protein, 6 aa, Artificial Sequence
  Synthetic
FLSAIE

SEQ ID NO: 5427 - protein, 6 aa, Artificial Sequence
  Synthetic
IINCLI

SEQ ID NO: 5428 - protein, 6 aa, Artificial Sequence
  Synthetic
PSEVFE

SEQ ID NO: 5429 - protein, 6 aa, Artificial Sequence
  Synthetic
FQSSNL

SEQ ID NO: 5430 - protein, 6 aa, Artificial Sequence
  Synthetic
QPSCYQ

SEQ ID NO: 5431 - protein, 6 aa, Artificial Sequence
  Synthetic
QINPML

SEQ ID NO: 5432 - protein, 6 aa, Artificial Sequence
  Synthetic
FASVLK

SEQ ID NO: 5433 - protein, 10 aa, Artificial Sequence
  Synthetic
NPFLGRFAGT

SEQ ID NO: 5434 - protein, 9 aa, Artificial Sequence
  Synthetic
PLIIQGCCY

SEQ ID NO: 5435 - protein, 10 aa, Artificial Sequence
  Synthetic
DTMPNYIYPM

SEQ ID NO: 5436 - protein, 6 aa, Artificial Sequence
  Synthetic
RINCDL

SEQ ID NO: 5437 - protein, 9 aa, Artificial Sequence
  Synthetic
SGMAWIYPI

SEQ ID NO: 5438 - protein, 10 aa, Artificial Sequence
  Synthetic
NHTDHYIFPS

SEQ ID NO: 5439 - protein, 6 aa, Artificial Sequence
  Synthetic
FASSCC

SEQ ID NO: 5440 - protein, 6 aa, Artificial Sequence
  Synthetic
IINCTK

SEQ ID NO: 5441 - protein, 9 aa, Artificial Sequence
  Synthetic
QRSVFGSSG

SEQ ID NO: 5442 - protein, 9 aa, Artificial Sequence
  Synthetic
SYLGYIFPE

SEQ ID NO: 5443 - protein, 13 aa, Artificial Sequence
  Synthetic
RMRTPCLMLSGIS

SEQ ID NO: 5444 - protein, 5 aa, Artificial Sequence
  Synthetic
YHGPG

SEQ ID NO: 5445 - protein, 6 aa, Artificial Sequence
  Synthetic
PCTISG

SEQ ID NO: 5446 - protein, 6 aa, Artificial Sequence
  Synthetic
SYLNSW

SEQ ID NO: 5447 - protein, 10 aa, Artificial Sequence
  Synthetic
YGSTMTGCHC

SEQ ID NO: 5448 - protein, 6 aa, Artificial Sequence
  Synthetic
ALLVRE

SEQ ID NO: 5449 - protein, 6 aa, Artificial Sequence
  Synthetic
YIQGAC

SEQ ID NO: 5450 - protein, 6 aa, Artificial Sequence
  Synthetic
TFSTRY

SEQ ID NO: 5451 - protein, 9 aa, Artificial Sequence
  Synthetic
SGLSFGAVR

SEQ ID NO: 5452 - protein, 10 aa, Artificial Sequence
  Synthetic
PDLVIYLMPN

SEQ ID NO: 5453 - protein, 6 aa, Artificial Sequence
  Synthetic
NAHQYF

SEQ ID NO: 5454 - protein, 6 aa, Artificial Sequence
  Synthetic
WITCES

SEQ ID NO: 5455 - protein, 6 aa, Artificial Sequence
  Synthetic
WPDCCN

SEQ ID NO: 5456 - protein, 6 aa, Artificial Sequence
  Synthetic
FLSCDA

SEQ ID NO: 5457 - protein, 6 aa, Artificial Sequence
  Synthetic
WPDCIV

SEQ ID NO: 5458 - protein, 10 aa, Artificial Sequence
  Synthetic
MCCAATFWDP

SEQ ID NO: 5459 - protein, 10 aa, Artificial Sequence
  Synthetic
GPDILSFYGC

SEQ ID NO: 5460 - protein, 6 aa, Artificial Sequence
  Synthetic
TDDFFN

SEQ ID NO: 5461 - protein, 7 aa, Artificial Sequence
  Synthetic
LNLAYFV

SEQ ID NO: 5462 - protein, 7 aa, Artificial Sequence
  Synthetic
DISAYHR

SEQ ID NO: 5463 - protein, 7 aa, Artificial Sequence
  Synthetic
SCSISNS

SEQ ID NO: 5464 - protein, 7 aa, Artificial Sequence
  Synthetic
GKVGVCS

SEQ ID NO: 5465 - protein, 7 aa, Artificial Sequence
  Synthetic
KMWRGLD

SEQ ID NO: 5466 - protein, 7 aa, Artificial Sequence
  Synthetic
PMPQVGV

SEQ ID NO: 5467 - protein, 7 aa, Artificial Sequence
  Synthetic
DCCFLGK

SEQ ID NO: 5468 - protein, 7 aa, Artificial Sequence
  Synthetic
YPFMPFF

SEQ ID NO: 5469 - protein, 7 aa, Artificial Sequence
  Synthetic
AGCGFMR

SEQ ID NO: 5470 - protein, 7 aa, Artificial Sequence
  Synthetic
PDVTHCT

SEQ ID NO: 5471 - protein, 4 aa, Artificial Sequence
  Synthetic
LKVG

SEQ ID NO: 5472 - protein, 7 aa, Artificial Sequence
  Synthetic
TPFNSYS

SEQ ID NO: 5473 - protein, 7 aa, Artificial Sequence
  Synthetic
AGALRRS

SEQ ID NO: 5474 - protein, 7 aa, Artificial Sequence
  Synthetic
LYAIERH

SEQ ID NO: 5475 - protein, 7 aa, Artificial Sequence
  Synthetic
MWHAFDT

SEQ ID NO: 5476 - protein, 7 aa, Artificial Sequence
  Synthetic
WPLGFYT

SEQ ID NO: 5477 - protein, 7 aa, Artificial Sequence
  Synthetic
CTSNIRP

SEQ ID NO: 5478 - protein, 11 aa, Artificial Sequence
  Synthetic
LATVCCGGLWA

SEQ ID NO: 5479 - protein, 7 aa, Artificial Sequence
  Synthetic
PFWTLDK

SEQ ID NO: 5480 - protein, 7 aa, Artificial Sequence
  Synthetic
VYVGWHD

SEQ ID NO: 5481 - protein, 7 aa, Artificial Sequence
  Synthetic
DLYLLRN

SEQ ID NO: 5482 - protein, 7 aa, Artificial Sequence
  Synthetic
LTCGSDR

SEQ ID NO: 5483 - protein, 7 aa, Artificial Sequence
  Synthetic
YWGVFMD

SEQ ID NO: 5484 - protein, 7 aa, Artificial Sequence
  Synthetic
SVLSVTA

SEQ ID NO: 5485 - protein, 7 aa, Artificial Sequence
  Synthetic
LYIARSR

SEQ ID NO: 5486 - protein, 4 aa, Artificial Sequence
  Synthetic
MRVN

SEQ ID NO: 5487 - protein, 7 aa, Artificial Sequence
  Synthetic
VCSGVRG

SEQ ID NO: 5488 - protein, 7 aa, Artificial Sequence
  Synthetic
GHSPCWS

SEQ ID NO: 5489 - protein, 7 aa, Artificial Sequence
  Synthetic
TTLPGLV

SEQ ID NO: 5490 - protein, 7 aa, Artificial Sequence
  Synthetic
LYGPRRW

SEQ ID NO: 5491 - protein, 7 aa, Artificial Sequence
  Synthetic
VPVQLWS

SEQ ID NO: 5492 - protein, 7 aa, Artificial Sequence
  Synthetic
LYQRILM

SEQ ID NO: 5493 - protein, 7 aa, Artificial Sequence
  Synthetic
LSHSVFA

SEQ ID NO: 5494 - protein, 7 aa, Artificial Sequence
  Synthetic
SGVGCFD

SEQ ID NO: 5495 - protein, 7 aa, Artificial Sequence
  Synthetic
LIGSRHC

SEQ ID NO: 5496 - protein, 7 aa, Artificial Sequence
  Synthetic
IGMCRYY

SEQ ID NO: 5497 - protein, 7 aa, Artificial Sequence
  Synthetic
GMNLSRH

SEQ ID NO: 5498 - protein, 7 aa, Artificial Sequence
  Synthetic
CYTAFRV

SEQ ID NO: 5499 - protein, 7 aa, Artificial Sequence
  Synthetic
QYSVHTT

SEQ ID NO: 5500 - protein, 7 aa, Artificial Sequence
  Synthetic
ALCVISG

SEQ ID NO: 5501 - protein, 7 aa, Artificial Sequence
  Synthetic
TRLPSLT

SEQ ID NO: 5502 - protein, 7 aa, Artificial Sequence
  Synthetic
YYACGSA

SEQ ID NO: 5503 - protein, 7 aa, Artificial Sequence
  Synthetic
NFRSFFL

SEQ ID NO: 5504 - protein, 7 aa, Artificial Sequence
  Synthetic
GFDTGFL

SEQ ID NO: 5505 - protein, 7 aa, Artificial Sequence
  Synthetic
GSVRISN

SEQ ID NO: 5506 - protein, 7 aa, Artificial Sequence
  Synthetic
ANDRLTS

SEQ ID NO: 5507 - protein, 7 aa, Artificial Sequence
  Synthetic
GLRGVRS

SEQ ID NO: 5508 - protein, 7 aa, Artificial Sequence
  Synthetic
NPRPIGI

SEQ ID NO: 5509 - protein, 7 aa, Artificial Sequence
  Synthetic
CSEGYTL

SEQ ID NO: 5510 - protein, 7 aa, Artificial Sequence
  Synthetic
SMDRRFT

SEQ ID NO: 5511 - protein, 7 aa, Artificial Sequence
  Synthetic
FPMDAGC

SEQ ID NO: 5512 - protein, 7 aa, Artificial Sequence
  Synthetic
SLVNFHR

SEQ ID NO: 5513 - protein, 7 aa, Artificial Sequence
  Synthetic
CASAFHE

SEQ ID NO: 5514 - protein, 5 aa, Artificial Sequence
  Synthetic
RSNSW

SEQ ID NO: 5515 - protein, 7 aa, Artificial Sequence
  Synthetic
MRSTRKT

SEQ ID NO: 5516 - protein, 5 aa, Artificial Sequence
  Synthetic
CLGYQ

SEQ ID NO: 5517 - protein, 7 aa, Artificial Sequence
  Synthetic
SHLARGC

SEQ ID NO: 5518 - protein, 7 aa, Artificial Sequence
  Synthetic
SVVYVCY

SEQ ID NO: 5519 - protein, 4 aa, Artificial Sequence
  Synthetic
EMGV

SEQ ID NO: 5520 - protein, 7 aa, Artificial Sequence
  Synthetic
QHSSFFC

SEQ ID NO: 5521 - protein, 7 aa, Artificial Sequence
  Synthetic
LVWITCP

SEQ ID NO: 5522 - protein, 6 aa, Artificial Sequence
  Synthetic
EFDVWG

SEQ ID NO: 5523 - protein, 7 aa, Artificial Sequence
  Synthetic
GNSRDRT

SEQ ID NO: 5524 - protein, 7 aa, Artificial Sequence
  Synthetic
YDSSVGG

SEQ ID NO: 5525 - protein, 7 aa, Artificial Sequence
  Synthetic
MEVVSRA

SEQ ID NO: 5526 - protein, 7 aa, Artificial Sequence
  Synthetic
HFSSRWV

SEQ ID NO: 5527 - protein, 7 aa, Artificial Sequence
  Synthetic
LSNTCVI

SEQ ID NO: 5528 - protein, 7 aa, Artificial Sequence
  Synthetic
VLVCYSY

SEQ ID NO: 5529 - protein, 7 aa, Artificial Sequence
  Synthetic
LVVTYER

SEQ ID NO: 5530 - protein, 7 aa, Artificial Sequence
  Synthetic
VCVSYTH

SEQ ID NO: 5531 - protein, 7 aa, Artificial Sequence
  Synthetic
ILCMYEQ

SEQ ID NO: 5532 - protein, 7 aa, Artificial Sequence
  Synthetic
LLMAYEC

SEQ ID NO: 5533 - protein, 7 aa, Artificial Sequence
  Synthetic
LRVCYTR

SEQ ID NO: 5534 - protein, 7 aa, Artificial Sequence
  Synthetic
FLCCYGI

SEQ ID NO: 5535 - protein, 7 aa, Artificial Sequence
  Synthetic
CVINYHV

SEQ ID NO: 5536 - protein, 7 aa, Artificial Sequence
  Synthetic
DYGYCTF

SEQ ID NO: 5537 - protein, 7 aa, Artificial Sequence
  Synthetic
IPVFYCI

SEQ ID NO: 5538 - protein, 7 aa, Artificial Sequence
  Synthetic
TKFEGLV

SEQ ID NO: 5539 - protein, 7 aa, Artificial Sequence
  Synthetic
IYNCKST

SEQ ID NO: 5540 - protein, 7 aa, Artificial Sequence
  Synthetic
TRTELRS

SEQ ID NO: 5541 - protein, 7 aa, Artificial Sequence
  Synthetic
SSRSRFN

SEQ ID NO: 5542 - protein, 7 aa, Artificial Sequence
  Synthetic
GNVFLCG

SEQ ID NO: 5543 - protein, 7 aa, Artificial Sequence
  Synthetic
SYVNVWG

SEQ ID NO: 5544 - protein, 7 aa, Artificial Sequence
  Synthetic
LRSRVIT

SEQ ID NO: 5545 - protein, 7 aa, Artificial Sequence
  Synthetic
ATIYIYA

SEQ ID NO: 5546 - protein, 7 aa, Artificial Sequence
  Synthetic
DRCGTST

SEQ ID NO: 5547 - protein, 7 aa, Artificial Sequence
  Synthetic
SVCYVYG

SEQ ID NO: 5548 - protein, 7 aa, Artificial Sequence
  Synthetic
MLTLSAR

SEQ ID NO: 5549 - protein, 7 aa, Artificial Sequence
  Synthetic
SSIYVYL

SEQ ID NO: 5550 - protein, 7 aa, Artificial Sequence
  Synthetic
ITVVVGS

SEQ ID NO: 5551 - protein, 7 aa, Artificial Sequence
  Synthetic
RCVIVGC

SEQ ID NO: 5552 - protein, 7 aa, Artificial Sequence
  Synthetic
WMFVLSS

SEQ ID NO: 5553 - protein, 7 aa, Artificial Sequence
  Synthetic
HLVPVAT

SEQ ID NO: 5554 - protein, 4 aa, Artificial Sequence
  Synthetic
LLFT

SEQ ID NO: 5555 - protein, 7 aa, Artificial Sequence
  Synthetic
LALARVS

SEQ ID NO: 5556 - protein, 7 aa, Artificial Sequence
  Synthetic
ILVGIYW

SEQ ID NO: 5557 - protein, 7 aa, Artificial Sequence
  Synthetic
NIGPCMC

SEQ ID NO: 5558 - protein, 7 aa, Artificial Sequence
  Synthetic
ESQALRV

SEQ ID NO: 5559 - protein, 7 aa, Artificial Sequence
  Synthetic
AIGCNGL

SEQ ID NO: 5560 - protein, 7 aa, Artificial Sequence
  Synthetic
VLKSMLL

SEQ ID NO: 5561 - protein, 7 aa, Artificial Sequence
  Synthetic
DTVYLLV

SEQ ID NO: 5562 - protein, 7 aa, Artificial Sequence
  Synthetic
PEISLIC

SEQ ID NO: 5563 - protein, 7 aa, Artificial Sequence
  Synthetic
CHSGALY

SEQ ID NO: 5564 - protein, 6 aa, Artificial Sequence
  Synthetic
PLATSG

SEQ ID NO: 5565 - protein, 7 aa, Artificial Sequence
  Synthetic
HNVGVGT

SEQ ID NO: 5566 - protein, 7 aa, Artificial Sequence
  Synthetic
VCYTGWD

SEQ ID NO: 5567 - protein, 7 aa, Artificial Sequence
  Synthetic
VLICRTA

SEQ ID NO: 5568 - protein, 7 aa, Artificial Sequence
  Synthetic
VHITRFV

SEQ ID NO: 5569 - protein, 4 aa, Artificial Sequence
  Synthetic
RLRP

SEQ ID NO: 5570 - protein, 7 aa, Artificial Sequence
  Synthetic
IDAHDSV

SEQ ID NO: 5571 - protein, 7 aa, Artificial Sequence
  Synthetic
VLSSEFT

SEQ ID NO: 5572 - protein, 7 aa, Artificial Sequence
  Synthetic
DMYGSLT

SEQ ID NO: 5573 - protein, 7 aa, Artificial Sequence
  Synthetic
NMVYMKH

SEQ ID NO: 5574 - protein, 7 aa, Artificial Sequence
  Synthetic
SDTVGLV

SEQ ID NO: 5575 - protein, 7 aa, Artificial Sequence
  Synthetic
NCNRVIS

SEQ ID NO: 5576 - protein, 7 aa, Artificial Sequence
  Synthetic
VSGFRAC

SEQ ID NO: 5577 - protein, 7 aa, Artificial Sequence
  Synthetic
FDAAQAW

SEQ ID NO: 5578 - protein, 5 aa, Artificial Sequence
  Synthetic
EVSAK

SEQ ID NO: 5579 - protein, 5 aa, Artificial Sequence
  Synthetic
DFLAA

SEQ ID NO: 5580 - protein, 5 aa, Artificial Sequence
  Synthetic
FIFAR

SEQ ID NO: 5581 - protein, 5 aa, Artificial Sequence
  Synthetic
STWDR

SEQ ID NO: 5582 - protein, 5 aa, Artificial Sequence
  Synthetic
LYYGL

SEQ ID NO: 5583 - protein, 5 aa, Artificial Sequence
  Synthetic
LLLGT

SEQ ID NO: 5584 - protein, 5 aa, Artificial Sequence
  Synthetic
NTWAR

SEQ ID NO: 5585 - protein, 5 aa, Artificial Sequence
  Synthetic
EWFGR

SEQ ID NO: 5586 - protein, 5 aa, Artificial Sequence
  Synthetic
SFDEA

SEQ ID NO: 5587 - protein, 5 aa, Artificial Sequence
  Synthetic
WVFGS

SEQ ID NO: 5588 - protein, 5 aa, Artificial Sequence
  Synthetic
RTFNR

SEQ ID NO: 5589 - protein, 5 aa, Artificial Sequence
  Synthetic
RMGVL

SEQ ID NO: 5590 - protein, 5 aa, Artificial Sequence
  Synthetic
FTWYR

SEQ ID NO: 5591 - protein, 5 aa, Artificial Sequence
  Synthetic
SLGHC

SEQ ID NO: 5592 - protein, 5 aa, Artificial Sequence
  Synthetic
RMGLL

SEQ ID NO: 5593 - protein, 5 aa, Artificial Sequence
  Synthetic
WWAAS

SEQ ID NO: 5594 - protein, 5 aa, Artificial Sequence
  Synthetic
WFSHD

SEQ ID NO: 5595 - protein, 5 aa, Artificial Sequence
  Synthetic
SDSAY

SEQ ID NO: 5596 - protein, 5 aa, Artificial Sequence
  Synthetic
CLGHR

SEQ ID NO: 5597 - protein, 5 aa, Artificial Sequence
  Synthetic
EYWGR

SEQ ID NO: 5598 - protein, 5 aa, Artificial Sequence
  Synthetic
CPFHR

SEQ ID NO: 5599 - protein, 5 aa, Artificial Sequence
  Synthetic
VANDA

SEQ ID NO: 5600 - protein, 5 aa, Artificial Sequence
  Synthetic
VVTCR

SEQ ID NO: 5601 - protein, 5 aa, Artificial Sequence
  Synthetic
TVFNV

SEQ ID NO: 5602 - protein, 5 aa, Artificial Sequence
  Synthetic
WWHDS

SEQ ID NO: 5603 - protein, 5 aa, Artificial Sequence
  Synthetic
RTWVR

SEQ ID NO: 5604 - protein, 5 aa, Artificial Sequence
  Synthetic
RCARY

SEQ ID NO: 5605 - protein, 5 aa, Artificial Sequence
  Synthetic
SSLSS

SEQ ID NO: 5606 - protein, 5 aa, Artificial Sequence
  Synthetic
STAVY

SEQ ID NO: 5607 - protein, 5 aa, Artificial Sequence
  Synthetic
FVFTG

SEQ ID NO: 5608 - protein, 5 aa, Artificial Sequence
  Synthetic
ATCWG

SEQ ID NO: 5609 - protein, 4 aa, Artificial Sequence
  Synthetic
SSWR

SEQ ID NO: 5610 - protein, 5 aa, Artificial Sequence
  Synthetic
FLWMR

SEQ ID NO: 5611 - protein, 5 aa, Artificial Sequence
  Synthetic
WFTGR

SEQ ID NO: 5612 - protein, 5 aa, Artificial Sequence
  Synthetic
TWFHR

SEQ ID NO: 5613 - protein, 5 aa, Artificial Sequence
  Synthetic
WYDLG

SEQ ID NO: 5614 - protein, 5 aa, Artificial Sequence
  Synthetic
TLSST

SEQ ID NO: 5615 - protein, 5 aa, Artificial Sequence
  Synthetic
TRATW

SEQ ID NO: 5616 - protein, 5 aa, Artificial Sequence
  Synthetic
FTVED

SEQ ID NO: 5617 - protein, 5 aa, Artificial Sequence
  Synthetic
WWHLT

SEQ ID NO: 5618 - protein, 5 aa, Artificial Sequence
  Synthetic
PRGHW

SEQ ID NO: 5619 - protein, 5 aa, Artificial Sequence
  Synthetic
ICHDR

SEQ ID NO: 5620 - protein, 5 aa, Artificial Sequence
  Synthetic
SMCRV

SEQ ID NO: 5621 - protein, 5 aa, Artificial Sequence
  Synthetic
PMGVL

SEQ ID NO: 5622 - protein, 5 aa, Artificial Sequence
  Synthetic
SVFSG

SEQ ID NO: 5623 - protein, 5 aa, Artificial Sequence
  Synthetic
SLCCS

SEQ ID NO: 5624 - protein, 5 aa, Artificial Sequence
  Synthetic
CLRSA

SEQ ID NO: 5625 - protein, 5 aa, Artificial Sequence
  Synthetic
VVFTV

SEQ ID NO: 5626 - protein, 5 aa, Artificial Sequence
  Synthetic
SLFAQ

SEQ ID NO: 5627 - protein, 5 aa, Artificial Sequence
  Synthetic
LRYGG

SEQ ID NO: 5628 - protein, 5 aa, Artificial Sequence
  Synthetic
CVFAV

SEQ ID NO: 5629 - protein, 5 aa, Artificial Sequence
  Synthetic
KFGVL

SEQ ID NO: 5630 - protein, 5 aa, Artificial Sequence
  Synthetic
RTWRR

SEQ ID NO: 5631 - protein, 5 aa, Artificial Sequence
  Synthetic
VVFSR

SEQ ID NO: 5632 - protein, 5 aa, Artificial Sequence
  Synthetic
LTWTV

SEQ ID NO: 5633 - protein, 5 aa, Artificial Sequence
  Synthetic
TFGLL

SEQ ID NO: 5634 - protein, 5 aa, Artificial Sequence
  Synthetic
SFAAW

SEQ ID NO: 5635 - protein, 5 aa, Artificial Sequence
  Synthetic
WWNWS

SEQ ID NO: 5636 - protein, 5 aa, Artificial Sequence
  Synthetic
YAAAF

SEQ ID NO: 5637 - protein, 5 aa, Artificial Sequence
  Synthetic
LVVNR

SEQ ID NO: 5638 - protein, 5 aa, Artificial Sequence
  Synthetic
FRCMY

SEQ ID NO: 5639 - protein, 5 aa, Artificial Sequence
  Synthetic
MWGIF

SEQ ID NO: 5640 - protein, 5 aa, Artificial Sequence
  Synthetic
WFESR

SEQ ID NO: 5641 - protein, 5 aa, Artificial Sequence
  Synthetic
TLLLR

SEQ ID NO: 5642 - protein, 5 aa, Artificial Sequence
  Synthetic
PVAGR

SEQ ID NO: 5643 - protein, 5 aa, Artificial Sequence
  Synthetic
RGGLY

SEQ ID NO: 5644 - protein, 5 aa, Artificial Sequence
  Synthetic
RGRSY

SEQ ID NO: 5645 - protein, 5 aa, Artificial Sequence
  Synthetic
GHGSV

SEQ ID NO: 5646 - protein, 5 aa, Artificial Sequence
  Synthetic
PLGLF

SEQ ID NO: 5647 - protein, 5 aa, Artificial Sequence
  Synthetic
HVFVR

SEQ ID NO: 5648 - protein, 5 aa, Artificial Sequence
  Synthetic
ASYRY

SEQ ID NO: 5649 - protein, 5 aa, Artificial Sequence
  Synthetic
ATLRG

SEQ ID NO: 5650 - protein, 5 aa, Artificial Sequence
  Synthetic
ETWMH

SEQ ID NO: 5651 - protein, 5 aa, Artificial Sequence
  Synthetic
CNART

SEQ ID NO: 5652 - protein, 5 aa, Artificial Sequence
  Synthetic
GCHLV

SEQ ID NO: 5653 - protein, 5 aa, Artificial Sequence
  Synthetic
ANYMN

SEQ ID NO: 5654 - protein, 5 aa, Artificial Sequence
  Synthetic
ANLNR

SEQ ID NO: 5655 - protein, 5 aa, Artificial Sequence
  Synthetic
TPWVM

SEQ ID NO: 5656 - protein, 5 aa, Artificial Sequence
  Synthetic
YPGCH

SEQ ID NO: 5657 - protein, 5 aa, Artificial Sequence
  Synthetic
PGFNL

SEQ ID NO: 5658 - protein, 5 aa, Artificial Sequence
  Synthetic
YFLQH

SEQ ID NO: 5659 - protein, 5 aa, Artificial Sequence
  Synthetic
CGVPF

SEQ ID NO: 5660 - protein, 5 aa, Artificial Sequence
  Synthetic
LIFIM

SEQ ID NO: 5661 - protein, 5 aa, Artificial Sequence
  Synthetic
GTGYE

SEQ ID NO: 5662 - protein, 5 aa, Artificial Sequence
  Synthetic
FHTCG

SEQ ID NO: 5663 - protein, 5 aa, Artificial Sequence
  Synthetic
GYAIS

SEQ ID NO: 5664 - protein, 5 aa, Artificial Sequence
  Synthetic
DVVSF

SEQ ID NO: 5665 - protein, 5 aa, Artificial Sequence
  Synthetic
CQSVR

SEQ ID NO: 5666 - protein, 5 aa, Artificial Sequence
  Synthetic
AYGCV

SEQ ID NO: 5667 - protein, 5 aa, Artificial Sequence
  Synthetic
SGLVW

SEQ ID NO: 5668 - protein, 5 aa, Artificial Sequence
  Synthetic
YSNLH

SEQ ID NO: 5669 - protein, 5 aa, Artificial Sequence
  Synthetic
LRAPT

SEQ ID NO: 5670 - protein, 5 aa, Artificial Sequence
  Synthetic
NNLNS

SEQ ID NO: 5671 - protein, 5 aa, Artificial Sequence
  Synthetic
CCGEP

SEQ ID NO: 5672 - protein, 5 aa, Artificial Sequence
  Synthetic
GDGFD

SEQ ID NO: 5673 - protein, 5 aa, Artificial Sequence
  Synthetic
GNVPN

SEQ ID NO: 5674 - protein, 5 aa, Artificial Sequence
  Synthetic
ELSRW

SEQ ID NO: 5675 - protein, 5 aa, Artificial Sequence
  Synthetic
RAAPS

SEQ ID NO: 5676 - protein, 5 aa, Artificial Sequence
  Synthetic
IGGCL

SEQ ID NO: 5677 - protein, 5 aa, Artificial Sequence
  Synthetic
VRDWS

SEQ ID NO: 5678 - protein, 5 aa, Artificial Sequence
  Synthetic
GWSSS

SEQ ID NO: 5679 - protein, 5 aa, Artificial Sequence
  Synthetic
SVHCC

SEQ ID NO: 5680 - protein, 5 aa, Artificial Sequence
  Synthetic
CCFCS

SEQ ID NO: 5681 - protein, 5 aa, Artificial Sequence
  Synthetic
IFQNR

SEQ ID NO: 5682 - protein, 5 aa, Artificial Sequence
  Synthetic
LLSSS

SEQ ID NO: 5683 - protein, 5 aa, Artificial Sequence
  Synthetic
SYSLR

SEQ ID NO: 5684 - protein, 5 aa, Artificial Sequence
  Synthetic
PMGVA

SEQ ID NO: 5685 - protein, 5 aa, Artificial Sequence
  Synthetic
IITSG

SEQ ID NO: 5686 - protein, 5 aa, Artificial Sequence
  Synthetic
MHAQS

SEQ ID NO: 5687 - protein, 5 aa, Artificial Sequence
  Synthetic
ANQPR

SEQ ID NO: 5688 - protein, 5 aa, Artificial Sequence
  Synthetic
YAVRF

SEQ ID NO: 5689 - protein, 5 aa, Artificial Sequence
  Synthetic
VPGQR

SEQ ID NO: 5690 - protein, 5 aa, Artificial Sequence
  Synthetic
QYGRI

SEQ ID NO: 5691 - protein, 5 aa, Artificial Sequence
  Synthetic
NIRRG

SEQ ID NO: 5692 - protein, 5 aa, Artificial Sequence
  Synthetic
VGAGW

SEQ ID NO: 5693 - protein, 5 aa, Artificial Sequence
  Synthetic
MFSDI

SEQ ID NO: 5694 - protein, 4 aa, Artificial Sequence
  Synthetic
NWLH

SEQ ID NO: 5695 - protein, 5 aa, Artificial Sequence
  Synthetic
YFRHS

SEQ ID NO: 5696 - protein, 5 aa, Artificial Sequence
  Synthetic
RSPQV

SEQ ID NO: 5697 - protein, 5 aa, Artificial Sequence
  Synthetic
DFCTG

SEQ ID NO: 5698 - protein, 5 aa, Artificial Sequence
  Synthetic
VYYVA

SEQ ID NO: 5699 - protein, 9 aa, Artificial Sequence
  Synthetic
HMKLWSNSM

SEQ ID NO: 5700 - protein, 13 aa, Artificial Sequence
  Synthetic
SHSTDLYWRGHPG

SEQ ID NO: 5701 - protein, 10 aa, Artificial Sequence
  Synthetic
TTCKICYGYQ

SEQ ID NO: 5702 - protein, 6 aa, Artificial Sequence
  Synthetic
TTLYFR

SEQ ID NO: 5703 - protein, 6 aa, Artificial Sequence
  Synthetic
NHSMMF

SEQ ID NO: 5704 - protein, 6 aa, Artificial Sequence
  Synthetic
SRYVSY

SEQ ID NO: 5705 - protein, 6 aa, Artificial Sequence
  Synthetic
TDLRFV

SEQ ID NO: 5706 - protein, 6 aa, Artificial Sequence
  Synthetic
TDLRFK

SEQ ID NO: 5707 - protein, 6 aa, Artificial Sequence
  Synthetic
SNCVLL

SEQ ID NO: 5708 - protein, 6 aa, Artificial Sequence
  Synthetic
TNCYFV

SEQ ID NO: 5709 - protein, 10 aa, Artificial Sequence
  Synthetic
CATFSTCVWL

SEQ ID NO: 5710 - protein, 6 aa, Artificial Sequence
  Synthetic
TSQWFC

SEQ ID NO: 5711 - protein, 10 aa, Artificial Sequence
  Synthetic
TTIYGSCFCQ

SEQ ID NO: 5712 - protein, 10 aa, Artificial Sequence
  Synthetic
IDTATGAIFR

SEQ ID NO: 5713 - protein, 13 aa, Artificial Sequence
  Synthetic
FRRKYQEFGAGSV

SEQ ID NO: 5714 - protein, 8 aa, Artificial Sequence
  Synthetic
RPLSPNLH

SEQ ID NO: 5715 - protein, 6 aa, Artificial Sequence
  Synthetic
SSDKFV

SEQ ID NO: 5716 - protein, 6 aa, Artificial Sequence
  Synthetic
NNEYMW

SEQ ID NO: 5717 - protein, 9 aa, Artificial Sequence
  Synthetic
RRYCRYAVV

SEQ ID NO: 5718 - protein, 13 aa, Artificial Sequence
  Synthetic
RFRSHNVYCMDLV

SEQ ID NO: 5719 - protein, 6 aa, Artificial Sequence
  Synthetic
SDQFMT

SEQ ID NO: 5720 - protein, 6 aa, Artificial Sequence
  Synthetic
TKSSAL

SEQ ID NO: 5721 - protein, 6 aa, Artificial Sequence
  Synthetic
TTCTFE

SEQ ID NO: 5722 - protein, 6 aa, Artificial Sequence
  Synthetic
ITVVIA

SEQ ID NO: 5723 - protein, 13 aa, Artificial Sequence
  Synthetic
SNLQLCLTWLDIM

SEQ ID NO: 5724 - protein, 6 aa, Artificial Sequence
  Synthetic
TSELMV

SEQ ID NO: 5725 - protein, 10 aa, Artificial Sequence
  Synthetic
LAPCSMGWVM

SEQ ID NO: 5726 - protein, 6 aa, Artificial Sequence
  Synthetic
TSDRFA

SEQ ID NO: 5727 - protein, 10 aa, Artificial Sequence
  Synthetic
DVHGYYVFPN

SEQ ID NO: 5728 - protein, 6 aa, Artificial Sequence
  Synthetic
TSLEMC

SEQ ID NO: 5729 - protein, 13 aa, Artificial Sequence
  Synthetic
VYVPSHFNAWSWK

SEQ ID NO: 5730 - protein, 4 aa, Artificial Sequence
  Synthetic
GVLT

SEQ ID NO: 5731 - protein, 6 aa, Artificial Sequence
  Synthetic
DSVLWL

SEQ ID NO: 5732 - protein, 13 aa, Artificial Sequence
  Synthetic
HTFRAFGSWVSAS

SEQ ID NO: 5733 - protein, 10 aa, Artificial Sequence
  Synthetic
ASNDYDAISI

SEQ ID NO: 5734 - protein, 6 aa, Artificial Sequence
  Synthetic
FNSCVE

SEQ ID NO: 5735 - protein, 6 aa, Artificial Sequence
  Synthetic
YTMRFY

SEQ ID NO: 5736 - protein, 9 aa, Artificial Sequence
  Synthetic
LTHPFGEDV

SEQ ID NO: 5737 - protein, 10 aa, Artificial Sequence
  Synthetic
LVGSLTGGLN

SEQ ID NO: 5738 - protein, 9 aa, Artificial Sequence
  Synthetic
LPAPIKMVD

SEQ ID NO: 5739 - protein, 10 aa, Artificial Sequence
  Synthetic
IPFWPFFSTC

SEQ ID NO: 5740 - protein, 6 aa, Artificial Sequence
  Synthetic
TNLYMS

SEQ ID NO: 5741 - protein, 6 aa, Artificial Sequence
  Synthetic
GDDYFR

SEQ ID NO: 5742 - protein, 6 aa, Artificial Sequence
  Synthetic
YTCTGY

SEQ ID NO: 5743 - protein, 6 aa, Artificial Sequence
  Synthetic
CTLRMT

SEQ ID NO: 5744 - protein, 10 aa, Artificial Sequence
  Synthetic
GTSAPWSLLV

SEQ ID NO: 5745 - protein, 6 aa, Artificial Sequence
  Synthetic
TTIEFC

SEQ ID NO: 5746 - protein, 6 aa, Artificial Sequence
  Synthetic
TNLCCN

SEQ ID NO: 5747 - protein, 13 aa, Artificial Sequence
  Synthetic
TTEPCLEIGSGFL

SEQ ID NO: 5748 - protein, 13 aa, Artificial Sequence
  Synthetic
ELATHTVDLFGFG

SEQ ID NO: 5749 - protein, 6 aa, Artificial Sequence
  Synthetic
QYGPVM

SEQ ID NO: 5750 - protein, 11 aa, Artificial Sequence
  Synthetic
TNPTATDGVFG

SEQ ID NO: 5751 - protein, 9 aa, Artificial Sequence
  Synthetic
DDSNCVYAS

SEQ ID NO: 5752 - protein, 6 aa, Artificial Sequence
  Synthetic
HINRWI

SEQ ID NO: 5753 - protein, 13 aa, Artificial Sequence
  Synthetic
SWARQHDPSCQYA

SEQ ID NO: 5754 - protein, 6 aa, Artificial Sequence
  Synthetic
TSNFFV

SEQ ID NO: 5755 - protein, 6 aa, Artificial Sequence
  Synthetic
INMHGG

SEQ ID NO: 5756 - protein, 9 aa, Artificial Sequence
  Synthetic
NGITATCFC

SEQ ID NO: 5757 - protein, 6 aa, Artificial Sequence
  Synthetic
NYLSLC

SEQ ID NO: 5758 - protein, 6 aa, Artificial Sequence
  Synthetic
HTSELS

SEQ ID NO: 5759 - protein, 13 aa, Artificial Sequence
  Synthetic
TLTRWYFYDSDSF

SEQ ID NO: 5760 - protein, 6 aa, Artificial Sequence
  Synthetic
TDVYFR

SEQ ID NO: 5761 - protein, 9 aa, Artificial Sequence
  Synthetic
LTSPLSDSS

SEQ ID NO: 5762 - protein, 13 aa, Artificial Sequence
  Synthetic
LIPAESGLVPLVD

SEQ ID NO: 5763 - protein, 9 aa, Artificial Sequence
  Synthetic
MRCPPHFFV

SEQ ID NO: 5764 - protein, 4 aa, Artificial Sequence
  Synthetic
AHLV

SEQ ID NO: 5765 - protein, 6 aa, Artificial Sequence
  Synthetic
YLIRHA

SEQ ID NO: 5766 - protein, 10 aa, Artificial Sequence
  Synthetic
SHYTALVCNV

SEQ ID NO: 5767 - protein, 6 aa, Artificial Sequence
  Synthetic
LNMPRD

SEQ ID NO: 5768 - protein, 10 aa, Artificial Sequence
  Synthetic
MCCAATFWDP

SEQ ID NO: 5769 - protein, 13 aa, Artificial Sequence
  Synthetic
LLSRPKRCFVMVM

SEQ ID NO: 5770 - protein, 4 aa, Artificial Sequence
  Synthetic
NHTL

SEQ ID NO: 5771 - protein, 10 aa, Artificial Sequence
  Synthetic
TPSQVASNFY

SEQ ID NO: 5772 - protein, 6 aa, Artificial Sequence
  Synthetic
HYSDDP

SEQ ID NO: 5773 - protein, 6 aa, Artificial Sequence
  Synthetic
TDDFFN

SEQ ID NO: 5774 - protein, 6 aa, Artificial Sequence
  Synthetic
YLMVTG

SEQ ID NO: 5775 - protein, 6 aa, Artificial Sequence
  Synthetic
WPILSA

SEQ ID NO: 5776 - protein, 6 aa, Artificial Sequence
  Synthetic
TIYGVY

SEQ ID NO: 5777 - protein, 6 aa, Artificial Sequence
  Synthetic
MTSEVT

SEQ ID NO: 5778 - protein, 6 aa, Artificial Sequence
  Synthetic
IINCLI

SEQ ID NO: 5779 - protein, 6 aa, Artificial Sequence
  Synthetic
PSEVFE

SEQ ID NO: 5780 - protein, 6 aa, Artificial Sequence
  Synthetic
FLSAIE

SEQ ID NO: 5781 - protein, 6 aa, Artificial Sequence
  Synthetic
QINPML

SEQ ID NO: 5782 - protein, 6 aa, Artificial Sequence
  Synthetic
FQSSNL

SEQ ID NO: 5783 - protein, 6 aa, Artificial Sequence
  Synthetic
RINCDL

SEQ ID NO: 5784 - protein, 9 aa, Artificial Sequence
  Synthetic
PLIIQGCCY

SEQ ID NO: 5785 - protein, 10 aa, Artificial Sequence
  Synthetic
NPFLGRFAGT

SEQ ID NO: 5786 - protein, 9 aa, Artificial Sequence
  Synthetic
SGMAWIYPI

SEQ ID NO: 5787 - protein, 6 aa, Artificial Sequence
  Synthetic
QPSCYQ

SEQ ID NO: 5788 - protein, 6 aa, Artificial Sequence
  Synthetic
PCTISG

SEQ ID NO: 5789 - protein, 10 aa, Artificial Sequence
  Synthetic
DTMPNYIYPM

SEQ ID NO: 5790 - protein, 9 aa, Artificial Sequence
  Synthetic
QRSVFGSSG

SEQ ID NO: 5791 - protein, 6 aa, Artificial Sequence
  Synthetic
FASVLK

SEQ ID NO: 5792 - protein, 9 aa, Artificial Sequence
  Synthetic
SYLGYIFPE

SEQ ID NO: 5793 - protein, 6 aa, Artificial Sequence
  Synthetic
NAHQYF

SEQ ID NO: 5794 - protein, 5 aa, Artificial Sequence
  Synthetic
YHGPG

SEQ ID NO: 5795 - protein, 6 aa, Artificial Sequence
  Synthetic
IINCTK

SEQ ID NO: 5796 - protein, 6 aa, Artificial Sequence
  Synthetic
FASSCC

SEQ ID NO: 5797 - protein, 13 aa, Artificial Sequence
  Synthetic
RMRTPCLMLSGIS

SEQ ID NO: 5798 - protein, 6 aa, Artificial Sequence
  Synthetic
YIQGAC

SEQ ID NO: 5799 - protein, 6 aa, Artificial Sequence
  Synthetic
SYLNSW

SEQ ID NO: 5800 - protein, 10 aa, Artificial Sequence
  Synthetic
NHTDHYIFPS

SEQ ID NO: 5801 - protein, 10 aa, Artificial Sequence
  Synthetic
GPDILSFYGC

SEQ ID NO: 5802 - protein, 6 aa, Artificial Sequence
  Synthetic
WPDCCN

SEQ ID NO: 5803 - protein, 9 aa, Artificial Sequence
  Synthetic
SGLSFGAVR

SEQ ID NO: 5804 - protein, 10 aa, Artificial Sequence
  Synthetic
PDLVIYLMPN

SEQ ID NO: 5805 - protein, 6 aa, Artificial Sequence
  Synthetic
WITCES

SEQ ID NO: 5806 - protein, 6 aa, Artificial Sequence
  Synthetic
TFSTRY

SEQ ID NO: 5807 - protein, 10 aa, Artificial Sequence
  Synthetic
YGSTMTGCHC

SEQ ID NO: 5808 - protein, 6 aa, Artificial Sequence
  Synthetic
ALLVRE

SEQ ID NO: 5809 - protein, 6 aa, Artificial Sequence
  Synthetic
WPDCIV

SEQ ID NO: 5810 - protein, 6 aa, Artificial Sequence
  Synthetic
FLSCDA

SEQ ID NO: 5811 - protein, 120 aa, Artificial Sequence; identical to SEQ ID NO: 14
  Synthetic

SEQ ID NO: 5812 - protein, 120 aa, Artificial Sequence
  Synthetic
EVRLVESGGGLVLAGDSLRLSCAASGKTGRSVIMGWFRQAPDKEREFVATITRGDDTTNYADSVKGRFTISRDDARNTVYLQMNSLKPEDTAVYYCAAVYFVNDCIVDYWGQGTQVTVSS

SEQ ID NO: 5813 - protein, 120 aa, Artificial Sequence; identical to SEQ ID NO: 199
  Synthetic

SEQ ID NO: 5814 - protein, 120 aa, Artificial Sequence
  Synthetic
EVQLVESGGGLVQAGDSLRLSCAASGAFSSNVFMGWFRQAPGKEREFVASITPHHAVTDYADSVRGRFSISADSAKNTVYLQMNSLKPEDTAVYYCAAAIYRNATVLDYWGQGTQVTVSS

SEQ ID NO: 5815 - protein, 120 aa, Artificial Sequence
  Synthetic
EVQLVESGGGLVQAGDSLRLSCAASGAFSSNVFMGWFRQAPGKEREFVASITPHHAVTDYADSVRGRFSISADSAKNTVYLQMNSLKPEDTAVYYCAAAIYCNATVLDYWGQGTQVTVSS

SEQ ID NO: 5816 - protein, 120 aa, Artificial Sequence
  Synthetic
QVQLVESGGGLVQAGDSLRLSCAASGAFGSNVFMGWFRLAPGKEREFVASITPHHTVTDYADSVRGRFSISADTAKNTVYLQMNSLKPEDTAVYYCAAAIYRNASVLDYWGQGTQVTVSS

SEQ ID NO: 5817 - protein, 120 aa, Artificial Sequence
  Synthetic
QVQLVESGGGLVQAGDSLRLSCAASGAFSSNVFMGWFRQAPGKEREFVASITPHHAVTDYADSVRGRFSISADTAKNTVYLQMNSLKPEDTAVYYCAAAIYRNATVLDYWGQGTQVTVSS

SEQ ID NO: 5818 - protein, 120 aa, Artificial Sequence
  Synthetic
QVQLVESGGGLVQAGDSLRLSCAATGAFSSNVFMGWFRLAPGKEREFVASITPHHAVTDYADSVRGRFSISADTAKNTVYLQMNALKPEDTAVYYCAAAIYCNATVLDYWGQGTQVTVSS

SEQ ID NO: 5819 - protein, 121 aa, Artificial Sequence; identical to SEQ ID NO: 409
  Synthetic

SEQ ID NO: 5820 - protein, 121 aa, Artificial Sequence
  Synthetic
EVQLVESGGGLVQAGDSLRLSCAASGFQLSCYCMGWFRQAPGKEREFVASITQHAFRTYYADSVKGRFTISRDDARNTVYLQMNSLKPEDTAVYYCAAAETPNILVHENYWGQGTQVTVSS

SEQ ID NO: 5821 - protein, 121 aa, Artificial Sequence
  Synthetic
EVQLVVSGRGLVQAGDSLRLSCAASGFQLSCYCVGWFRQAPGKEREFVASITQHAFRTYYADSVKGRFTISRDDARNTVYLQMNSLKPEDTAVYYCAAAETPNILVYENYWGQGTQVTVSS

SEQ ID NO: 5822 - protein, 121 aa, Artificial Sequence
  Synthetic
EVQLVVSGRGLVQAGDSLRLSCAASGFQLSCYCVGWFRQAPGKEREFVASITQHAFRTYYADSVKGRFTISRDDARNTVYLQMNSLKPEDTAVYYCAAAETPNILVHENYWGQGTQVTVSS

SEQ ID NO: 5823 - protein, 121 aa, Artificial Sequence
  Synthetic
EVQLVVSGRVLVQAGDSLRLSCAASGFQLSCYCVGWFRQAPGKEREFVASITQHAFRTYYADSVKGRFTISRDDARNTVYLQMNSLKPEDTAVYYCAAAETPNILVHENYWGQGTQVTVSS

SEQ ID NO: 5824 - protein, 121 aa, Artificial Sequence
  Synthetic
EVQLVVSGRVLVQAGDSLRLSCAASGFQLSCYCVGWFRQAPGKEREFVASITQHAFRTYYADSVKGRFTISRDDARNTVYLQMNSLKPEDTAVYYCAAAETPNILVHESYWGQGTQVTVSS

SEQ ID NO: 5825 - protein, 121 aa, Artificial Sequence
  Synthetic
KVQLVVSGRVLVQAGDSLRLSCAATGFQLSCYCVGWFRQAPGKELEFVASITQHAFRTYYADSVKGRFTISRDDARNTVYLQMNSLKPEDTAVYYCAAAETPNILVHESYWGQGTQVTVSS

SEQ ID NO: 5826 - protein, 121 aa, Artificial Sequence
  Synthetic
KVQLVVTGRVLVQAGDSLRLSCVATGFQLSCYCVGWFRQAPGKELEFVASITQHAFRTYYADSVKGRFTISRDDAQNTVYLQMNSLEPEDTAVYYCAAAETPNILVHESYWGQGTQVTVSS

SEQ ID NO: 5827 - protein, 115 aa, Artificial Sequence; identical to SEQ ID NO: 694
  Synthetic

SEQ ID NO: 5828 - protein, 115 aa, Artificial Sequence
  Synthetic
EVQLVESGGGLVQAGDSLRLSCAASGDCHVLWRMGWFRQAPGKEREFVAAISLDGQFTNYADSVRGRFSISADSAKNTVYLQMNSLKPEDTAVYYCAALPFLDYWGQGTQVTVSS

SEQ ID NO: 5829 - protein, 115 aa, Artificial Sequence
  Synthetic
QVQLVVSGGGLVQAGDSLRLSCAASGDCHVLWRMGWFRQAPGKEREFVAAISLDGLFTNYADSVRGRFSISADSAENTVYLQMNSLKPEDTAVYYCAAMPFFDYWGQGTQVTVSS

SEQ ID NO: 5830 - protein, 115 aa, Artificial Sequence
  Synthetic
QVQLVESGGGLVQAGDSLRLSCAASGDCHVLWRMGWFRQAPGKEREFVAAISLDGQFTNYADSVRGRFSISADSAKNTVYLQMNSLKPEDTAVYYCAALPFLDYWGQGTQVTVSS

SEQ ID NO: 5831 - protein, 115 aa, Artificial Sequence
  Synthetic
QVQLVVSGGGLVQAGDSLRLSCAASGDCHVLWRMGWFRQAPGKEREFVAAISLDGQFTNYADSVRGRFSISADSAKNTVYLQMNSLKPEDTAVYYCAALPFLDYWGQGTQVTVSS

SEQ ID NO: 5832 - protein, 115 aa, Artificial Sequence
  Synthetic
QVQLVVSGGGLVQAGDSLRLSCAASGDCHVLWRMGWFRQAPGKEREFVAAISLDGQFTNYADSVRGRFSISADSAENTVYLQMNSLKPEDTAVYYCAALPFLDYWGQGTQVTVSS

SEQ ID NO: 5833 - protein, 115 aa, Artificial Sequence
  Synthetic
QVQLVVSGGGLVQAGDSLRLSCTASGDCHVLWRMGWFRQAPGKELEFVAAISLDGQFANYADSVRGRFSISADSAENTVYLQMNSLKPEDTAVYYCAALPFLDYWGQGTQVTVSS

SEQ ID NO: 5834 - protein, 115 aa, Artificial Sequence
  Synthetic
QVQLVVSGGGLVRAGDSLRLSCTASGDCHVLWRMGWFRQASGKELEFVAAISLDGQFANYADSVRGRFSISADSAENTVYLQMNSLEPEDTAVYYCAALPFLDYWGQGTQVTVSS

SEQ ID NO: 5835 - protein, 121 aa, Artificial Sequence; identical to SEQ ID NO: 1429
  Synthetic

SEQ ID NO: 5836 - protein, 121 aa, Artificial Sequence
  Synthetic
EVQLVESGGGLVQAGDSLRLSCAASGDYCMDCFMGWFRQAPGKEREFVAAITPYGFKTYYADSVKGRFTISRDDARNTVYLQMNSLKPEDTAVYYCAANPLDPNWTHSDYWGQGTQVTVSS

SEQ ID NO: 5837 - protein, 121 aa, Artificial Sequence
  Synthetic
EVQLVESGGGLVQAGDSLRLSCAASGDYCMDCFMGWFRQAPGKEREFVAAITPYGFKTYYADSVKGRFTFSRDDARNTVYLQMNSLRPEDTAVYYCAANPLDPNWTHSDYRGQGTQVTVSS

SEQ ID NO: 5838 - protein, 120 aa, Artificial Sequence; identical to SEQ ID NO: 2044
  Synthetic

SEQ ID NO: 5839 - protein, 120 aa, Artificial Sequence
  Synthetic
EVQLVESGGGLVQAGDSLRLSCAASGAIVHVFAMGWFRQAPGKEREFVASINLDNDVTNYADSVKGRFTISRDDARNTVYLQMNSLKPEDTAVYYCNATIFTDSGLGDYWGQGTQVTVSS

SEQ ID NO: 5840 - protein, 120 aa, Artificial Sequence
  Synthetic
EVQLVESGGGLVQAGDSLRLSCAASGAIVHVFAMGWFRQAPGKEREFVASINLDNDVTNYADSVKGRFTISRDDARNTVYLQMNSLKPEDTAVYYCNATILTVSGLGDYWGQGTQVTVSS

SEQ ID NO: 5841 - protein, 120 aa, Artificial Sequence
  Synthetic
QVQLVVSGGGLVQAGDSLRLSCAASGAIVHVFAMGWFRQAPGKEREFVASINLDNDATNYADSVKGRFTISRDDARNTVYLQMNSLKPEDTAVYYCNATIFMDSDLGDYWGRGTQVTVSS

SEQ ID NO: 5842 - protein, 120 aa, Artificial Sequence
  Synthetic
QVQLVVSGGGLVQAGDSLRLSCAASGAIVHVFAMGWFRQAPGKEREFVASINLDNDVTNYADSVKGRFTISRDDARNTVYLQMNSLKPEDTAVYYCNATIFTDSGLGDYWGRGTQVTVSS

SEQ ID NO: 5843 - protein, 120 aa, Artificial Sequence
  Synthetic
QVQLVVSGRGLVQAGDSLRLSCVASGAIVHVFAMGWFRQAPGEEREFVASINLDNDATIYADSVKGRFTISRGDARNTVYLQMNSLKPEDTAVYYCNATIFTDSDLGDYWGRGTQVTVSS

SEQ ID NO: 5844 - protein, 121 aa, Artificial Sequence
  Synthetic
EVQLVESGGGLVQAGDSLRLSCAASGIGERCLFMGWFRQAPGKEREFVAAITAFSFRTYYADSVKGRFTISRDDARNTVYLQMNSLKPEDTAVYYCAALDTAALFPEFDYWGQGTQVTVSS

SEQ ID NO: 5845 - protein, 123 aa, Artificial Sequence
  Synthetic
EVQLVESGGGLVQAGDSLRLSCAASTFKLPCLMGWFRQTPGKEREFVAAISDHGGRTDYADSVKGRFTISRDDARNTVYLQMNSLKPEDTAVYYCNAVFIVKYEEELLVEAYWGQGTQVTVSS

SEQ ID NO: 5846 - protein, 121 aa, Artificial Sequence
  Synthetic
QVQLQESGGGLVQVGGSLRLSCTASGIWMGTRVMGWFRQAPGKEREFVATINGCYGTTDYADSVKGRFTISRDDARNTVYLQMNSLKPEDTAVYYCAALTRPPFDPLWDYWGQGTQVTVSS

SEQ ID NO: 5847 - protein, 117 aa, Artificial Sequence
  Synthetic
EVQLVESGGGLVQAGDSLRLSCAASGIMIGTQSMGWFRQAPGKEREFVASITANEMFTYYADSVRGRFSISADSAKNIVYLQMNSLKPEDTAVYYCAAITAMGWDYWGQGTQVTVSS

SEQ ID NO: 5848 - protein, 121 aa, Artificial Sequence
  Synthetic
EVQLVESGGGLVQAGDSLRLSCAASGALCRRVYMGWFRQAPGKEREFVAAITCAGWRTDYADSVKGRFTISRDDARNTVYLQMNSLKPEDTAVYYCNAAVFASDGNVVGYWGQGTQVTVSS

SEQ ID NO: 5849 - protein, 121 aa, Artificial Sequence
  Synthetic
EVQLVESGGGLVQAGDSLRLSCAASGLCLSVLAMGWFRQAPGKEREFVAAINGSAAATYYADSVKGRFTISRDDARNTVYLQMNSLKPEDTAVYYCNAWLLTYSHDVMDYWGQGTQVTVSS

SEQ ID NO: 5850 - protein, 121 aa, Artificial Sequence
  Synthetic
QVQLQESGGGLVQAGDSLRLSCAASGRARGKVFMGWFRQAPGKEREFVASISCSGVDTNYADSVRGRFSISADSAKNTVYLQMNSLKPEDTAVYYCAAIFYDRTDRLSEYWGQGTQVTVSS

SEQ ID NO: 5851 - protein, 120 aa, Artificial Sequence
  Synthetic
EVQLVESGGGLVQAGDSLRLSCAASGTVIPYSMGWYRQAPGKEREFVAAINCMFLHTYYADSVKGRFTISRDDARNTVYLQMNSLKPEDTAVYYCNAPVPIPEESITDYWGQGTQVTVSS

SEQ ID NO: 5852 - protein, 121 aa, Artificial Sequence
  Synthetic
EVQLVESGGGLVQAGDSLRLSCAASGSCIRWLSMGWFRQAPGKEREFVASITEYVKFTDYADSVRGRFSISADSAKNTVYLQMNSLKPEDTAVYYCAALENPHIASKYDYWGQGTQVTVSS

SEQ ID NO: 5853 - protein, 121 aa, Artificial Sequence
  Synthetic
EVQLVESGGGLVQAGDSLRLSCAASGIYLEAYGMGWFRQAPGKEREFVASISLYSFRTYYADSVKGRFTISRDDARNTVYLQMNSLKPEDTAVYYCAALQPTPSGWREAYWGQGTQVTVSS

SEQ ID NO: 5854 - protein, 120 aa, Artificial Sequence
  Synthetic
EVQLVESGGGLVQAGDSLRLSCAASGRLMNEVFMGWFRQAPGKEREFVASINRSAGTTDYADSVKGRFTISRDNAKNTVYLQMNSLKPEDTAVYYCAAAFYISFMVYDYWGQGTQVTVSS

SEQ ID NO: 5855 - protein, 119 aa, Artificial Sequence
  Synthetic
EVQLVESGGGLVQAGDSLRLSCAASGLESLCGMGWFRQAPGKEREFVASISVGAIRTYYADSVRGRFSISADSAKNTVYLQMNSLKPEDTAVYYCAAWNYDCLGISDYWGQGTQVTVSS

SEQ ID NO: 5856 - protein, 121 aa, Artificial Sequence
  Synthetic
EVQLVESGGGLVQAGDSLRLSCAASGGLHLALTMGWFRQAPGKEREFVASISQVLKVTNYADSVKGRFTISRDDARNTVYLQMNSLKPEDTAVYYCAAQILSHFDIVSGYWGQGTQVTVSS

SEQ ID NO: 5857 - protein, 120 aa, Artificial Sequence
  Synthetic
EVHLVESGGGLVQAGDSLRLSCAASGHARCSVIMGWFRQAPGKEREFVASINLAESVTYYADSVKGRFTISRDNAKNTVYLQMNSLKPEDTAVYYCAAVLPAMRLRYDYWGQGTQVTVSS

SEQ ID NO: 5858 - protein, 120 aa, Artificial Sequence
  Synthetic
EVQLVESGGGLVQAGDSLRLSCAASGRADIYWMMGWFRQAPGKEREFVATINWRTSDTYYADSVRGRFSISADSAKNTVYLQMNSLKPEDTAVYYCNAVYLAGGVGYDSWGQGTQVTVSS

SEQ ID NO: 5859 - protein, 121 aa, Artificial Sequence
  Synthetic
QVQLQESGGGLVQAGGSLRLSCAASGALSCGVFMGWFRQAPGKEREFVAAISGLGVDTDYADSVKGRFTISRDDARNTVYLQMNSLKPEDTAVYYCARAFFSSTGTVENYWGQGTQVTVSS

SEQ ID NO: 5860 - protein, 120 aa, Artificial Sequence
  Synthetic
EVQLVESGGGLVQAGDSLRLSCAASGFASDLCFMGWFRQAPGKEREFVATINCLGWTNYVDSVKGRFTISRDDARNTVYLQMNSLKPEDTAVYYCAAYSHDLNSVVRDYWGQGTQVTVSS

SEQ ID NO: 5861 - protein, 121 aa, Artificial Sequence
  Synthetic
EVQLVESGGGLVQAGDSLRLSCAASGFEQFDWRMGWYRQAPGKEREFVAAISSAYSTTNYADSVKGRFTISRDDARNTVYLQMNSLKPEDTAVYYCNAGTFLEDYFYRNYWGQGTQVTVSS

SEQ ID NO: 5862 - protein, 120 aa, Artificial Sequence
  Synthetic
EVQLVESGGGLVQAGDSLRLSCAASGNWSCVFQMGWFRQAPGKEREFVAAITQSPAVTDYADSVKGRFTISRDNAKNTVYLQMNSLKPEDTAVYYCAALACSLTGICNYWGQGTQVTVSS

SEQ ID NO: 5863 - protein, 120 aa, Artificial Sequence
  Synthetic
EVQLVESGGGLVQAGDSLRLSCAASGRSHDCINMGWFRQAPGKEREFVAAINGFPIITYYADSVKGRFTISRDDARNTVYLQMNSLKPEDTAVYYCNAPVVLRRNIINYWGQGTQVTVSS

SEQ ID NO: 5864 - protein, 120 aa, Artificial Sequence
  Synthetic
QVQLQESGGGLVQAGGSLRLSCAASGVSFHVFYMGWFRQAPGKEREFVASINNSGTHTYYADSVRGRFSISADSAKNTVYLQMNSLKLEDTAVYYCNAVSIVQGTTGDSWGQGTQVTVSS

SEQ ID NO: 5865 - protein, 124 aa, Artificial Sequence
  Synthetic
EVQLVESGGGLVQAGDSLRLSCAASGGHWCSLTMGWFRQAPGKERELVAAINLAQYGTYYADSVKGRFTISRDDARNTVYLQMNSLKPEDTAVYYCAAAYATYNLDRGYSMGYWGQGTQVTVSS

SEQ ID NO: 5866 - protein, 121 aa, Artificial Sequence
  Synthetic
EVQLVESGGGLVQAGGSLRLSCAASGNPDPCVVMGWFRQAPGKEREFVASITAYSAVTYYADSVKGRFTISRDNAKNTVYLQMNSLKPEDTAVYYCAATYVSHPCHLYDYWGQGTQVTVSS

SEQ ID NO: 5867 - protein, 121 aa, Artificial Sequence
  Synthetic
EVQLVESGGGLVQAGDSLRLSCAASGSLYAVVWMGWFRQAPGKEREFVATISLCGYDTYYADSVKGRFTISRDDAHNTVYLQMNSLKPEDTAVYYCAVTCFVNHMKISEYWGQGTQVTVSS

SEQ ID NO: 5868 - protein, 115 aa, Artificial Sequence
  Synthetic
EVQLVESGGGLVQAGDSLRLSCAASGDSHVLWRMGWFRQAPGKEREFVAAISLDGQFTNYADSVRGRFSISADSAKNTVYLQMNSLKPEDTAVYYCAALPFLDYWGQGTQVTVSS

SEQ ID NO: 5869 - protein, 115 aa, Artificial Sequence
  Synthetic
EVQLVESGGGLVQAGDSLRLSCAASGDSYILWRMGWFRQAPGKEREFVAAISLDGQFTNYADSVRGRFSISADSAKNTVYLQMNSLKPEDTAVYYCAALPFLDYWGQGTQVTVSS

SEQ ID NO: 5870 - protein, 115 aa, Artificial Sequence
  Synthetic
EVQLVESGGGLVQAGDSLRLSCAASGDSHVLWRMGWFRQAPGKEREFVAAISLDGQFTNYADSVRGRFSISADSAKYTVYLQMNSLKPEDTAVYYCAALPFLDYWGQGTQVTVSS

SEQ ID NO: 5871 - protein, 115 aa, Artificial Sequence
  Synthetic
EVQLVESGGGLVQAGDSLRLSCAASGDSHVLWRMGWFRQAPGKELEFVAAISLDGQFTNYADSVRGRFSISADSAKNTVYLQMNSLKPEDTAVYYCAALPFLDYWGQGTQVTVSS

SEQ ID NO: 5872 - protein, 115 aa, Artificial Sequence
  Synthetic
EVQLVESGGGLVQAGDSLRLSCAASGDSYILWRMGWFRQAPGKEREFVAAISLDGQFTNYADSVRGRFSISADSAKYTVYLQMNSLKPEDTAVYYCAALPFLDYWGQGTQVTVSS

SEQ ID NO: 5873 - protein, 26 aa, Artificial Sequence
  Synthetic
DVQLQESGGGSVQAGGSLRLSCAASG

SEQ ID NO: 5874 - protein, 26 aa, Artificial Sequence
  Synthetic
QVQLQESGGGSVQAGGSLRLSCEASG

SEQ ID NO: 5875 - protein, 25 aa, Artificial Sequence
  Synthetic
GQLVESGGGSVQAGGSLRLSCAASG

SEQ ID NO: 5876 - protein, 26 aa, Artificial Sequence
  Synthetic
QVQLQESGGGSVQAGGSLRLSCAASG

SEQ ID NO: 5877 - protein, 26 aa, Artificial Sequence
  Synthetic
QVQLQESGGGSVQTGGSLRLSCAASE

SEQ ID NO: 5878 - protein, 26 aa, Artificial Sequence
  Synthetic
QVQLQESGGGSAQTGGSLRLSCAASG

SEQ ID NO: 5879 - protein, 26 aa, Artificial Sequence
  Synthetic
QVQLQESGGGSVQAGGSLRLSCAASG

SEQ ID NO: 5880 - protein, 26 aa, Artificial Sequence
  Synthetic
QVQLQESGGGSVQAGGSLTLSCAASG

SEQ ID NO: 5881 - protein, 26 aa, Artificial Sequence
  Synthetic
QVQLQESGGGSVQAGGSLRLSCAASE

SEQ ID NO: 5882 - protein, 26 aa, Artificial Sequence
  Synthetic
QVQLVESGGALVQPGGSLRLSCAASG

SEQ ID NO: 5883 - protein, 26 aa, Artificial Sequence
  Synthetic
QVQLVESGGGSVQAGGSLRLSCTASG

SEQ ID NO: 5884 - protein, 26 aa, Artificial Sequence
  Synthetic
QVQLQESGGGLVQPGGSLRLSCVVSG

SEQ ID NO: 5885 - protein, 26 aa, Artificial Sequence
  Synthetic
QVQLQESGGGSVQPGGSLTLSCAASG

SEQ ID NO: 5886 - protein, 26 aa, Artificial Sequence
  Synthetic
QVQLQESGGGSVQTGGSLTLSCAASG

SEQ ID NO: 5887 - protein, 26 aa, Artificial Sequence
  Synthetic
QVQLQESGGGLVQAGGSLRLSCAASG

SEQ ID NO: 5888 - protein, 26 aa, Artificial Sequence
  Synthetic
QVQLQESGGGSVQAGGSLKLTCAASG

SEQ ID NO: 5889 - protein, 26 aa, Artificial Sequence
  Synthetic
QVQLVESGGGLVQAGGSLRLSCAASG

SEQ ID NO: 5890 - protein, 26 aa, Artificial Sequence
  Synthetic
DVQLVESGGGSVQAGGSLRLSCAVSG

SEQ ID NO: 5891 - protein, 26 aa, Artificial Sequence
  Synthetic
EVQLQASGGGSVQAGQSLRLSCATSG

SEQ ID NO: 5892 - protein, 26 aa, Artificial Sequence
  Synthetic
QVQLVESGGGSVQAGGSLRLSCTASG

SEQ ID NO: 5893 - protein, 26 aa, Artificial Sequence
  Synthetic
QVQLVESGGGSVQAGGSLRLSCAASG

SEQ ID NO: 5894 - protein, 26 aa, Artificial Sequence
  Synthetic
QVQLVASGGGSVQAGGSLRLSCAASG

SEQ ID NO: 5895 - protein, 26 aa, Artificial Sequence
  Synthetic
QVQLVESGGGSVQAGGSLSLSCAAST

SEQ ID NO: 5896 - protein, 26 aa, Artificial Sequence
  Synthetic
QVQLVESGGGTVPAGGSLRLSCAASG

SEQ ID NO: 5897 - protein, 26 aa, Artificial Sequence
  Synthetic
DVQLQASGGGSVQAGGSLRLSCAASG

SEQ ID NO: 5898 - protein, 26 aa, Artificial Sequence
  Synthetic
QVQLVESGGGSVQAGGSLRLSCSASG

SEQ ID NO: 5899 - protein, 26 aa, Artificial Sequence
  Synthetic
QVQLVESGGGSVQAGGSLRLSCAASG

SEQ ID NO: 5900 - protein, 26 aa, Artificial Sequence
  Synthetic
QVQMVESGGGLVQAGGSLRLSCAASG

SEQ ID NO: 5901 - protein, 26 aa, Artificial Sequence
  Synthetic
QVQLEESGGGSVQAGGSLRLSCAASG

SEQ ID NO: 5902 - protein, 26 aa, Artificial Sequence
  Synthetic
DVQLQESGGGSVQAGGSLRLSCVVSG

SEQ ID NO: 5903 - protein, 26 aa, Artificial Sequence
  Synthetic
DVQLQESGGGSVQAGGSLRLSCVASG

SEQ ID NO: 5904 - protein, 26 aa, Artificial Sequence
  Synthetic
DVQLVESGGGSVQAGGSLRLSCAASG

SEQ ID NO: 5905 - protein, 26 aa, Artificial Sequence
  Synthetic
DVQLVESGGGSVQAGGSLRLSCAASG

SEQ ID NO: 5906 - protein, 26 aa, Artificial Sequence
  Synthetic
QVKLEESGGGSVQAGGSLRLSCAASG

SEQ ID NO: 5907 - protein, 26 aa, Artificial Sequence
  Synthetic
QVQLQESGGGSVQVGGSLRVACAASG

SEQ ID NO: 5908 - protein, 26 aa, Artificial Sequence
  Synthetic
DVQFVESGGGSVHAGGSLRLNCATSG

SEQ ID NO: 5909 - protein, 26 aa, Artificial Sequence
  Synthetic
QVQLVESGGGSVQAGGSLRLSCTASG

SEQ ID NO: 5910 - protein, 26 aa, Artificial Sequence
  Synthetic
QVQLQESGGGSVEAGGSLRLSCARSG

SEQ ID NO: 5911 - protein, 26 aa, Artificial Sequence
  Synthetic
QVQLQESGGGSVQAGGSLRLSCTAPG

SEQ ID NO: 5912 - protein, 26 aa, Artificial Sequence
  Synthetic
AVQLQESGGGLVQPGGSLRLSCAASG

SEQ ID NO: 5913 - protein, 26 aa, Artificial Sequence
  Synthetic
DVQLVESGGGSVQAGGSLRLSCAVSG

SEQ ID NO: 5914 - protein, 26 aa, Artificial Sequence
  Synthetic
QVKLEESGGGSVQAGGSLRLSCAASG

SEQ ID NO: 5915 - protein, 26 aa, Artificial Sequence
  Synthetic
QVQLVESGGGLVQAGGSLRLSCAASG

SEQ ID NO: 5916 - protein, 26 aa, Artificial Sequence
  Synthetic
DVQLVESGGGSVQAGGSLRLSCAASG

SEQ ID NO: 5917 - protein, 26 aa, Artificial Sequence
  Synthetic
DVQLVESGGGSVQAGESLRLSCAASG

SEQ ID NO: 5918 - protein, 26 aa, Artificial Sequence
  Synthetic
QVQLQESGGGLVPAGGSLRLSCVDSG

SEQ ID NO: 5919 - protein, 26 aa, Artificial Sequence
  Synthetic
EVQLVESGGGLVQPGGSLRLSCAASG

SEQ ID NO: 5920 - protein, 26 aa, Artificial Sequence
  Synthetic
QVQLQESGGGLVQAGGSLRLSCAASG

SEQ ID NO: 5921 - protein, 26 aa, Artificial Sequence
  Synthetic
QVKLEESGGGSVQTGGSLRLTCAASG

SEQ ID NO: 5922 - protein, 26 aa, Artificial Sequence
  Synthetic
QVQLQESGGGLVQPGGSLRLSCAASG

SEQ ID NO: 5923 - protein, 26 aa, Artificial Sequence
  Synthetic
EVQLVESGGGLVQAGGSLRLSCAASG

SEQ ID NO: 5924 - protein, 26 aa, Artificial Sequence
  Synthetic
QVQLQESGGGLVQAGGSLRLSCAASG

SEQ ID NO: 5925 - protein, 26 aa, Artificial Sequence
  Synthetic
QVQLVESGGGLAQAGGSLRLSCAASG

SEQ ID NO: 5926 - protein, 26 aa, Artificial Sequence
  Synthetic
QVKLEESGGGLVQAGGSLRLSCAASE

SEQ ID NO: 5927 - protein, 26 aa, Artificial Sequence
  Synthetic
QVQLQESGGGLVQAGASLKLSCAASG

SEQ ID NO: 5928 - protein, 26 aa, Artificial Sequence
  Synthetic
QVQLQESGGGLVQAGDSLRLSCAASG

SEQ ID NO: 5929 - protein, 26 aa, Artificial Sequence
  Synthetic
AVQLQESGGGLVQAGGSLRLSCTASG

SEQ ID NO: 5930 - protein, 26 aa, Artificial Sequence
  Synthetic
QVQLQESGGGLVQAGASLRLSCAASE

SEQ ID NO: 5931 - protein, 26 aa, Artificial Sequence
  Synthetic
QVQLQESGGGLVQAGASLRLSCAASE

SEQ ID NO: 5932 - protein, 26 aa, Artificial Sequence
  Synthetic
KVQLQQSGGGAVQTGGSLKLTCLASG

SEQ ID NO: 5933 - protein, 26 aa, Artificial Sequence
  Synthetic
QVQLVESGGGLVQAGDSLRLSCAVSG

SEQ ID NO: 5934 - protein, 26 aa, Artificial Sequence
  Synthetic
EVQLVESGGGLVQAGGSLRLFCAASG

SEQ ID NO: 5935 - protein, 26 aa, Artificial Sequence
  Synthetic
DVQLVESGGGLVQPGGSLRLSCAYSG

SEQ ID NO: 5936 - protein, 26 aa, Artificial Sequence
  Synthetic
QVQLVESGGGLVQAGGGSLRLSCAAS

SEQ ID NO: 5937 - protein, 26 aa, Artificial Sequence
  Synthetic
QVQLVESGGGLVQAGGSLRLSCAASG

SEQ ID NO: 5938 - protein, 26 aa, Artificial Sequence
  Synthetic
QVQLVESGGGLVQAGGSLRLSCAASG

SEQ ID NO: 5939 - protein, 26 aa, Artificial Sequence
  Synthetic
EVQLVESGGGLVQAGDSLRLSATASG

SEQ ID NO: 5940 - protein, 26 aa, Artificial Sequence
  Synthetic
QVQLQESGGGLVQAGGSLRLSCAASG

SEQ ID NO: 5941 - protein, 26 aa, Artificial Sequence
  Synthetic
QVQLQESGGGLVQAGGSLRLSCAAAG

SEQ ID NO: 5942 - protein, 26 aa, Artificial Sequence
  Synthetic
QVQLQESGGGLVQAGGSLRLSCAASG

SEQ ID NO: 5943 - protein, 26 aa, Artificial Sequence
  Synthetic
QVQLQESGGGLVQPGGSLRLSCAASG

SEQ ID NO: 5944 - protein, 26 aa, Artificial Sequence
  Synthetic
QVQLQESGGGLVQAGGSLRLSCTASR

SEQ ID NO: 5945 - protein, 26 aa, Artificial Sequence
  Synthetic
AVQLQESGGGLVQAGGSLRLSCTVSA

SEQ ID NO: 5946 - protein, 26 aa, Artificial Sequence
  Synthetic
QVQLQESGGGLVQAGGSLRLSCAASG

SEQ ID NO: 5947 - protein, 26 aa, Artificial Sequence
  Synthetic
QVQLQESGGGSVQAGGSLRLSCGASE

SEQ ID NO: 5948 - protein, 26 aa, Artificial Sequence
  Synthetic
AVQLVDSGGGTLQAGKSLRLSCAISG

SEQ ID NO: 5949 - protein, 26 aa, Artificial Sequence
  Synthetic
EVQPQESGGGLAQAGGSLRLSCVVSG

SEQ ID NO: 5950 - protein, 26 aa, Artificial Sequence
  Synthetic
QVQLQESGGGLVQAGGSLRLSCAASG

SEQ ID NO: 5951 - protein, 26 aa, Artificial Sequence
  Synthetic
QVQLQESGGGLVQPGGSLRLSCAASG

SEQ ID NO: 5952 - protein, 25 aa, Artificial Sequence
  Synthetic
VQLVESGGGLVQAGGSLSLSCSASG

SEQ ID NO: 5953 - protein, 26 aa, Artificial Sequence
  Synthetic
QVQLQESGGGLVQAGGSLRLSCAASR

SEQ ID NO: 5954 - protein, 26 aa, Artificial Sequence
  Synthetic
QVQLVESGGGLVRPGGSLRLSCVDSE

SEQ ID NO: 5955 - protein, 26 aa, Artificial Sequence
  Synthetic
QVQLQESGGGLVQAGGSLRLSCAASG

SEQ ID NO: 5956 - protein, 26 aa, Artificial Sequence
  Synthetic
DVQLQESGGGLVQAGHSLRLSCVGSG

SEQ ID NO: 5957 - protein, 26 aa, Artificial Sequence
  Synthetic
QVQLQESGGGLVQPGGSLRLSCAASG

SEQ ID NO: 5958 - protein, 26 aa, Artificial Sequence
  Synthetic
QVQLQESGGGLVQPGGSLRLSCAASG

SEQ ID NO: 5959 - protein, 26 aa, Artificial Sequence
  Synthetic
QVQLQESGGGLVQPGGSLKLSCAASG

SEQ ID NO: 5960 - protein, 26 aa, Artificial Sequence
  Synthetic
DVQLQESGGGLVQPGGSLRLSCAASG

SEQ ID NO: 5961 - protein, 26 aa, Artificial Sequence
  Synthetic
QVQLQESGGGLVQAGGSLRLSCAASG

SEQ ID NO: 5962 - protein, 26 aa, Artificial Sequence
  Synthetic
QVQLVESGGGLVQAGGTLKLSCAASG

SEQ ID NO: 5963 - protein, 26 aa, Artificial Sequence
  Synthetic
QVQLVESGGGLVQPGGSLRLSCAASG

SEQ ID NO: 5964 - protein, 26 aa, Artificial Sequence
  Synthetic
QVQLVESGGGLVQAGGSLRLSCVVSG

SEQ ID NO: 5965 - protein, 26 aa, Artificial Sequence
  Synthetic
QVQLQESGGGLVQAGGSLRLSCTASV

SEQ ID NO: 5966 - protein, 26 aa, Artificial Sequence
  Synthetic
QVQLQESGGGTVQPGGSLKLSCSAAP

SEQ ID NO: 5967 - protein, 26 aa, Artificial Sequence
  Synthetic
EVQLVESGGGLVQPGGSLRLSCAASG

SEQ ID NO: 5968 - protein, 26 aa, Artificial Sequence
  Synthetic
EVQLVESGGGLVQPGGSLRLSCAASG

SEQ ID NO: 5969 - protein, 26 aa, Artificial Sequence
  Synthetic
EVQLVESGGGLVQAGGSLRLSCAASG

SEQ ID NO: 5970 - protein, 26 aa, Artificial Sequence
  Synthetic
QVQLVESGGGLVQAGGSLRLSCAASE

SEQ ID NO: 5971 - protein, 26 aa, Artificial Sequence
  Synthetic
DVQLVESGGGLVQPGGSLRLSCEASG

SEQ ID NO: 5972 - protein, 26 aa, Artificial Sequence
  Synthetic
QVQLQESGGGLVQAGGSLRLSCEASG

SEQ ID NO: 5973 - protein, 26 aa, Artificial Sequence
  Synthetic
QVQLQESGGGLVQPGGSLRLSCAASG

SEQ ID NO: 5974 - protein, 26 aa, Artificial Sequence
  Synthetic
QVQLVESGGGLVQAGGSLRLSCAASR

SEQ ID NO: 5975 - protein, 26 aa, Artificial Sequence
  Synthetic
QVQLQESGGGLVQAGGSLRLSCTASG

SEQ ID NO: 5976 - protein, 26 aa, Artificial Sequence
  Synthetic
QVQLQESGGGLVQAGGSLRLSCKASG

SEQ ID NO: 5977 - protein, 26 aa, Artificial Sequence
  Synthetic
QVQLQESGGGLVQAGGSLRLSCAASG

SEQ ID NO: 5978 - protein, 26 aa, Artificial Sequence
  Synthetic
QVQLQESGGGLVQPGGSLRLSCAPSG

SEQ ID NO: 5979 - protein, 26 aa, Artificial Sequence
  Synthetic
EVQLVESGGGLVQPGGSLRLSCAASG

SEQ ID NO: 5980 - protein, 26 aa, Artificial Sequence
  Synthetic
QVQLQESGGGLVQAGGSLRLSCAASE

SEQ ID NO: 5981 - protein, 26 aa, Artificial Sequence
  Synthetic
QVQLQESGGGSVQAGGSLRLSCTASG

SEQ ID NO: 5982 - protein, 26 aa, Artificial Sequence
  Synthetic
QVQLQESGGGLVQAGGSLRLSCAASG

SEQ ID NO: 5983 - protein, 26 aa, Artificial Sequence
  Synthetic
EVQLVESGGGLVQAGDSLRLSCTASG

SEQ ID NO: 5984 - protein, 26 aa, Artificial Sequence
  Synthetic
QVQLQESGGGLVQAGGSLRLSCAASG

SEQ ID NO: 5985 - protein, 26 aa, Artificial Sequence
  Synthetic
QVQLQESGGGLVQAGGSLRLSCTASG

SEQ ID NO: 5986 - protein, 26 aa, Artificial Sequence
  Synthetic
QVQLQESGGGLVQAGGSLRLSCAASG

SEQ ID NO: 5987 - protein, 26 aa, Artificial Sequence
  Synthetic
QVQLQESGGGLVQAGESLKLSCAASG

SEQ ID NO: 5988 - protein, 26 aa, Artificial Sequence
  Synthetic
QVQLQESGGGLVQAGGSLRLSCAASG

SEQ ID NO: 5989 - protein, 26 aa, Artificial Sequence
  Synthetic
QVQLQESGGGLVQAGGSLRLSCAASG

SEQ ID NO: 5990 - protein, 26 aa, Artificial Sequence
  Synthetic
QVQLQESGGGLVQAGDSLKLSCEASG

SEQ ID NO: 5991 - protein, 26 aa, Artificial Sequence
  Synthetic
QVQLVESGGGLVQPGGSLRLSCAASG

SEQ ID NO: 5992 - protein, 26 aa, Artificial Sequence
  Synthetic
QVQLVESGGGLVQAGGSLRLSCAASG

SEQ ID NO: 5993 - protein, 26 aa, Artificial Sequence
  Synthetic
QVQLQESGGGLVQTGGSLRLSCAFSG

SEQ ID NO: 5994 - protein, 26 aa, Artificial Sequence
  Synthetic
QVQLVESGGGLVQAGGSLRLSCAASE

SEQ ID NO: 5995 - protein, 26 aa, Artificial Sequence
  Synthetic
QVQLVETGGGLVQAGGSLRLSCAASG

SEQ ID NO: 5996 - protein, 26 aa, Artificial Sequence
  Synthetic
QVQLQESGGGLVQPGGSLRLSCAASG

SEQ ID NO: 5997 - protein, 26 aa, Artificial Sequence
  Synthetic
QVQLVESGGALVQPGGSLRLSCAASG

SEQ ID NO: 5998 - protein, 26 aa, Artificial Sequence
  Synthetic
QVQLQESGGGLVQAGDSLTLSCAASG

SEQ ID NO: 5999 - protein, 26 aa, Artificial Sequence
  Synthetic
QVQLVESGGGLMQAGGSLRLSCAVSG

SEQ ID NO: 6000 - protein, 26 aa, Artificial Sequence
  Synthetic
QVQLVESGGGLMQAGGSLRLSCAVSG

SEQ ID NO: 6001 - protein, 26 aa, Artificial Sequence
  Synthetic
QMQLVESGGGLVQAGGSLTLSCAASG

SEQ ID NO: 6002 - protein, 26 aa, Artificial Sequence
  Synthetic
QGQLVESGGGMVQAGGSLRLSCAASG

SEQ ID NO: 6003 - protein, 26 aa, Artificial Sequence
  Synthetic
QVQLVESGGGLVQAGGSLRLSCAASG

SEQ ID NO: 6004 - protein, 26 aa, Artificial Sequence
  Synthetic
QVQLVESGGGLVQAGGSLRLSCAASG

SEQ ID NO: 6005 - protein, 26 aa, Artificial Sequence
  Synthetic
QVQLQESGGGLVQAGGSLRLSCAASG

SEQ ID NO: 6006 - protein, 26 aa, Artificial Sequence
  Synthetic
QVQLVQSGGGLVQAGGSLRLSCAFSG

SEQ ID NO: 6007 - protein, 26 aa, Artificial Sequence
  Synthetic
QVQLVESGGGLVQAGASLRLSCAVSG

SEQ ID NO: 6008 - protein, 26 aa, Artificial Sequence
  Synthetic
EVQLQESGGGLVQAGGSLRLSCAASG

SEQ ID NO: 6009 - protein, 25 aa, Artificial Sequence
  Synthetic
VQLQESGGCLVQAGGSLRLSCAASG

SEQ ID NO: 6010 - protein, 26 aa, Artificial Sequence
  Synthetic
EVQLVESGGGLVQAGGSLKLSCAASG

SEQ ID NO: 6011 - protein, 26 aa, Artificial Sequence
  Synthetic
EVQLVESGGGLVQPGGSLRLSCAATG

SEQ ID NO: 6012 - protein, 26 aa, Artificial Sequence
  Synthetic
QVQLVESGGGLVQAGDSLRLACAASG

SEQ ID NO: 6013 - protein, 26 aa, Artificial Sequence
  Synthetic
QVQLVETGGGLVQPGGSLRLSCGASG

SEQ ID NO: 6014 - protein, 25 aa, Artificial Sequence
  Synthetic
VALVESGGALVQPGGSLRLSCAASG

SEQ ID NO: 6015 - protein, 26 aa, Artificial Sequence
  Synthetic
QVQLQESGGGLVQPGGSLRLSCAASG

SEQ ID NO: 6016 - protein, 26 aa, Artificial Sequence
  Synthetic
DVQLQESGGGLVQAGGSLRLSCAASG

SEQ ID NO: 6017 - protein, 25 aa, Artificial Sequence
  Synthetic
VQLVESGGGLVQAGDSLRLSCAASG

SEQ ID NO: 6018 - protein, 26 aa, Artificial Sequence
  Synthetic
QVQLVESGGGLVQAGGSLRLSCAASQ

SEQ ID NO: 6019 - protein, 26 aa, Artificial Sequence
  Synthetic
QVQLVESGGGVVQAGGSLRLSCAASG

SEQ ID NO: 6020 - protein, 26 aa, Artificial Sequence
  Synthetic
QVQLVESGGGLVQAGGSLKLSCTTSG

SEQ ID NO: 6021 - protein, 26 aa, Artificial Sequence
  Synthetic
QVQLQESGGGLVQAGGSLRLSCVVSG

SEQ ID NO: 6022 - protein, 26 aa, Artificial Sequence
  Synthetic
QVQLQESGGGLVQAGGSLRLSCAASG

SEQ ID NO: 6023 - protein, 26 aa, Artificial Sequence
  Synthetic
DVQLQESGGGLVQTGGSLTLSCATSG

SEQ ID NO: 6024 - protein, 26 aa, Artificial Sequence
  Synthetic
QVQLQESGGGLEQPGGSLRLSCATSG

SEQ ID NO: 6025 - protein, 26 aa, Artificial Sequence
  Synthetic
QVQLQESGGGLVQAGSSLRLACAATG

SEQ ID NO: 6026 - protein, 26 aa, Artificial Sequence
  Synthetic
QVQLQESGGGLVQAGGSLRLSCAASG

SEQ ID NO: 6027 - protein, 26 aa, Artificial Sequence
  Synthetic
QVQLQESGGGLVQPGGSLRLSCAASG

SEQ ID NO: 6028 - protein, 26 aa, Artificial Sequence
  Synthetic
QVQLQESGGGLVQAGGSLRLSCAASG

SEQ ID NO: 6029 - protein, 26 aa, Artificial Sequence
  Synthetic
QVQLQESGGGLVQAGGSLRLSCTASG

SEQ ID NO: 6030 - protein, 26 aa, Artificial Sequence
  Synthetic
QVQLQESGGGLVQAGGSLRLSCAASG

SEQ ID NO: 6031 - protein, 26 aa, Artificial Sequence
  Synthetic
QVQLQESGGGLVQAGGSLRLSCAGSG

SEQ ID NO: 6032 - protein, 26 aa, Artificial Sequence
  Synthetic
QVQLVESGGGLVQAGDSLRLSCAASG

SEQ ID NO: 6033 - protein, 26 aa, Artificial Sequence
  Synthetic
QVQLQESGGGLVQAGGSLRLSCAASG

SEQ ID NO: 6034 - protein, 26 aa, Artificial Sequence
  Synthetic
QVQLQESGGGLVQAGGSLRVSCAASG

SEQ ID NO: 6035 - protein, 26 aa, Artificial Sequence
  Synthetic
QVQLQESGGGLVQAGGSLRLSCAGSG

SEQ ID NO: 6036 - protein, 26 aa, Artificial Sequence
  Synthetic
QVQLQESGGGLVQAGGSLRLSCATST

SEQ ID NO: 6037 - protein, 26 aa, Artificial Sequence
  Synthetic
QVQLVESGGGLVQAGGSLRLSCAASG

SEQ ID NO: 6038 - protein, 26 aa, Artificial Sequence
  Synthetic
DVQLVESGGGLVQAGGSLRVSCAASG

SEQ ID NO: 6039 - protein, 26 aa, Artificial Sequence
  Synthetic
QVQLVESGGGLVQAGGSLRLSCVVSG

SEQ ID NO: 6040 - protein, 26 aa, Artificial Sequence
  Synthetic
QRQLVESGGGLVQPGGSLRLSCAASG

SEQ ID NO: 6041 - protein, 26 aa, Artificial Sequence
  Synthetic
QVQLQESGGGLVQAGGSLRLSCAASG

SEQ ID NO: 6042 - protein, 26 aa, Artificial Sequence
  Synthetic
QVQLQESGGGLAQAGGSMRLSCIASG

SEQ ID NO: 6043 - protein, 26 aa, Artificial Sequence
  Synthetic
QVKLQQSGGGSVQEGGSLRLSCASSG

SEQ ID NO: 6044 - protein, 26 aa, Artificial Sequence
  Synthetic
KVQLQQSGGGSVTPGGSLRLSCAASG

SEQ ID NO: 6045 - protein, 26 aa, Artificial Sequence
  Synthetic
QVQLQESGGGLEQAGDSLRLSCAASG

SEQ ID NO: 6046 - protein, 26 aa, Artificial Sequence
  Synthetic
QVQLQESGGGLVQPGGSLRLSCAASG

SEQ ID NO: 6047 - protein, 26 aa, Artificial Sequence
  Synthetic
QVQLQESGGGLVQAGGSLRLSCAASG

SEQ ID NO: 6048 - protein, 26 aa, Artificial Sequence
  Synthetic
QVQLQESGGGLVQAGGSLRLSCAASV

SEQ ID NO: 6049 - protein, 26 aa, Artificial Sequence
  Synthetic
QVQLQESGGGLVQAGESLRLSCAASG

SEQ ID NO: 6050 - protein, 26 aa, Artificial Sequence
  Synthetic
QVQLQESGGGLVQAGGSLRLSCAASG

SEQ ID NO: 6051 - protein, 26 aa, Artificial Sequence
  Synthetic
QVQLQESGGGSVQAGGSLRLSCVASG

SEQ ID NO: 6052 - protein, 26 aa, Artificial Sequence
  Synthetic
QVQLVESGGGLVQAGGSLRLSCAASG

SEQ ID NO: 6053 - protein, 26 aa, Artificial Sequence
  Synthetic
QVQLVETGGGLVQPGGSLTLSCAGSG

SEQ ID NO: 6054 - protein, 26 aa, Artificial Sequence
  Synthetic
QVQLVESGGGLVQAGGSLSLSCAASG

SEQ ID NO: 6055 - protein, 26 aa, Artificial Sequence
  Synthetic
QVQLVESGGGLAQPGGSLRLSCEASG

SEQ ID NO: 6056 - protein, 26 aa, Artificial Sequence
  Synthetic
QVQLQESGGGLVQPGGSLRLSCAASG

SEQ ID NO: 6057 - protein, 26 aa, Artificial Sequence
  Synthetic
QVQLVESGGRLVQAGDSLRLSCAASG

SEQ ID NO: 6058 - protein, 26 aa, Artificial Sequence
  Synthetic
QVQLQESGGGLVQAGGSLRLSCAASG

SEQ ID NO: 6059 - protein, 26 aa, Artificial Sequence
  Synthetic
QVQLQESGGGLVQPGGSLRLSCAASG

SEQ ID NO: 6060 - protein, 26 aa, Artificial Sequence
  Synthetic
QVQLVETGGGLVQPGESLRLSCVASG

SEQ ID NO: 6061 - protein, 26 aa, Artificial Sequence
  Synthetic
QVQLVESGGGSVQAGDSLRLSCTASG

SEQ ID NO: 6062 - protein, 26 aa, Artificial Sequence
  Synthetic
QVQLQESGGGLVQPGGSLRLFCAASG

SEQ ID NO: 6063 - protein, 26 aa, Artificial Sequence
  Synthetic
QVQLVETGGGLVQAGGSLRLSCAASG

SEQ ID NO: 6064 - protein, 25 aa, Artificial Sequence
  Synthetic
VQLAETGGGLVEPGGSLRLSCAAPE

SEQ ID NO: 6065 - protein, 26 aa, Artificial Sequence
  Synthetic
QVQLVESGGGLVQPGGSLRLSCVASE

SEQ ID NO: 6066 - protein, 26 aa, Artificial Sequence
  Synthetic
QVQLVESGGGLVQPGGSLTLSCTASG

SEQ ID NO: 6067 - protein, 26 aa, Artificial Sequence
  Synthetic
EVQLQASGGGLVQPGGSLRLSCTASG

SEQ ID NO: 6068 - protein, 26 aa, Artificial Sequence
  Synthetic
QVQLVESGGGLVQAGGSLRLSCAASG

SEQ ID NO: 6069 - protein, 26 aa, Artificial Sequence
  Synthetic
QVQLVESGGGLVQAGGSLRLSCAASG

SEQ ID NO: 6070 - protein, 26 aa, Artificial Sequence
  Synthetic
QVQLVESGGGLVRPGGSLRLSCAASG

SEQ ID NO: 6071 - protein, 26 aa, Artificial Sequence
  Synthetic
QGQLVESGGGLVQPGGSLRLSCAASG

SEQ ID NO: 6072 - protein, 26 aa, Artificial Sequence
  Synthetic
QGQLVESGGGLVQAGGSLTLSCAASV

SEQ ID NO: 6073 - protein, 26 aa, Artificial Sequence
  Synthetic
QLQLVESGGGLVQPGDSLRLSCAVSG

SEQ ID NO: 6074 - protein, 26 aa, Artificial Sequence
  Synthetic
EVQLVESGGGLVQPGGSLRLSCEASG

SEQ ID NO: 6075 - protein, 26 aa, Artificial Sequence
  Synthetic
QVQLVESGGGLVQAGGSLTLSCVASG

SEQ ID NO: 6076 - protein, 26 aa, Artificial Sequence
  Synthetic
QVQLVETGGGLVQTGGSLRLSCKASG

SEQ ID NO: 6077 - protein, 26 aa, Artificial Sequence
  Synthetic
QLQLVESGGGLVQAGGSLRLSCAASG

SEQ ID NO: 6078 - protein, 26 aa, Artificial Sequence
  Synthetic
QLQLVESGGGLVQPGGSLRLSCAASG

SEQ ID NO: 6079 - protein, 26 aa, Artificial Sequence
  Synthetic
QVQLVESGGGLVQAGGSLRLSCAVSG

SEQ ID NO: 6080 - protein, 26 aa, Artificial Sequence
  Synthetic
QVQLAESGGGLVQAGGSLKLSCAASG

SEQ ID NO: 6081 - protein, 26 aa, Artificial Sequence
  Synthetic
QVQLVESGGGLVHPGGSLRLSCAASG

SEQ ID NO: 6082 - protein, 24 aa, Artificial Sequence
  Synthetic
QLVETGGGLVQSGGSLRLSCAASG

SEQ ID NO: 6083 - protein, 26 aa, Artificial Sequence
  Synthetic
QVQLQESGGGLVQAGGSLRLSCAASG

SEQ ID NO: 6084 - protein, 26 aa, Artificial Sequence
  Synthetic
QVQLVESGGGLVQPGGRLRLSCAASG

SEQ ID NO: 6085 - protein, 26 aa, Artificial Sequence
  Synthetic
QVQLVESGGGLVQAGGSLRLSCAASG

SEQ ID NO: 6086 - protein, 26 aa, Artificial Sequence
  Synthetic
EVQLQESGGGLVQPGGSLRLSCTASG

SEQ ID NO: 6087 - protein, 25 aa, Artificial Sequence
  Synthetic
VQLAETGGGLVQAGGSLRLSCAASG

SEQ ID NO: 6088 - protein, 26 aa, Artificial Sequence
  Synthetic
QVQLVESGGGLVQPGGSLRLSCAASG

SEQ ID NO: 6089 - protein, 26 aa, Artificial Sequence
  Synthetic
QVQLQESGGGLVQAGGSLRLSCAKSG

SEQ ID NO: 6090 - protein, 26 aa, Artificial Sequence
  Synthetic
QVQLQESGGGLVQAGDSLRVSCAASG

SEQ ID NO: 6091 - protein, 26 aa, Artificial Sequence
  Synthetic
QVQLQESGGGLVQAGGSLRLSCAASG

SEQ ID NO: 6092 - protein, 26 aa, Artificial Sequence
  Synthetic
QVQLQESGGGLVEAGGSLRLSCLGSG

SEQ ID NO: 6093 - protein, 26 aa, Artificial Sequence
  Synthetic
QVQLQESGGGLVQSGGSLRLSCAASR

SEQ ID NO: 6094 - protein, 26 aa, Artificial Sequence
  Synthetic
QVQLVESGGGLVQAGGSLRLSCAASI

SEQ ID NO: 6095 - protein, 26 aa, Artificial Sequence
  Synthetic
QVQLVESGGGLVQVGGSLRLSCVVSG

SEQ ID NO: 6096 - protein, 26 aa, Artificial Sequence
  Synthetic
QLQLVESGGGLVQPGGSLRLSCVVSG

SEQ ID NO: 6097 - protein, 26 aa, Artificial Sequence
  Synthetic
QVQLVESGGGLVHPGGSLRLSCAPSA

SEQ ID NO: 6098 - protein, 26 aa, Artificial Sequence
  Synthetic
DVQLQESGGGLVQAGGSLRLSCAASG

SEQ ID NO: 6099 - protein, 26 aa, Artificial Sequence
  Synthetic
QVQLQESGGGLVQAGGSLRLSCQASG

SEQ ID NO: 6100 - protein, 26 aa, Artificial Sequence
  Synthetic
QVQLQESGGGLVQAGGSLTLSCAASG

SEQ ID NO: 6101 - protein, 26 aa, Artificial Sequence
  Synthetic
QVQLQESGGGLVQAGDSLRLSCVASG

SEQ ID NO: 6102 - protein, 26 aa, Artificial Sequence
  Synthetic
EVQLVESGGGLVQPGGSLRLSCAASR

SEQ ID NO: 6103 - protein, 26 aa, Artificial Sequence
  Synthetic
EVQLVESGGGLVQAGGSLRLSCAASG

SEQ ID NO: 6104 - protein, 25 aa, Artificial Sequence
  Synthetic
VQLVESGGGLVQPGGSLRLHCAASG

SEQ ID NO: 6105 - protein, 25 aa, Artificial Sequence
  Synthetic
VQLVETGGGTVQTGGSLRLSCSASG

SEQ ID NO: 6106 - protein, 26 aa, Artificial Sequence
  Synthetic
QVQLQESGGGLVQPGGSLRLSCAASG

SEQ ID NO: 6107 - protein, 26 aa, Artificial Sequence
  Synthetic
QVQLVESGGGLVQAGGSLRLSCAASG

SEQ ID NO: 6108 - protein, 26 aa, Artificial Sequence
  Synthetic
QVQLQESGGGLVQAGGSLRLSCAVSG

SEQ ID NO: 6109 - protein, 26 aa, Artificial Sequence
  Synthetic
QVQLVESGGGLVQAGGSLRLSCAASG

SEQ ID NO: 6110 - protein, 26 aa, Artificial Sequence
  Synthetic
DVQLVESGGGLVHPGGSLRLSCAASG

SEQ ID NO: 6111 - protein, 26 aa, Artificial Sequence
  Synthetic
KVQLQESGGGLVQAGGSLRLSCAASG

SEQ ID NO: 6112 - protein, 26 aa, Artificial Sequence
  Synthetic
KVQLQESGGGLVQVGGSLRLSCKASG

SEQ ID NO: 6113 - protein, 26 aa, Artificial Sequence
  Synthetic
QVQLQESGGGSVQAGGSLRLSCAASG

SEQ ID NO: 6114 - protein, 26 aa, Artificial Sequence
  Synthetic
QVQLQESGGGSVQAGGSLRLSCAASG

SEQ ID NO: 6115 - protein, 26 aa, Artificial Sequence
  Synthetic
QVQLQESGGGLVQAGGSLRLSCEASG

SEQ ID NO: 6116 - protein, 26 aa, Artificial Sequence
  Synthetic
QVQLQESGGGLVQPGGSLRLSCTASG

SEQ ID NO: 6117 - protein, 26 aa, Artificial Sequence
  Synthetic
QVQLQESGGGLVQAGGSLRLSCAASG

SEQ ID NO: 6118 - protein, 26 aa, Artificial Sequence
  Synthetic
QVQLQESGGGLVQPGGSLRLSCAASG

SEQ ID NO: 6119 - protein, 26 aa, Artificial Sequence
  Synthetic
DVQLVESGGGLVQPGGSLRLSCAASE

SEQ ID NO: 6120 - protein, 26 aa, Artificial Sequence
  Synthetic
QVQLQESGGGLVQAGGSLRLSCAASG

SEQ ID NO: 6121 - protein, 26 aa, Artificial Sequence
  Synthetic
QVQLQESGGGLVQAGGSLRLSCAASG

SEQ ID NO: 6122 - protein, 26 aa, Artificial Sequence
  Synthetic
QVQLVESGGGLVQAGGSLRLSCAASG

SEQ ID NO: 6123 - protein, 26 aa, Artificial Sequence
  Synthetic
QVQLVESGGGPVEAGGSLRLSCAASG

SEQ ID NO: 6124 - protein, 26 aa, Artificial Sequence
  Synthetic
DVQLQESGGGLVQAGGSLRLSCTGSG

SEQ ID NO: 6125 - protein, 26 aa, Artificial Sequence
  Synthetic
DVQLQESGGGSVQAGGSLTLSCTASG

SEQ ID NO: 6126 - protein, 26 aa, Artificial Sequence
  Synthetic
QVQLVESGGGLVQAGGSLRLSCAASG

SEQ ID NO: 6127 - protein, 26 aa, Artificial Sequence
  Synthetic
QVQLQESGGGLVQPGGSLRLSCAASG

SEQ ID NO: 6128 - protein, 26 aa, Artificial Sequence
  Synthetic
QVQLQESGGGLVQPGGSLRLSCAASG

SEQ ID NO: 6129 - protein, 26 aa, Artificial Sequence
  Synthetic
QVQLQESGGGLVQAGGSLRLSCAASG

SEQ ID NO: 6130 - protein, 26 aa, Artificial Sequence
  Synthetic
QVQLVESGGGLVQAGGSLRLSCTASG

SEQ ID NO: 6131 - protein, 26 aa, Artificial Sequence
  Synthetic
QVQLQESGGGSVQAGGSLRLSCAVSE

SEQ ID NO: 6132 - protein, 26 aa, Artificial Sequence
  Synthetic
QVQLQESGGGLVQPGGSLRLSCVVSG

SEQ ID NO: 6133 - protein, 26 aa, Artificial Sequence
  Synthetic
QVQLQESGGGLVQPGGSLRLSCAASG

SEQ ID NO: 6134 - protein, 26 aa, Artificial Sequence
  Synthetic
QVQLQESGGGLVQPGGSLRLSCTAPR

SEQ ID NO: 6135 - protein, 26 aa, Artificial Sequence
  Synthetic
QVQLQESGGGLVQPGGSLRLSCAASG

SEQ ID NO: 6136 - protein, 26 aa, Artificial Sequence
  Synthetic
QVQLQESGGGLVQPGGSLRLSCAASE

SEQ ID NO: 6137 - protein, 26 aa, Artificial Sequence
  Synthetic
QGQLVESGGGLVQAGGSLRLSCAASG

SEQ ID NO: 6138 - protein, 26 aa, Artificial Sequence
  Synthetic
QVQLQESGGGLVQAGDSLRLSCAASG

SEQ ID NO: 6139 - protein, 26 aa, Artificial Sequence
  Synthetic
QVQLQESGGGLVQPGGSLRLSCAASG

SEQ ID NO: 6140 - protein, 26 aa, Artificial Sequence
  Synthetic
QVQLQESGGGLVQAGGSLRLTCALSE

SEQ ID NO: 6141 - protein, 26 aa, Artificial Sequence
  Synthetic
QVQLQESGGGLVQPGGSLRLSCAASG

SEQ ID NO: 6142 - protein, 26 aa, Artificial Sequence
  Synthetic
QVQLQESGGGLVQPGGSLRLSCAASG

SEQ ID NO: 6143 - protein, 26 aa, Artificial Sequence
  Synthetic
QVQLVESGGGLVQPGGSLRLSCVASE

SEQ ID NO: 6144 - protein, 26 aa, Artificial Sequence
  Synthetic
QVQLQQSGGGLVQAGGSLRLSCAASG

SEQ ID NO: 6145 - protein, 26 aa, Artificial Sequence
  Synthetic
EVQLVESGGGLVQTGDSLRLSCAASG

SEQ ID NO: 6146 - protein, 26 aa, Artificial Sequence
  Synthetic
QVKLQQSGGGMVQTGDSLRLSCVGSR

SEQ ID NO: 6147 - protein, 26 aa, Artificial Sequence
  Synthetic
QVQLAETGGGLAQPGGSLRLSCAASG

SEQ ID NO: 6148 - protein, 26 aa, Artificial Sequence
  Synthetic
QVQLAESGGGLVQPGGSLRLSCSASG

SEQ ID NO: 6149 - protein, 26 aa, Artificial Sequence
  Synthetic
EVQLVESGGGLVQPGGSLRLSCAVSI

SEQ ID NO: 6150 - protein, 26 aa, Artificial Sequence
  Synthetic
QVKLEESGGGLVQAEGSLRLSCVTSG

SEQ ID NO: 6151 - protein, 26 aa, Artificial Sequence
  Synthetic
QVKLEESGGGLVQAGGSLRLSCAASG

SEQ ID NO: 6152 - protein, 26 aa, Artificial Sequence
  Synthetic
QVKLEESGGGLVQAGGSLRLSCAASG

SEQ ID NO: 6153 - protein, 26 aa, Artificial Sequence
  Synthetic
QVKLEESGGGLVQAGGSLRLSCSPSD

SEQ ID NO: 6154 - protein, 26 aa, Artificial Sequence
  Synthetic
QVQLQESGGGLVQAGGSLRLSCAVSG

SEQ ID NO: 6155 - protein, 26 aa, Artificial Sequence
  Synthetic
QVQLQESGGGLVMTGGSLRLSCAVSG

SEQ ID NO: 6156 - protein, 26 aa, Artificial Sequence
  Synthetic
QVQLVESGGGLVQAGGSLRLFCAASG

SEQ ID NO: 6157 - protein, 26 aa, Artificial Sequence
  Synthetic
DVQLVESGGGLVQAGGSLRLSCTASG

SEQ ID NO: 6158 - protein, 26 aa, Artificial Sequence
  Synthetic
QLQLVESGGGLVQAGGSLRLSCVASG

SEQ ID NO: 6159 - protein, 26 aa, Artificial Sequence
  Synthetic
QVQLVESGGGLVQAGGSLRLSCAASG

SEQ ID NO: 6160 - protein, 26 aa, Artificial Sequence
  Synthetic
QVQLAETGGGLVQPGGARTLSCAASE

SEQ ID NO: 6161 - protein, 24 aa, Artificial Sequence
  Synthetic
QLVETGGGLVQPGGSLRLSCAASG

SEQ ID NO: 6162 - protein, 26 aa, Artificial Sequence
  Synthetic
QVQLVETGGGGLVQAGGSLRLSCAAS

SEQ ID NO: 6163 - protein, 25 aa, Artificial Sequence
  Synthetic
VQLAETGGGLAQAGGSLRLSCAASG

SEQ ID NO: 6164 - protein, 26 aa, Artificial Sequence
  Synthetic
EVQLVESGGGLVQAGGSLRLSCAASA

SEQ ID NO: 6165 - protein, 25 aa, Artificial Sequence
  Synthetic
VQLVETGGGVVQAGGSLRLSCVASG

SEQ ID NO: 6166 - protein, 24 aa, Artificial Sequence
  Synthetic
RGSEFEVQLVQAGGSLRLSCAASG

SEQ ID NO: 6167 - protein, 26 aa, Artificial Sequence
  Synthetic
QVQLQESGGGLVQPGGSLRLSCAASG

SEQ ID NO: 6168 - protein, 26 aa, Artificial Sequence
  Synthetic
QVQLVESGGALVQPGGSLRLSCAASG

SEQ ID NO: 6169 - protein, 26 aa, Artificial Sequence
  Synthetic
QVQLQESGGGLVQPGGSLRLSCTASG

SEQ ID NO: 6170 - protein, 26 aa, Artificial Sequence
  Synthetic
QVQLVETGGGLVQAGGSLRLSCAASG

SEQ ID NO: 6171 - protein, 7 aa, Artificial Sequence
  Synthetic
DTFSSYS

SEQ ID NO: 6172 - protein, 5 aa, Artificial Sequence
  Synthetic
LSTTV

SEQ ID NO: 6173 - protein, 7 aa, Artificial Sequence
  Synthetic
IDSSSYC

SEQ ID NO: 6174 - protein, 7 aa, Artificial Sequence
  Synthetic
YTDSRYC

SEQ ID NO: 6175 - protein, 7 aa, Artificial Sequence
  Synthetic
YTQSSAC

SEQ ID NO: 6176 - protein, 7 aa, Artificial Sequence
  Synthetic
FTFSHGY

SEQ ID NO: 6177 - protein, 7 aa, Artificial Sequence
  Synthetic
YQYSLLC

SEQ ID NO: 6178 - protein, 4 aa, Artificial Sequence
  Synthetic
ITYC

SEQ ID NO: 6179 - protein, 6 aa, Artificial Sequence
  Synthetic
YIPSAN

SEQ ID NO: 6180 - protein, 7 aa, Artificial Sequence
  Synthetic
FPVNRYS

SEQ ID NO: 6181 - protein, 10 aa, Artificial Sequence
  Synthetic
GSEYSYSTFS

SEQ ID NO: 6182 - protein, 4 aa, Artificial Sequence
  Synthetic
DYYA

SEQ ID NO: 6183 - protein, 7 aa, Artificial Sequence
  Synthetic
YAVSRYS

SEQ ID NO: 6184 - protein, 7 aa, Artificial Sequence
  Synthetic
YAVSLYS

SEQ ID NO: 6185 - protein, 7 aa, Artificial Sequence
  Synthetic
FTLDSYA

SEQ ID NO: 6186 - protein, 7 aa, Artificial Sequence
  Synthetic
YIFNSCG

SEQ ID NO: 6187 - protein, 7 aa, Artificial Sequence
  Synthetic
YHHPYIY

SEQ ID NO: 6188 - protein, 7 aa, Artificial Sequence
  Synthetic
YKDRNYC

SEQ ID NO: 6189 - protein, 7 aa, Artificial Sequence
  Synthetic
ATSSSNC

SEQ ID NO: 6190 - protein, 7 aa, Artificial Sequence
  Synthetic
YTIGPYC

SEQ ID NO: 6191 - protein, 7 aa, Artificial Sequence
  Synthetic
FTYSRKY

SEQ ID NO: 6192 - protein, 7 aa, Artificial Sequence
  Synthetic
YTFSSYP

SEQ ID NO: 6193 - protein, 4 aa, Artificial Sequence
  Synthetic
YTDT

SEQ ID NO: 6194 - protein, 7 aa, Artificial Sequence
  Synthetic
NTLCTYD

SEQ ID NO: 6195 - protein, 7 aa, Artificial Sequence
  Synthetic
YTIGPYC

SEQ ID NO: 6196 - protein, 4 aa, Artificial Sequence
  Synthetic
YTYI

SEQ ID NO: 6197 - protein, 7 aa, Artificial Sequence
  Synthetic
YTVSTYC

SEQ ID NO: 6198 - protein, 7 aa, Artificial Sequence
  Synthetic
YAYTYIY

SEQ ID NO: 6199 - protein, 10 aa, Artificial Sequence
  Synthetic
YMYSTYSTYC

SEQ ID NO: 6200 - protein, 7 aa, Artificial Sequence
  Synthetic
LTISNYC

SEQ ID NO: 6201 - protein, 7 aa, Artificial Sequence
  Synthetic
VTSTRPC

SEQ ID NO: 6202 - protein, 7 aa, Artificial Sequence
  Synthetic
STDSIEY

SEQ ID NO: 6203 - protein, 7 aa, Artificial Sequence
  Synthetic
STDSIEY

SEQ ID NO: 6204 - protein, 7 aa, Artificial Sequence
  Synthetic
HTYSTYC

SEQ ID NO: 6205 - protein, 7 aa, Artificial Sequence
  Synthetic
DTFSGYL

SEQ ID NO: 6206 - protein, 7 aa, Artificial Sequence
  Synthetic
YIYSTYC

SEQ ID NO: 6207 - protein, 7 aa, Artificial Sequence
  Synthetic
FTFDDSD

SEQ ID NO: 6208 - protein, 7 aa, Artificial Sequence
  Synthetic
WPYSTYS

SEQ ID NO: 6209 - protein, 7 aa, Artificial Sequence
  Synthetic
YTDSNYY

SEQ ID NO: 6210 - protein, 7 aa, Artificial Sequence
  Synthetic
RTFSSYN

SEQ ID NO: 6211 - protein, 7 aa, Artificial Sequence
  Synthetic
STYSPCT

SEQ ID NO: 6212 - protein, 7 aa, Artificial Sequence
  Synthetic
HTYSTYA

SEQ ID NO: 6213 - protein, 7 aa, Artificial Sequence
  Synthetic
YPWTYIY

SEQ ID NO: 6214 - protein, 7 aa, Artificial Sequence
  Synthetic
YIASINY

SEQ ID NO: 6215 - protein, 7 aa, Artificial Sequence
  Synthetic
VTYKNYC

SEQ ID NO: 6216 - protein, 7 aa, Artificial Sequence
  Synthetic
RTFSSTV

SEQ ID NO: 6217 - protein, 7 aa, Artificial Sequence
  Synthetic
FTLDYYS

SEQ ID NO: 6218 - protein, 7 aa, Artificial Sequence
  Synthetic
SIFALNI

SEQ ID NO: 6219 - protein, 7 aa, Artificial Sequence
  Synthetic
RTSRSYG

SEQ ID NO: 6220 - protein, 7 aa, Artificial Sequence
  Synthetic
RTFSSYA

SEQ ID NO: 6221 - protein, 7 aa, Artificial Sequence
  Synthetic
RTFSSYA

SEQ ID NO: 6222 - protein, 7 aa, Artificial Sequence
  Synthetic
RTFNSAV

SEQ ID NO: 6223 - protein, 7 aa, Artificial Sequence
  Synthetic
RTFSMDP

SEQ ID NO: 6224 - protein, 7 aa, Artificial Sequence
  Synthetic
RTFSRYP

SEQ ID NO: 6225 - protein, 7 aa, Artificial Sequence
  Synthetic
RTFSSYA

SEQ ID NO: 6226 - protein, 10 aa, Artificial Sequence
  Synthetic
FDFDNFDDYA

SEQ ID NO: 6227 - protein, 7 aa, Artificial Sequence
  Synthetic
RISSSYD

SEQ ID NO: 6228 - protein, 7 aa, Artificial Sequence
  Synthetic
RLTVDYA

SEQ ID NO: 6229 - protein, 7 aa, Artificial Sequence
  Synthetic
RLTVDYA

SEQ ID NO: 6230 - protein, 7 aa, Artificial Sequence
  Synthetic
NTASIRA

SEQ ID NO: 6231 - protein, 7 aa, Artificial Sequence
  Synthetic
RTFSSNV

SEQ ID NO: 6232 - protein, 7 aa, Artificial Sequence
  Synthetic
FTFGTSN

SEQ ID NO: 6233 - protein, 7 aa, Artificial Sequence
  Synthetic
SLFSILR

SEQ ID NO: 6234 - protein, 8 aa, Artificial Sequence
  Synthetic
GYPHPYLH

SEQ ID NO: 6235 - protein, 7 aa, Artificial Sequence
  Synthetic
YPHPYLH

SEQ ID NO: 6236 - protein, 7 aa, Artificial Sequence
  Synthetic
YPHPYLH

SEQ ID NO: 6237 - protein, 7 aa, Artificial Sequence
  Synthetic
RTFSRAV

SEQ ID NO: 6238 - protein, 7 aa, Artificial Sequence
  Synthetic
SIFSINS

SEQ ID NO: 6239 - protein, 7 aa, Artificial Sequence
  Synthetic
RNLRMYR

SEQ ID NO: 6240 - protein, 7 aa, Artificial Sequence
  Synthetic
RTFTSFA

SEQ ID NO: 6241 - protein, 7 aa, Artificial Sequence
  Synthetic
RTFSNYR

SEQ ID NO: 6242 - protein, 7 aa, Artificial Sequence
  Synthetic
RTGSNWC

SEQ ID NO: 6243 - protein, 7 aa, Artificial Sequence
  Synthetic
RTSSSHD

SEQ ID NO: 6244 - protein, 7 aa, Artificial Sequence
  Synthetic
RTLSSYA

SEQ ID NO: 6245 - protein, 4 aa, Artificial Sequence
  Synthetic
YTSR

SEQ ID NO: 6246 - protein, 18 aa, Artificial Sequence
  Synthetic
LAFDGGAMGSEHRLTAGA

SEQ ID NO: 6247 - protein, 7 aa, Artificial Sequence
  Synthetic
ITFASEA

SEQ ID NO: 6248 - protein, 7 aa, Artificial Sequence
  Synthetic
RTSSLYS

SEQ ID NO: 6249 - protein, 12 aa, Artificial Sequence
  Synthetic
RTFSDHSGYTYT

SEQ ID NO: 6250 - protein, 7 aa, Artificial Sequence
  Synthetic
RSLSNYY

SEQ ID NO: 6251 - protein, 7 aa, Artificial Sequence
  Synthetic
SIFSIDT

SEQ ID NO: 6252 - protein, 5 aa, Artificial Sequence
  Synthetic
RTSYP

SEQ ID NO: 6253 - protein, 7 aa, Artificial Sequence
  Synthetic
SIFSLND

SEQ ID NO: 6254 - protein, 7 aa, Artificial Sequence
  Synthetic
SRFDNYA

SEQ ID NO: 6255 - protein, 7 aa, Artificial Sequence
  Synthetic
SIFSGNV

SEQ ID NO: 6256 - protein, 7 aa, Artificial Sequence
  Synthetic
SIYSLIA

SEQ ID NO: 6257 - protein, 7 aa, Artificial Sequence
  Synthetic
FTFSRYA

SEQ ID NO: 6258 - protein, 7 aa, Artificial Sequence
  Synthetic
NIVSIDA

SEQ ID NO: 6259 - protein, 7 aa, Artificial Sequence
  Synthetic
RTFSNDH

SEQ ID NO: 6260 - protein, 7 aa, Artificial Sequence
  Synthetic
SISGIVV

SEQ ID NO: 6261 - protein, 7 aa, Artificial Sequence
  Synthetic
IMLGYFT

SEQ ID NO: 6262 - protein, 7 aa, Artificial Sequence
  Synthetic
SAVSDYA

SEQ ID NO: 6263 - protein, 7 aa, Artificial Sequence
  Synthetic
NIIGGNH

SEQ ID NO: 6264 - protein, 8 aa, Artificial Sequence
  Synthetic
ERAFSNYA

SEQ ID NO: 6265 - protein, 7 aa, Artificial Sequence
  Synthetic
FTLDDYA

SEQ ID NO: 6266 - protein, 7 aa, Artificial Sequence
  Synthetic
FTLDYLA

SEQ ID NO: 6267 - protein, 7 aa, Artificial Sequence
  Synthetic
RTFSWSA

SEQ ID NO: 6268 - protein, 7 aa, Artificial Sequence
  Synthetic
STFSNYA

SEQ ID NO: 6269 - protein, 7 aa, Artificial Sequence
  Synthetic
FSFDDYA

SEQ ID NO: 6270 - protein, 7 aa, Artificial Sequence
  Synthetic
RTFSSYA

SEQ ID NO: 6271 - protein, 7 aa, Artificial Sequence
  Synthetic
FTFSSAI

SEQ ID NO: 6272 - protein, 7 aa, Artificial Sequence
  Synthetic
RSSRSWA

SEQ ID NO: 6273 - protein, 7 aa, Artificial Sequence
  Synthetic
RTFSSYA

SEQ ID NO: 6274 - protein, 7 aa, Artificial Sequence
  Synthetic
IIFSVYK

SEQ ID NO: 6275 - protein, 7 aa, Artificial Sequence
  Synthetic
RTFSSDV

SEQ ID NO: 6276 - protein, 6 aa, Artificial Sequence
  Synthetic
PFSPNS

SEQ ID NO: 6277 - protein, 7 aa, Artificial Sequence
  Synthetic
SISSVDV

SEQ ID NO: 6278 - protein, 7 aa, Artificial Sequence
  Synthetic
RTFSTYA

SEQ ID NO: 6279 - protein, 7 aa, Artificial Sequence
  Synthetic
YTYRKYC

SEQ ID NO: 6280 - protein, 7 aa, Artificial Sequence
  Synthetic
RTSSAYA

SEQ ID NO: 6281 - protein, 7 aa, Artificial Sequence
  Synthetic
RTLGDYG

SEQ ID NO: 6282 - protein, 7 aa, Artificial Sequence
  Synthetic
SIFSINT

SEQ ID NO: 6283 - protein, 7 aa, Artificial Sequence
  Synthetic
FTFDSYH

SEQ ID NO: 6284 - protein, 10 aa, Artificial Sequence
  Synthetic
RAASGHGHYG

SEQ ID NO: 6285 - protein, 7 aa, Artificial Sequence
  Synthetic
NTFSGGF

SEQ ID NO: 6286 - protein, 7 aa, Artificial Sequence
  Synthetic
RTFSTYA

SEQ ID NO: 6287 - protein, 7 aa, Artificial Sequence
  Synthetic
RTGSTYD

SEQ ID NO: 6288 - protein, 7 aa, Artificial Sequence
  Synthetic
DSIGTYV

SEQ ID NO: 6289 - protein, 7 aa, Artificial Sequence
  Synthetic
SIFSIDY

SEQ ID NO: 6290 - protein, 7 aa, Artificial Sequence
  Synthetic
SIFRIND

SEQ ID NO: 6291 - protein, 7 aa, Artificial Sequence
  Synthetic
FTSDDYV

SEQ ID NO: 6292 - protein, 7 aa, Artificial Sequence
  Synthetic
RTFTIYA

SEQ ID NO: 6293 - protein, 7 aa, Artificial Sequence
  Synthetic
SIFSLNA

SEQ ID NO: 6294 - protein, 7 aa, Artificial Sequence
  Synthetic
SGNSINV

SEQ ID NO: 6295 - protein, 7 aa, Artificial Sequence
  Synthetic
FPVNRYS

SEQ ID NO: 6296 - protein, 7 aa, Artificial Sequence
  Synthetic
RTFSSYT

SEQ ID NO: 6297 - protein, 7 aa, Artificial Sequence
  Synthetic
RTFSTAA

SEQ ID NO: 6298 - protein, 7 aa, Artificial Sequence
  Synthetic
RTFSTAA

SEQ ID NO: 6299 - protein, 7 aa, Artificial Sequence
  Synthetic
RTFSDYD

SEQ ID NO: 6300 - protein, 7 aa, Artificial Sequence
  Synthetic
RTFNGWT

SEQ ID NO: 6301 - protein, 7 aa, Artificial Sequence
  Synthetic
RTFSRYA

SEQ ID NO: 6302 - protein, 7 aa, Artificial Sequence
  Synthetic
SIFSINA

SEQ ID NO: 6303 - protein, 7 aa, Artificial Sequence
  Synthetic
HTFNYPI

SEQ ID NO: 6304 - protein, 7 aa, Artificial Sequence
  Synthetic
RTFSMYT

SEQ ID NO: 6305 - protein, 7 aa, Artificial Sequence
  Synthetic
RTGSIYT

SEQ ID NO: 6306 - protein, 7 aa, Artificial Sequence
  Synthetic
RTFSIYT

SEQ ID NO: 6307 - protein, 7 aa, Artificial Sequence
  Synthetic
STFSTYT

SEQ ID NO: 6308 - protein, 4 aa, Artificial Sequence
  Synthetic
RTYA

SEQ ID NO: 6309 - protein, 7 aa, Artificial Sequence
  Synthetic
FTLENKA

SEQ ID NO: 6310 - protein, 7 aa, Artificial Sequence
  Synthetic
ITFSSYT

SEQ ID NO: 6311 - protein, 7 aa, Artificial Sequence
  Synthetic
SIFNMYA

SEQ ID NO: 6312 - protein, 7 aa, Artificial Sequence
  Synthetic
FPVNRYS

SEQ ID NO: 6313 - protein, 7 aa, Artificial Sequence
  Synthetic
SGFNNNA

SEQ ID NO: 6314 - protein, 7 aa, Artificial Sequence
  Synthetic
SISRFNA

SEQ ID NO: 6315 - protein, 7 aa, Artificial Sequence
  Synthetic
GTFSTFN

SEQ ID NO: 6316 - protein, 7 aa, Artificial Sequence
  Synthetic
RTFSPYV

SEQ ID NO: 6317 - protein, 7 aa, Artificial Sequence
  Synthetic
RTFSSRA

SEQ ID NO: 6318 - protein, 7 aa, Artificial Sequence
  Synthetic
RPFSTFD

SEQ ID NO: 6319 - protein, 7 aa, Artificial Sequence
  Synthetic
FFFDTVT

SEQ ID NO: 6320 - protein, 7 aa, Artificial Sequence
  Synthetic
YIFSSYA

SEQ ID NO: 6321 - protein, 7 aa, Artificial Sequence
  Synthetic
RSFSLYA

SEQ ID NO: 6322 - protein, 7 aa, Artificial Sequence
  Synthetic
VIFGINA

SEQ ID NO: 6323 - protein, 7 aa, Artificial Sequence
  Synthetic
SIRSINN

SEQ ID NO: 6324 - protein, 7 aa, Artificial Sequence
  Synthetic
STFAIIA

SEQ ID NO: 6325 - protein, 7 aa, Artificial Sequence
  Synthetic
STSSINA

SEQ ID NO: 6326 - protein, 7 aa, Artificial Sequence
  Synthetic
SIFRIDA

SEQ ID NO: 6327 - protein, 7 aa, Artificial Sequence
  Synthetic
RAFSWYV

SEQ ID NO: 6328 - protein, 7 aa, Artificial Sequence
  Synthetic
RTFSSFV

SEQ ID NO: 6329 - protein, 7 aa, Artificial Sequence
  Synthetic
RTFSSYN

SEQ ID NO: 6330 - protein, 7 aa, Artificial Sequence
  Synthetic
LTFNRYN

SEQ ID NO: 6331 - protein, 7 aa, Artificial Sequence
  Synthetic
RIFSTNV

SEQ ID NO: 6332 - protein, 7 aa, Artificial Sequence
  Synthetic
RTFTAYI

SEQ ID NO: 6333 - protein, 7 aa, Artificial Sequence
  Synthetic
RTFSTYD

SEQ ID NO: 6334 - protein, 7 aa, Artificial Sequence
  Synthetic
HTAGQYT

SEQ ID NO: 6335 - protein, 7 aa, Artificial Sequence
  Synthetic
RTFTSYA

SEQ ID NO: 6336 - protein, 7 aa, Artificial Sequence
  Synthetic
RTFSSYS

SEQ ID NO: 6337 - protein, 7 aa, Artificial Sequence
  Synthetic
STFSDYA

SEQ ID NO: 6338 - protein, 7 aa, Artificial Sequence
  Synthetic
SILYFNR

SEQ ID NO: 6339 - protein, 7 aa, Artificial Sequence
  Synthetic
FTFDDYT

SEQ ID NO: 6340 - protein, 7 aa, Artificial Sequence
  Synthetic
RNFFINI

SEQ ID NO: 6341 - protein, 7 aa, Artificial Sequence
  Synthetic
AFFRAGP

SEQ ID NO: 6342 - protein, 7 aa, Artificial Sequence
  Synthetic
SISDFAA

SEQ ID NO: 6343 - protein, 7 aa, Artificial Sequence
  Synthetic
LIVSNYA

SEQ ID NO: 6344 - protein, 7 aa, Artificial Sequence
  Synthetic
IIFRSNG

SEQ ID NO: 6345 - protein, 7 aa, Artificial Sequence
  Synthetic
GIVHISS

SEQ ID NO: 6346 - protein, 7 aa, Artificial Sequence
  Synthetic
RTSDTDG

SEQ ID NO: 6347 - protein, 7 aa, Artificial Sequence
  Synthetic
TIFRLYD

SEQ ID NO: 6348 - protein, 7 aa, Artificial Sequence
  Synthetic
RTFSEYA

SEQ ID NO: 6349 - protein, 7 aa, Artificial Sequence
  Synthetic
SIFSINA

SEQ ID NO: 6350 - protein, 7 aa, Artificial Sequence
  Synthetic
SIVNFET

SEQ ID NO: 6351 - protein, 7 aa, Artificial Sequence
  Synthetic
GTLEHYA

SEQ ID NO: 6352 - protein, 7 aa, Artificial Sequence
  Synthetic
GDFSRNA

SEQ ID NO: 6353 - protein, 11 aa, Artificial Sequence
  Synthetic
FGTWFRFDENT

SEQ ID NO: 6354 - protein, 7 aa, Artificial Sequence
  Synthetic
FTLGYYA

SEQ ID NO: 6355 - protein, 7 aa, Artificial Sequence
  Synthetic
RTFTTYL

SEQ ID NO: 6356 - protein, 7 aa, Artificial Sequence
  Synthetic
SIFSPNA

SEQ ID NO: 6357 - protein, 7 aa, Artificial Sequence
  Synthetic
SIFSGNA

SEQ ID NO: 6358 - protein, 7 aa, Artificial Sequence
  Synthetic
FTLDHSA

SEQ ID NO: 6359 - protein, 7 aa, Artificial Sequence
  Synthetic
RTFTNYG

SEQ ID NO: 6360 - protein, 7 aa, Artificial Sequence
  Synthetic
FTFSSYA

SEQ ID NO: 6361 - protein, 7 aa, Artificial Sequence
  Synthetic
NIFSFNV

SEQ ID NO: 6362 - protein, 7 aa, Artificial Sequence
  Synthetic
FRLQYYT

SEQ ID NO: 6363 - protein, 10 aa, Artificial Sequence
  Synthetic
FSGFTLDYYA

SEQ ID NO: 6364 - protein, 7 aa, Artificial Sequence
  Synthetic
FTLDHYD

SEQ ID NO: 6365 - protein, 7 aa, Artificial Sequence
  Synthetic
FTDDYYA

SEQ ID NO: 6366 - protein, 7 aa, Artificial Sequence
  Synthetic
SFFMSNV

SEQ ID NO: 6367 - protein, 7 aa, Artificial Sequence
  Synthetic
RTLSSYA

SEQ ID NO: 6368 - protein, 7 aa, Artificial Sequence
  Synthetic
SIFTIYA

SEQ ID NO: 6369 - protein, 7 aa, Artificial Sequence
  Synthetic
FTLDYYA

SEQ ID NO: 6370 - protein, 7 aa, Artificial Sequence
  Synthetic
RDISFFA

SEQ ID NO: 6371 - protein, 7 aa, Artificial Sequence
  Synthetic
SALDYNA

SEQ ID NO: 6372 - protein, 7 aa, Artificial Sequence
  Synthetic
YTLANYA

SEQ ID NO: 6373 - protein, 7 aa, Artificial Sequence
  Synthetic
RPFRNYR

SEQ ID NO: 6374 - protein, 7 aa, Artificial Sequence
  Synthetic
RTFSNSI

SEQ ID NO: 6375 - protein, 7 aa, Artificial Sequence
  Synthetic
RTFSSYA

SEQ ID NO: 6376 - protein, 7 aa, Artificial Sequence
  Synthetic
FTLDDQP

SEQ ID NO: 6377 - protein, 7 aa, Artificial Sequence
  Synthetic
LEMQSHA

SEQ ID NO: 6378 - protein, 7 aa, Artificial Sequence
  Synthetic
RDFSMYM

SEQ ID NO: 6379 - protein, 7 aa, Artificial Sequence
  Synthetic
RTGSRHA

SEQ ID NO: 6380 - protein, 7 aa, Artificial Sequence
  Synthetic
FTLDNYN

SEQ ID NO: 6381 - protein, 7 aa, Artificial Sequence
  Synthetic
RMFSINS

SEQ ID NO: 6382 - protein, 7 aa, Artificial Sequence
  Synthetic
FTFRTYA

SEQ ID NO: 6383 - protein, 7 aa, Artificial Sequence
  Synthetic
FTFDDYS

SEQ ID NO: 6384 - protein, 10 aa, Artificial Sequence
  Synthetic
VTISALNAMA

SEQ ID NO: 6385 - protein, 7 aa, Artificial Sequence
  Synthetic
TTFSKNA

SEQ ID NO: 6386 - protein, 7 aa, Artificial Sequence
  Synthetic
FSLDNYA

SEQ ID NO: 6387 - protein, 7 aa, Artificial Sequence
  Synthetic
RTFRAYA

SEQ ID NO: 6388 - protein, 7 aa, Artificial Sequence
  Synthetic
RTISSSP

SEQ ID NO: 6389 - protein, 7 aa, Artificial Sequence
  Synthetic
RTFSLTT

SEQ ID NO: 6390 - protein, 7 aa, Artificial Sequence
  Synthetic
LTFSRYA

SEQ ID NO: 6391 - protein, 7 aa, Artificial Sequence
  Synthetic
NINSMHV

SEQ ID NO: 6392 - protein, 9 aa, Artificial Sequence
  Synthetic
LTYDLDYYY

SEQ ID NO: 6393 - protein, 7 aa, Artificial Sequence
  Synthetic
SDISGIA

SEQ ID NO: 6394 - protein, 7 aa, Artificial Sequence
  Synthetic
SDFNTYI

SEQ ID NO: 6395 - protein, 13 aa, Artificial Sequence
  Synthetic
SLPSTPFNPFNNM

SEQ ID NO: 6396 - protein, 7 aa, Artificial Sequence
  Synthetic
ATGSTYD

SEQ ID NO: 6397 - protein, 7 aa, Artificial Sequence
  Synthetic
NIFRIND

SEQ ID NO: 6398 - protein, 7 aa, Artificial Sequence
  Synthetic
RTFSNNA

SEQ ID NO: 6399 - protein, 7 aa, Artificial Sequence
  Synthetic
RAFSSYG

SEQ ID NO: 6400 - protein, 7 aa, Artificial Sequence
  Synthetic
SIISNNA

SEQ ID NO: 6401 - protein, 7 aa, Artificial Sequence
  Synthetic
RSFSRDA

SEQ ID NO: 6402 - protein, 7 aa, Artificial Sequence
  Synthetic
SIASIYR

SEQ ID NO: 6403 - protein, 7 aa, Artificial Sequence
  Synthetic
GSFSRNA

SEQ ID NO: 6404 - protein, 7 aa, Artificial Sequence
  Synthetic
SISSITT

SEQ ID NO: 6405 - protein, 7 aa, Artificial Sequence
  Synthetic
LTFSRYV

SEQ ID NO: 6406 - protein, 7 aa, Artificial Sequence
  Synthetic
SIFRLST

SEQ ID NO: 6407 - protein, 7 aa, Artificial Sequence
  Synthetic
FTFEDYA

SEQ ID NO: 6408 - protein, 7 aa, Artificial Sequence
  Synthetic
RTFSDYA

SEQ ID NO: 6409 - protein, 7 aa, Artificial Sequence
  Synthetic
GTFSINT

SEQ ID NO: 6410 - protein, 7 aa, Artificial Sequence
  Synthetic
FTFRSSA

SEQ ID NO: 6411 - protein, 7 aa, Artificial Sequence
  Synthetic
YTSGRDS

SEQ ID NO: 6412 - protein, 7 aa, Artificial Sequence
  Synthetic
YTYSSNC

SEQ ID NO: 6413 - protein, 7 aa, Artificial Sequence
  Synthetic
NVDRIDA

SEQ ID NO: 6414 - protein, 7 aa, Artificial Sequence
  Synthetic
SISSINA

SEQ ID NO: 6415 - protein, 7 aa, Artificial Sequence
  Synthetic
LTFDTYA

SEQ ID NO: 6416 - protein, 7 aa, Artificial Sequence
  Synthetic
SIFSIYA

SEQ ID NO: 6417 - protein, 7 aa, Artificial Sequence
  Synthetic
SILSFNH

SEQ ID NO: 6418 - protein, 7 aa, Artificial Sequence
  Synthetic
STFGIRT

SEQ ID NO: 6419 - protein, 7 aa, Artificial Sequence
  Synthetic
GTFSTYG

SEQ ID NO: 6420 - protein, 7 aa, Artificial Sequence
  Synthetic
RTFSRSS

SEQ ID NO: 6421 - protein, 7 aa, Artificial Sequence
  Synthetic
RSFSNSV

SEQ ID NO: 6422 - protein, 7 aa, Artificial Sequence
  Synthetic
RTFRNYP

SEQ ID NO: 6423 - protein, 7 aa, Artificial Sequence
  Synthetic
LLFRLAS

SEQ ID NO: 6424 - protein, 7 aa, Artificial Sequence
  Synthetic
RTFSSYV

SEQ ID NO: 6425 - protein, 7 aa, Artificial Sequence
  Synthetic
FTLDYYA

SEQ ID NO: 6426 - protein, 7 aa, Artificial Sequence
  Synthetic
FTFSNYA

SEQ ID NO: 6427 - protein, 7 aa, Artificial Sequence
  Synthetic
RTFSSYV

SEQ ID NO: 6428 - protein, 7 aa, Artificial Sequence
  Synthetic
RTFSDYD

SEQ ID NO: 6429 - protein, 4 aa, Artificial Sequence
  Synthetic
NTGR

SEQ ID NO: 6430 - protein, 7 aa, Artificial Sequence
  Synthetic
DRRTIYT

SEQ ID NO: 6431 - protein, 7 aa, Artificial Sequence
  Synthetic
FTLGYYP

SEQ ID NO: 6432 - protein, 7 aa, Artificial Sequence
  Synthetic
IIFFMYD

SEQ ID NO: 6433 - protein, 7 aa, Artificial Sequence
  Synthetic
SVSRTYV

SEQ ID NO: 6434 - protein, 7 aa, Artificial Sequence
  Synthetic
TALTYYA

SEQ ID NO: 6435 - protein, 7 aa, Artificial Sequence
  Synthetic
IIFRELG

SEQ ID NO: 6436 - protein, 7 aa, Artificial Sequence
  Synthetic
RTWSIYG

SEQ ID NO: 6437 - protein, 7 aa, Artificial Sequence
  Synthetic
TIFSRNI

SEQ ID NO: 6438 - protein, 7 aa, Artificial Sequence
  Synthetic
RTSTSYA

SEQ ID NO: 6439 - protein, 7 aa, Artificial Sequence
  Synthetic
FTLDYYY

SEQ ID NO: 6440 - protein, 7 aa, Artificial Sequence
  Synthetic
FTLDYYY

SEQ ID NO: 6441 - protein, 10 aa, Artificial Sequence
  Synthetic
FSRFTLDYYA

SEQ ID NO: 6442 - protein, 7 aa, Artificial Sequence
  Synthetic
RTHTPYA

SEQ ID NO: 6443 - protein, 7 aa, Artificial Sequence
  Synthetic
RTYTPYA

SEQ ID NO: 6444 - protein, 7 aa, Artificial Sequence
  Synthetic
RALSSTI

SEQ ID NO: 6445 - protein, 7 aa, Artificial Sequence
  Synthetic
FTFSRAV

SEQ ID NO: 6446 - protein, 7 aa, Artificial Sequence
  Synthetic
GVFIIYN

SEQ ID NO: 6447 - protein, 7 aa, Artificial Sequence
  Synthetic
SIFDIYA

SEQ ID NO: 6448 - protein, 7 aa, Artificial Sequence
  Synthetic
RIEGILL

SEQ ID NO: 6449 - protein, 7 aa, Artificial Sequence
  Synthetic
STFSIYT

SEQ ID NO: 6450 - protein, 7 aa, Artificial Sequence
  Synthetic
RTYSTYA

SEQ ID NO: 6451 - protein, 7 aa, Artificial Sequence
  Synthetic
RTFSAYA

SEQ ID NO: 6452 - protein, 7 aa, Artificial Sequence
  Synthetic
RTFSNYY

SEQ ID NO: 6453 - protein, 7 aa, Artificial Sequence
  Synthetic
RTIDVSV

SEQ ID NO: 6454 - protein, 7 aa, Artificial Sequence
  Synthetic
SIFRVNA

SEQ ID NO: 6455 - protein, 7 aa, Artificial Sequence
  Synthetic
FTFDDYT

SEQ ID NO: 6456 - protein, 7 aa, Artificial Sequence
  Synthetic
RTFRSNA

SEQ ID NO: 6457 - protein, 7 aa, Artificial Sequence
  Synthetic
RAIRSYF

SEQ ID NO: 6458 - protein, 7 aa, Artificial Sequence
  Synthetic
SISSFYF

SEQ ID NO: 6459 - protein, 7 aa, Artificial Sequence
  Synthetic
SIFSINA

SEQ ID NO: 6460 - protein, 8 aa, Artificial Sequence
  Synthetic
GSISSLNA

SEQ ID NO: 6461 - protein, 7 aa, Artificial Sequence
  Synthetic
SIFSINA

SEQ ID NO: 6462 - protein, 7 aa, Artificial Sequence
  Synthetic
SIFRALN

SEQ ID NO: 6463 - protein, 14 aa, Artificial Sequence
  Synthetic
RTFSVSGRTFSDHG

SEQ ID NO: 6464 - protein, 7 aa, Artificial Sequence
  Synthetic
GTFATSP

SEQ ID NO: 6465 - protein, 7 aa, Artificial Sequence
  Synthetic
FTFSTYA

SEQ ID NO: 6466 - protein, 7 aa, Artificial Sequence
  Synthetic
FPVNRYS

SEQ ID NO: 6467 - protein, 7 aa, Artificial Sequence
  Synthetic
FTLAEYG

SEQ ID NO: 6468 - protein, 7 aa, Artificial Sequence
  Synthetic
RTFNNDV

SEQ ID NO: 6469 - protein, 19 aa, Artificial Sequence
  Synthetic
MAWFRQAPGKECELVSNIL

SEQ ID NO: 6470 - protein, 19 aa, Artificial Sequence
  Synthetic
MAWFRQAPGKEREGVAAIY

SEQ ID NO: 6471 - protein, 19 aa, Artificial Sequence
  Synthetic
MGWFRQRPGKEREGVARIN

SEQ ID NO: 6472 - protein, 19 aa, Artificial Sequence
  Synthetic
MAWFRQAPGKEREWVARIN

SEQ ID NO: 6473 - protein, 19 aa, Artificial Sequence
  Synthetic
MGWFRQAPGKEREGVAGIS

SEQ ID NO: 6474 - protein, 19 aa, Artificial Sequence
  Synthetic
MAWFRQAPEKEREWVACVR

SEQ ID NO: 6475 - protein, 19 aa, Artificial Sequence
  Synthetic
MAWFRQVLGEGREGVAFIT

SEQ ID NO: 6476 - protein, 19 aa, Artificial Sequence
  Synthetic
MGWYRQVRGKEREGVAFIK

SEQ ID NO: 6477 - protein, 19 aa, Artificial Sequence
  Synthetic
CMRWFRQAPKEREWVASVL

SEQ ID NO: 6478 - protein, 19 aa, Artificial Sequence
  Synthetic
MRWYRQAPGKEREWVAGMS

SEQ ID NO: 6479 - protein, 19 aa, Artificial Sequence
  Synthetic
LGWFRQAPGQEREAVAAIA

SEQ ID NO: 6480 - protein, 19 aa, Artificial Sequence
  Synthetic
IGWFRQAPGKEREGVAAIS

SEQ ID NO: 6481 - protein, 19 aa, Artificial Sequence
  Synthetic
MGWFRQAPGKENEGVAAID

SEQ ID NO: 6482 - protein, 19 aa, Artificial Sequence
  Synthetic
MGWFRQAPGKELEGVAGIS

SEQ ID NO: 6483 - protein, 19 aa, Artificial Sequence
  Synthetic
IGWFRQAPGKEREGVSCIS

SEQ ID NO: 6484 - protein, 19 aa, Artificial Sequence
  Synthetic
MGWYRQSPGRERELVSRIS

SEQ ID NO: 6485 - protein, 19 aa, Artificial Sequence
  Synthetic
MGWFRQAPGKEREGVAAMD

SEQ ID NO: 6486 - protein, 19 aa, Artificial Sequence
  Synthetic
MGWFRRAPGKEREGVAVID

SEQ ID NO: 6487 - protein, 19 aa, Artificial Sequence
  Synthetic
MGWFRQAPGKEREGVAVID

SEQ ID NO: 6488 - protein, 19 aa, Artificial Sequence
  Synthetic
MGWFRQAPGGEREAVAAIN

SEQ ID NO: 6489 - protein, 19 aa, Artificial Sequence
  Synthetic
MGWFRQAPGKEREGVAAIF

SEQ ID NO: 6490 - protein, 19 aa, Artificial Sequence
  Synthetic
MGWYRQAPGKECELSARIF

SEQ ID NO: 6491 - protein, 19 aa, Artificial Sequence
  Synthetic
VGWFRQAPGKEREGVAAIY

SEQ ID NO: 6492 - protein, 19 aa, Artificial Sequence
  Synthetic
MSWYRRAPGKGRDFVSGID

SEQ ID NO: 6493 - protein, 19 aa, Artificial Sequence
  Synthetic
MGWFRQAPGKEREGVAAIN

SEQ ID NO: 6494 - protein, 19 aa, Artificial Sequence
  Synthetic
SGWFRQAPGKGLEWVAAIR

SEQ ID NO: 6495 - protein, 19 aa, Artificial Sequence
  Synthetic
MGWFRQAPGKEREGVATIL

SEQ ID NO: 6496 - protein, 19 aa, Artificial Sequence
  Synthetic
MGWFRQAPGKEREGVAAMD

SEQ ID NO: 6497 - protein, 19 aa, Artificial Sequence
  Synthetic
MGWFRQAPGKEREGVAFIK

SEQ ID NO: 6498 - protein, 19 aa, Artificial Sequence
  Synthetic
MRWFRQAPGKGREGVASIN

SEQ ID NO: 6499 - protein, 19 aa, Artificial Sequence
  Synthetic
IGWFRQAPGKEREGVAVVN

SEQ ID NO: 6500 - protein, 19 aa, Artificial Sequence
  Synthetic
MTWFRQAPGKAREGVAALY

SEQ ID NO: 6501 - protein, 19 aa, Artificial Sequence
  Synthetic
MTWFRQAPGKAREGVAALY

SEQ ID NO: 6502 - protein, 19 aa, Artificial Sequence
  Synthetic
MGWFRQVPGKEREGVARIN

SEQ ID NO: 6503 - protein, 19 aa, Artificial Sequence
  Synthetic
AAWFRQAPGKGREGVAAIN

SEQ ID NO: 6504 - protein, 19 aa, Artificial Sequence
  Synthetic
MGWFRQAPGKEREGVAHIY

SEQ ID NO: 6505 - protein, 19 aa, Artificial Sequence
  Synthetic
MGWYHQAPGNECELVSAIF

SEQ ID NO: 6506 - protein, 19 aa, Artificial Sequence
  Synthetic
MNWFRQAPGKEREAVAGIS

SEQ ID NO: 6507 - protein, 19 aa, Artificial Sequence
  Synthetic
MSWFRQAPGKEREWVAGVN

SEQ ID NO: 6508 - protein, 19 aa, Artificial Sequence
  Synthetic
MGWFRQAPGKGREFVASIT

SEQ ID NO: 6509 - protein, 19 aa, Artificial Sequence
  Synthetic
TGWYRQAPGKEREWVSSIS

SEQ ID NO: 6510 - protein, 19 aa, Artificial Sequence
  Synthetic
MGWFRQVPGKEREGVARIN

SEQ ID NO: 6511 - protein, 19 aa, Artificial Sequence
  Synthetic
MGWFRQAPGKEREGVAAMD

SEQ ID NO: 6512 - protein, 19 aa, Artificial Sequence
  Synthetic
LGWFRQAPGKEREGVAAVS

SEQ ID NO: 6513 - protein, 19 aa, Artificial Sequence
  Synthetic
IGWFRQAPGKDREGVVFIN

SEQ ID NO: 6514 - protein, 19 aa, Artificial Sequence
  Synthetic
MAWFRQAPGKEREFVATIR

SEQ ID NO: 6515 - protein, 19 aa, Artificial Sequence
  Synthetic
IGWFRQAPGKEREGVSCIS

SEQ ID NO: 6516 - protein, 19 aa, Artificial Sequence
  Synthetic
MGWYRQAPGKQRELVAAIH

SEQ ID NO: 6517 - protein, 19 aa, Artificial Sequence
  Synthetic
MGWFRQAPGKEREFVSGIS

SEQ ID NO: 6518 - protein, 19 aa, Artificial Sequence
  Synthetic
MGWFRQAPGKQREFVAAIR

SEQ ID NO: 6519 - protein, 19 aa, Artificial Sequence
  Synthetic
MGWFRQAPGKEREFVVAIN

SEQ ID NO: 6520 - protein, 19 aa, Artificial Sequence
  Synthetic
MGWFRQAPGKERQFVATID

SEQ ID NO: 6521 - protein, 19 aa, Artificial Sequence
  Synthetic
MAWFRQPPGKEREFVAAGS

SEQ ID NO: 6522 - protein, 19 aa, Artificial Sequence
  Synthetic
VAWFRQAPGAEREFVAVIS

SEQ ID NO: 6523 - protein, 19 aa, Artificial Sequence
  Synthetic
MGWFRQAPGKEREFVAAIS

SEQ ID NO: 6524 - protein, 19 aa, Artificial Sequence
  Synthetic
IGWFRQAPGQEREGVSCID

SEQ ID NO: 6525 - protein, 19 aa, Artificial Sequence
  Synthetic
MGWFRQAPGKEREFVAAIS

SEQ ID NO: 6526 - protein, 19 aa, Artificial Sequence
  Synthetic
IGWFRQAPGKEREFVAAIS

SEQ ID NO: 6527 - protein, 19 aa, Artificial Sequence
  Synthetic
IGWFRQAPGKEREFVAAIS

SEQ ID NO: 6528 - protein, 19 aa, Artificial Sequence
  Synthetic
MGWYRRAPGKQREWVASLT

SEQ ID NO: 6529 - protein, 19 aa, Artificial Sequence
  Synthetic
IGWFRQAPGKEREFVAAIS

SEQ ID NO: 6530 - protein, 19 aa, Artificial Sequence
  Synthetic
MAWLRQAPGKRREWVALIT

SEQ ID NO: 6531 - protein, 19 aa, Artificial Sequence
  Synthetic
MDWYRQAPGKERELVAGIT

SEQ ID NO: 6532 - protein, 19 aa, Artificial Sequence
  Synthetic
MGWFRQAPGKEREGVAAMD

SEQ ID NO: 6533 - protein, 19 aa, Artificial Sequence
  Synthetic
MGWFRQAPGKEREGVAAMD

SEQ ID NO: 6534 - protein, 19 aa, Artificial Sequence
  Synthetic
MGWFRQAPGKEREGVAAMD

SEQ ID NO: 6535 - protein, 19 aa, Artificial Sequence
  Synthetic
MGWFRQAPGKEREFVAAIS

SEQ ID NO: 6536 - protein, 19 aa, Artificial Sequence
  Synthetic
MDWDRQAPGKQRELVATIT

SEQ ID NO: 6537 - protein, 19 aa, Artificial Sequence
  Synthetic
MGWFRQAPGKEREFVGTMV

SEQ ID NO: 6538 - protein, 19 aa, Artificial Sequence
  Synthetic
MGWFRQAPGKEREFVASIS

SEQ ID NO: 6539 - protein, 19 aa, Artificial Sequence
  Synthetic
MGWFRQAPGKEREFVATIS

SEQ ID NO: 6540 - protein, 19 aa, Artificial Sequence
  Synthetic
MGWFRQLAGKEPELVVALN

SEQ ID NO: 6541 - protein, 19 aa, Artificial Sequence
  Synthetic
MGWFRQAPGKEREFVAAIS

SEQ ID NO: 6542 - protein, 19 aa, Artificial Sequence
  Synthetic
MGWFRQAPGKEREFVAAIN

SEQ ID NO: 6543 - protein, 19 aa, Artificial Sequence
  Synthetic
MGWFRQAPGAEREGVACIH

SEQ ID NO: 6544 - protein, 19 aa, Artificial Sequence
  Synthetic
MGWFRQAPGKDREFVAAIS

SEQ ID NO: 6545 - protein, 19 aa, Artificial Sequence
  Synthetic
WGWYRRAPGKQRELIAAIN

SEQ ID NO: 6546 - protein, 19 aa, Artificial Sequence
  Synthetic
MGWFRQAPGKEREFVAAIS

SEQ ID NO: 6547 - protein, 19 aa, Artificial Sequence
  Synthetic
IGWFRQAPGKEREFVARIY

SEQ ID NO: 6548 - protein, 19 aa, Artificial Sequence
  Synthetic
MGWFRQAPGKERELLGNIS

SEQ ID NO: 6549 - protein, 19 aa, Artificial Sequence
  Synthetic
ANWYRQPPGMQRELVATIT

SEQ ID NO: 6550 - protein, 19 aa, Artificial Sequence
  Synthetic
MGWFRRAPGKEREFVASIT

SEQ ID NO: 6551 - protein, 19 aa, Artificial Sequence
  Synthetic
MGWYRQAPGKLRELVAAIT

SEQ ID NO: 6552 - protein, 19 aa, Artificial Sequence
  Synthetic
MGWFRQAPGKEREFVAAIS

SEQ ID NO: 6553 - protein, 19 aa, Artificial Sequence
  Synthetic
MGWYRQAPGKLREWVAAIT

SEQ ID NO: 6554 - protein, 19 aa, Artificial Sequence
  Synthetic
MGWYRQAPGKEHELVATIS

SEQ ID NO: 6555 - protein, 19 aa, Artificial Sequence
  Synthetic
MSWYRQAPGKERESVARIS

SEQ ID NO: 6556 - protein, 19 aa, Artificial Sequence
  Synthetic
AGWFRQAPGKQREPVATIL

SEQ ID NO: 6557 - protein, 19 aa, Artificial Sequence
  Synthetic
MGWFRKAPGKEREFVAAIT

SEQ ID NO: 6558 - protein, 19 aa, Artificial Sequence
  Synthetic
MAWYRQAPGKQRELVASIT

SEQ ID NO: 6559 - protein, 19 aa, Artificial Sequence
  Synthetic
MAWYRQAPGKQRELVATEI

SEQ ID NO: 6560 - protein, 19 aa, Artificial Sequence
  Synthetic
MGWYRQAPGKQRELVAAIY

SEQ ID NO: 6561 - protein, 19 aa, Artificial Sequence
  Synthetic
WAWYRQAPGQQRDLVASLS

SEQ ID NO: 6562 - protein, 19 aa, Artificial Sequence
  Synthetic
MGWFRQAPGQEREFVAGIT

SEQ ID NO: 6563 - protein, 19 aa, Artificial Sequence
  Synthetic
IAWFRQAPGKEREGVSGID

SEQ ID NO: 6564 - protein, 19 aa, Artificial Sequence
  Synthetic
IGWFRQAPGKEREGVSCVS

SEQ ID NO: 6565 - protein, 19 aa, Artificial Sequence
  Synthetic
VGWFRQAPGKEREFVAAIR

SEQ ID NO: 6566 - protein, 19 aa, Artificial Sequence
  Synthetic
MGWFRQAPGPEREFVATIS

SEQ ID NO: 6567 - protein, 19 aa, Artificial Sequence
  Synthetic
IGWFRQAPGKEREGVSYIS

SEQ ID NO: 6568 - protein, 19 aa, Artificial Sequence
  Synthetic
MGWFRQAPGKERDFVAVIS

SEQ ID NO: 6569 - protein, 19 aa, Artificial Sequence
  Synthetic
MTWVRQAPGKGREWVSTIG

SEQ ID NO: 6570 - protein, 19 aa, Artificial Sequence
  Synthetic
MAWFRQAPGKEREFVAKIS

SEQ ID NO: 6571 - protein, 19 aa, Artificial Sequence
  Synthetic
MGWFRQTPGKEREFVAAIT

SEQ ID NO: 6572 - protein, 19 aa, Artificial Sequence
  Synthetic
MTWYRQAPGKERELVALIT

SEQ ID NO: 6573 - protein, 19 aa, Artificial Sequence
  Synthetic
MGWFRQAPGKEREFVAAVT

SEQ ID NO: 6574 - protein, 19 aa, Artificial Sequence
  Synthetic
MGWYRQAPGKQRELVAVMT

SEQ ID NO: 6575 - protein, 19 aa, Artificial Sequence
  Synthetic
MSWYRQAPGKQRELVAFIT

SEQ ID NO: 6576 - protein, 19 aa, Artificial Sequence
  Synthetic
MGWFRQAPGREREFLAQIN

SEQ ID NO: 6577 - protein, 19 aa, Artificial Sequence
  Synthetic
MGWFRQAPGKEREGVACIN

SEQ ID NO: 6578 - protein, 19 aa, Artificial Sequence
  Synthetic
MGWFRQAPGKEREFVAGIS

SEQ ID NO: 6579 - protein, 19 aa, Artificial Sequence
  Synthetic
VAWFRQAPGKEREFVSVIS

SEQ ID NO: 6580 - protein, 19 aa, Artificial Sequence
  Synthetic
MGWYRQAPGKQRELVAAIH

SEQ ID NO: 6581 - protein, 19 aa, Artificial Sequence
  Synthetic
MGWFRRAPGKEREFVAAVS

SEQ ID NO: 6582 - protein, 19 aa, Artificial Sequence
  Synthetic
MGWFRQVPGKEREFVAAIR

SEQ ID NO: 6583 - protein, 19 aa, Artificial Sequence
  Synthetic
MGWYRQAPGKQRELVATIN

SEQ ID NO: 6584 - protein, 19 aa, Artificial Sequence
  Synthetic
VGWFRQAPGKEREFVGYFG

SEQ ID NO: 6585 - protein, 19 aa, Artificial Sequence
  Synthetic
MGWFRQAPGKERESVAAIN

SEQ ID NO: 6586 - protein, 19 aa, Artificial Sequence
  Synthetic
IGWFRQAPGKERIYLATIG

SEQ ID NO: 6587 - protein, 19 aa, Artificial Sequence
  Synthetic
MGWYRQAPGKERELVAIKT

SEQ ID NO: 6588 - protein, 19 aa, Artificial Sequence
  Synthetic
MGWYRQAPGKQRELVAAIT

SEQ ID NO: 6589 - protein, 19 aa, Artificial Sequence
  Synthetic
IGWFRQAPGKGRQGVSCIR

SEQ ID NO: 6590 - protein, 19 aa, Artificial Sequence
  Synthetic
MGWFRQAPGKEREFVAAIS

SEQ ID NO: 6591 - protein, 19 aa, Artificial Sequence
  Synthetic
MGWFRQAPGKEREFVATIN

SEQ ID NO: 6592 - protein, 19 aa, Artificial Sequence
  Synthetic
MGWYRQAPGKPRELVAEIT

SEQ ID NO: 6593 - protein, 19 aa, Artificial Sequence
  Synthetic
MRWYRQAPGKEREWVAGMS

SEQ ID NO: 6594 - protein, 19 aa, Artificial Sequence
  Synthetic
MGWFRQAPGKERDFIAGIT

SEQ ID NO: 6595 - protein, 19 aa, Artificial Sequence
  Synthetic
MGWFRQAPGKEREFVAAIR

SEQ ID NO: 6596 - protein, 19 aa, Artificial Sequence
  Synthetic
MGWFRQAPGKEREFVAAIR

SEQ ID NO: 6597 - protein, 19 aa, Artificial Sequence
  Synthetic
MGWFRQAPGKAREFVARIS

SEQ ID NO: 6598 - protein, 19 aa, Artificial Sequence
  Synthetic
AAWFRQAPGKDREFVAAIS

SEQ ID NO: 6599 - protein, 19 aa, Artificial Sequence
  Synthetic
MAWFRRAPGKEREFVAAIS

SEQ ID NO: 6600 - protein, 19 aa, Artificial Sequence
  Synthetic
MGWYRQAPGKQRELVAAIT

SEQ ID NO: 6601 - protein, 19 aa, Artificial Sequence
  Synthetic
MGWFRQAPGKEREFVGAIS

SEQ ID NO: 6602 - protein, 19 aa, Artificial Sequence
  Synthetic
MGWFRQAPGKEREFVAANR

SEQ ID NO: 6603 - protein, 19 aa, Artificial Sequence
  Synthetic
MGWFRQAPGKEREVVARTT

SEQ ID NO: 6604 - protein, 19 aa, Artificial Sequence
  Synthetic
IGWFRQAPGKEREFVAEIT

SEQ ID NO: 6605 - protein, 19 aa, Artificial Sequence
  Synthetic
IGWFRQAPGKEREFVAAIH

SEQ ID NO: 6606 - protein, 19 aa, Artificial Sequence
  Synthetic
MGWFRQAPGKEREFVAHIN

SEQ ID NO: 6607 - protein, 19 aa, Artificial Sequence
  Synthetic
IGWFRQTPGSEREGVLCIS

SEQ ID NO: 6608 - protein, 19 aa, Artificial Sequence
  Synthetic
MGWFRQAPGKEREYIARIT

SEQ ID NO: 6609 - protein, 19 aa, Artificial Sequence
  Synthetic
MGWYRQAPGKQREVVARIA

SEQ ID NO: 6610 - protein, 19 aa, Artificial Sequence
  Synthetic
MRWYRQAPGKEREWVAGMS

SEQ ID NO: 6611 - protein, 19 aa, Artificial Sequence
  Synthetic
MGWYRQAPGKQRELVAAIT

SEQ ID NO: 6612 - protein, 19 aa, Artificial Sequence
  Synthetic
MGWWRQAPGKEREFVARIV

SEQ ID NO: 6613 - protein, 19 aa, Artificial Sequence
  Synthetic
MGWFRQDLGKEREFVAAIR

SEQ ID NO: 6614 - protein, 19 aa, Artificial Sequence
  Synthetic
GGWFRQAPGKEREFVAAIS

SEQ ID NO: 6615 - protein, 19 aa, Artificial Sequence
  Synthetic
MGWFRQAPGEGREFVATIS

SEQ ID NO: 6616 - protein, 19 aa, Artificial Sequence
  Synthetic
LAWFRQAPGKEREFVSGLR

SEQ ID NO: 6617 - protein, 19 aa, Artificial Sequence
  Synthetic
MAWYRRAPGKHRELVASAT

SEQ ID NO: 6618 - protein, 19 aa, Artificial Sequence
  Synthetic
MGWYRQAPGKEREFVATIG

SEQ ID NO: 6619 - protein, 19 aa, Artificial Sequence
  Synthetic
MAWFRQAPGKEREFVAGVS

SEQ ID NO: 6620 - protein, 19 aa, Artificial Sequence
  Synthetic
MGWYRQAPGKQRELVATFT

SEQ ID NO: 6621 - protein, 19 aa, Artificial Sequence
  Synthetic
MGWYRQAPGKQRGMVAIIT

SEQ ID NO: 6622 - protein, 19 aa, Artificial Sequence
  Synthetic
MGWYRQAPGKQRELVAVIS

SEQ ID NO: 6623 - protein, 19 aa, Artificial Sequence
  Synthetic
MGWYRQAPGKQREPVAISS

SEQ ID NO: 6624 - protein, 19 aa, Artificial Sequence
  Synthetic
MGWYRQAPGKQRELVAHST

SEQ ID NO: 6625 - protein, 19 aa, Artificial Sequence
  Synthetic
MGWFRQAPGKEREFVATVS

SEQ ID NO: 6626 - protein, 19 aa, Artificial Sequence
  Synthetic
MGWFRQAPGKEREFVASIS

SEQ ID NO: 6627 - protein, 19 aa, Artificial Sequence
  Synthetic
MGWFRQAPGKEREFVGGIS

SEQ ID NO: 6628 - protein, 19 aa, Artificial Sequence
  Synthetic
MGWFRQAPGREREFVASIS

SEQ ID NO: 6629 - protein, 19 aa, Artificial Sequence
  Synthetic
MGWFRQAPGKEREFVATVG

SEQ ID NO: 6630 - protein, 19 aa, Artificial Sequence
  Synthetic
MAWFRQAPGKEREFLAAMD

SEQ ID NO: 6631 - protein, 19 aa, Artificial Sequence
  Synthetic
MAWFRQAPGKEREFVSSIS

SEQ ID NO: 6632 - protein, 19 aa, Artificial Sequence
  Synthetic
MAWFRQAPGKEREFVAVLR

SEQ ID NO: 6633 - protein, 19 aa, Artificial Sequence
  Synthetic
MGWFRQAPGKERESVAAIS

SEQ ID NO: 6634 - protein, 19 aa, Artificial Sequence
  Synthetic
MGWFRQAPGKEREFVAAIS

SEQ ID NO: 6635 - protein, 19 aa, Artificial Sequence
  Synthetic
MGWYRQAAGEQRELVAAIY

SEQ ID NO: 6636 - protein, 19 aa, Artificial Sequence
  Synthetic
MGWYRQAPGKQRELVAAIT

SEQ ID NO: 6637 - protein, 19 aa, Artificial Sequence
  Synthetic
IGWFRQAPGKEREGVSLIS

SEQ ID NO: 6638 - protein, 19 aa, Artificial Sequence
  Synthetic
MNWYRQAPGKQRELVAQIT

SEQ ID NO: 6639 - protein, 19 aa, Artificial Sequence
  Synthetic
MGWYRRAPGNERELVAGIS

SEQ ID NO: 6640 - protein, 19 aa, Artificial Sequence
  Synthetic
MAWYRQAPGKERDWVGTIF

SEQ ID NO: 6641 - protein, 19 aa, Artificial Sequence
  Synthetic
MGWFRQAPGKEREFVAYIN

SEQ ID NO: 6642 - protein, 19 aa, Artificial Sequence
  Synthetic
MAWYRQAPGKEREWVASIT

SEQ ID NO: 6643 - protein, 19 aa, Artificial Sequence
  Synthetic
MGWFRQAPGKQRELVATSP

SEQ ID NO: 6644 - protein, 19 aa, Artificial Sequence
  Synthetic
MAWFRQAPGKEREFVGGIR

SEQ ID NO: 6645 - protein, 19 aa, Artificial Sequence
  Synthetic
MGWYRRVSGNQRELVASIT

SEQ ID NO: 6646 - protein, 19 aa, Artificial Sequence
  Synthetic
MGWFRQAPGKEREFVATIS

SEQ ID NO: 6647 - protein, 19 aa, Artificial Sequence
  Synthetic
MDWYRQAPGKQRELVAGIT

SEQ ID NO: 6648 - protein, 19 aa, Artificial Sequence
  Synthetic
MGWYRQAPGKERELVATIT

SEQ ID NO: 6649 - protein, 19 aa, Artificial Sequence
  Synthetic
IGWFRQAPGKEHEWLVCNR

SEQ ID NO: 6650 - protein, 19 aa, Artificial Sequence
  Synthetic
MAWFRQAPGKEREFVASIN

SEQ ID NO: 6651 - protein, 19 aa, Artificial Sequence
  Synthetic
VNWYRQPPGKSREFDELVA

SEQ ID NO: 6652 - protein, 19 aa, Artificial Sequence
  Synthetic
IGWFRRAPGKEREGVSCIS

SEQ ID NO: 6653 - protein, 19 aa, Artificial Sequence
  Synthetic
MGWFRQAPGKEREFVAAIR

SEQ ID NO: 6654 - protein, 19 aa, Artificial Sequence
  Synthetic
MGWYRQAPGKERELVAART

SEQ ID NO: 6655 - protein, 19 aa, Artificial Sequence
  Synthetic
MGWYRQAPGKQRELVAAIT

SEQ ID NO: 6656 - protein, 19 aa, Artificial Sequence
  Synthetic
VGWFRQVPGKEREKLLCIN

SEQ ID NO: 6657 - protein, 19 aa, Artificial Sequence
  Synthetic
MGWFRQAPGKEREFVAAIG

SEQ ID NO: 6658 - protein, 19 aa, Artificial Sequence
  Synthetic
MRWYRQAPGKERELVAAIT

SEQ ID NO: 6659 - protein, 19 aa, Artificial Sequence
  Synthetic
MGWYRQAPGKQRELVAAIT

SEQ ID NO: 6660 - protein, 19 aa, Artificial Sequence
  Synthetic
AGWFRQAPGKEREWVACIS

SEQ ID NO: 6661 - protein, 19 aa, Artificial Sequence
  Synthetic
IGWFRQAPGKEREGLSSIS

SEQ ID NO: 6662 - protein, 19 aa, Artificial Sequence
  Synthetic
IGWFRQAPGKEREGVSCIN

SEQ ID NO: 6663 - protein, 19 aa, Artificial Sequence
  Synthetic
IGWFRQAPGKEREGVSCIT

SEQ ID NO: 6664 - protein, 19 aa, Artificial Sequence
  Synthetic
MAWYRQAPGKARELIAAIR

SEQ ID NO: 6665 - protein, 19 aa, Artificial Sequence
  Synthetic
VGWFRQAPGLEREFVATIS

SEQ ID NO: 6666 - protein, 19 aa, Artificial Sequence
  Synthetic
MGWYRQAPGKQRELVARIT

SEQ ID NO: 6667 - protein, 19 aa, Artificial Sequence
  Synthetic
IGWFRQAPGKEREGVSCIS

SEQ ID NO: 6668 - protein, 19 aa, Artificial Sequence
  Synthetic
VGWFRQAPGKQRELVAQMT

SEQ ID NO: 6669 - protein, 19 aa, Artificial Sequence
  Synthetic
IGWFRQAPGKEREGVACIS

SEQ ID NO: 6670 - protein, 19 aa, Artificial Sequence
  Synthetic
IGWFRQAPGKEREGVSCIS

SEQ ID NO: 6671 - protein, 19 aa, Artificial Sequence
  Synthetic
LGWFRQAPGKEREFVAAIN

SEQ ID NO: 6672 - protein, 19 aa, Artificial Sequence
  Synthetic
MGWFRQAPGKERDFVAKIS

SEQ ID NO: 6673 - protein, 19 aa, Artificial Sequence
  Synthetic
MGWFRQAPGKEREFVAVVN

SEQ ID NO: 6674 - protein, 19 aa, Artificial Sequence
  Synthetic
IAWFRQAPGKEREGVSCIS

SEQ ID NO: 6675 - protein, 19 aa, Artificial Sequence
  Synthetic
IGWFRQAPGKEREGVSCIN

SEQ ID NO: 6676 - protein, 19 aa, Artificial Sequence
  Synthetic
LAWFRQAPGKEREFVAAIM

SEQ ID NO: 6677 - protein, 19 aa, Artificial Sequence
  Synthetic
VAWFRQAPGKERDFVASIN

SEQ ID NO: 6678 - protein, 19 aa, Artificial Sequence
  Synthetic
IGWFRQAPGKEYGGVSCIS

SEQ ID NO: 6679 - protein, 19 aa, Artificial Sequence
  Synthetic
MGWYRQAPGKERELVATIS

SEQ ID NO: 6680 - protein, 19 aa, Artificial Sequence
  Synthetic
MQWYRQSPGTERELVAAIS

SEQ ID NO: 6681 - protein, 19 aa, Artificial Sequence
  Synthetic
IAWFRQAPGKEREGVSCIS

SEQ ID NO: 6682 - protein, 19 aa, Artificial Sequence
  Synthetic
MGWYRQAPGERRVMVAAVS

SEQ ID NO: 6683 - protein, 19 aa, Artificial Sequence
  Synthetic
MAWFRQAPGKEREFVAGIN

SEQ ID NO: 6684 - protein, 19 aa, Artificial Sequence
  Synthetic
IGWFRQAPGKEREGVSCIS

SEQ ID NO: 6685 - protein, 19 aa, Artificial Sequence
  Synthetic
MGWFRQAPGKEREFVAAID

SEQ ID NO: 6686 - protein, 19 aa, Artificial Sequence
  Synthetic
MGWFRQAPGKEREFVAAIS

SEQ ID NO: 6687 - protein, 19 aa, Artificial Sequence
  Synthetic
MGWFRQAPGEDRAFVTSIS

SEQ ID NO: 6688 - protein, 19 aa, Artificial Sequence
  Synthetic
MGWFRQAPGKEREFVASIT

SEQ ID NO: 6689 - protein, 19 aa, Artificial Sequence
  Synthetic
VGWYRQAPGNQRELVASIT

SEQ ID NO: 6690 - protein, 19 aa, Artificial Sequence
  Synthetic
IGWVRQAPGKEREGVSCIS

SEQ ID NO: 6691 - protein, 19 aa, Artificial Sequence
  Synthetic
MGWYRQAPGKRREMVADIF

SEQ ID NO: 6692 - protein, 19 aa, Artificial Sequence
  Synthetic
MGWYRQVPGKPRELVADIT

SEQ ID NO: 6693 - protein, 19 aa, Artificial Sequence
  Synthetic
VGWYRQAPGKQREMVASIG

SEQ ID NO: 6694 - protein, 19 aa, Artificial Sequence
  Synthetic
MGWFRQAPGKERESVAAIN

SEQ ID NO: 6695 - protein, 19 aa, Artificial Sequence
  Synthetic
MGWYRQAPGTQRELVAAIT

SEQ ID NO: 6696 - protein, 19 aa, Artificial Sequence
  Synthetic
MGWFRQAPGKEREFVAAIS

SEQ ID NO: 6697 - protein, 19 aa, Artificial Sequence
  Synthetic
MGWFRQAPGKERAFVAAIS

SEQ ID NO: 6698 - protein, 19 aa, Artificial Sequence
  Synthetic
MGWYRQAPGKQRELVARIS

SEQ ID NO: 6699 - protein, 19 aa, Artificial Sequence
  Synthetic
MGWFRQAPGKERDVVAAIN

SEQ ID NO: 6700 - protein, 19 aa, Artificial Sequence
  Synthetic
TCWYRQGTGKQRELVAAIT

SEQ ID NO: 6701 - protein, 19 aa, Artificial Sequence
  Synthetic
MGWFRQAPGKEREFVAAIN

SEQ ID NO: 6702 - protein, 19 aa, Artificial Sequence
  Synthetic
MGWYRQDPGKGRELVALIN

SEQ ID NO: 6703 - protein, 19 aa, Artificial Sequence
  Synthetic
MGWFRQAPGKEREFVAAIT

SEQ ID NO: 6704 - protein, 19 aa, Artificial Sequence
  Synthetic
MGWYRQAPGKQREFVASIT

SEQ ID NO: 6705 - protein, 19 aa, Artificial Sequence
  Synthetic
IGWFRQAPGKEREGVSCIS

SEQ ID NO: 6706 - protein, 19 aa, Artificial Sequence
  Synthetic
LGWFRQAPGKDREFVAAIS

SEQ ID NO: 6707 - protein, 19 aa, Artificial Sequence
  Synthetic
LGWYRRAPGKEREFVARIS

SEQ ID NO: 6708 - protein, 19 aa, Artificial Sequence
  Synthetic
MGWYRRAPGKQRELVASLT

SEQ ID NO: 6709 - protein, 19 aa, Artificial Sequence
  Synthetic
MGWFRQAPGKEREGVACID

SEQ ID NO: 6710 - protein, 19 aa, Artificial Sequence
  Synthetic
MAWFRQVPGKEREGVASIN

SEQ ID NO: 6711 - protein, 19 aa, Artificial Sequence
  Synthetic
MGWFRQAPGKQREFVGYIS

SEQ ID NO: 6712 - protein, 19 aa, Artificial Sequence
  Synthetic
MGWYRQAPGSKREFVAHIT

SEQ ID NO: 6713 - protein, 19 aa, Artificial Sequence
  Synthetic
MGWFRQAPGKKREYVAAIS

SEQ ID NO: 6714 - protein, 19 aa, Artificial Sequence
  Synthetic
MGWYRQAPGKQRELVASIS

SEQ ID NO: 6715 - protein, 19 aa, Artificial Sequence
  Synthetic
MAWYRQGPGEQRELVAVIT

SEQ ID NO: 6716 - protein, 19 aa, Artificial Sequence
  Synthetic
MGWYRQAPGKQRDLVAIIS

SEQ ID NO: 6717 - protein, 19 aa, Artificial Sequence
  Synthetic
MGWFRQAPGKEREFVAASS

SEQ ID NO: 6718 - protein, 19 aa, Artificial Sequence
  Synthetic
MGWFRQAPGKEREFVASIV

SEQ ID NO: 6719 - protein, 19 aa, Artificial Sequence
  Synthetic
MAWFRQAPGKEREFLSVLN

SEQ ID NO: 6720 - protein, 19 aa, Artificial Sequence
  Synthetic
MAWFRQAPGKEREFVAGIT

SEQ ID NO: 6721 - protein, 19 aa, Artificial Sequence
  Synthetic
MGWYRQAPGKERELIATIT

SEQ ID NO: 6722 - protein, 19 aa, Artificial Sequence
  Synthetic
MGWFRQAPGKEREFVTAIS

SEQ ID NO: 6723 - protein, 19 aa, Artificial Sequence
  Synthetic
IGWFRQAPGKEREGVSCIS

SEQ ID NO: 6724 - protein, 19 aa, Artificial Sequence
  Synthetic
MRWYRQAPGEEREFVAFIS

SEQ ID NO: 6725 - protein, 19 aa, Artificial Sequence
  Synthetic
MGWFRQAPGKEREFVAAIS

SEQ ID NO: 6726 - protein, 19 aa, Artificial Sequence
  Synthetic
MAWFRQAPGKERDRVSAIS

SEQ ID NO: 6727 - protein, 19 aa, Artificial Sequence
  Synthetic
MGWFRQAPGKEREKVAIIT

SEQ ID NO: 6728 - protein, 19 aa, Artificial Sequence
  Synthetic
MGWFRQAPGNQGELVATMT

SEQ ID NO: 6729 - protein, 19 aa, Artificial Sequence
  Synthetic
IGWFRQAPGKGLEGVSCIS

SEQ ID NO: 6730 - protein, 19 aa, Artificial Sequence
  Synthetic
VGWYRQAPEKQRELVAQIN

SEQ ID NO: 6731 - protein, 19 aa, Artificial Sequence
  Synthetic
MGWYRQTPGNQRELVATIT

SEQ ID NO: 6732 - protein, 19 aa, Artificial Sequence
  Synthetic
IGWFRQAPGKEREGVSCIS

SEQ ID NO: 6733 - protein, 19 aa, Artificial Sequence
  Synthetic
IDWYRQAPGKQRELVASIA

SEQ ID NO: 6734 - protein, 19 aa, Artificial Sequence
  Synthetic
MGWFRQAPGKEREFVAGIT

SEQ ID NO: 6735 - protein, 19 aa, Artificial Sequence
  Synthetic
MGWYRQAPGKERELVASIY

SEQ ID NO: 6736 - protein, 19 aa, Artificial Sequence
  Synthetic
QGWFRQPPGKEREFVASLR

SEQ ID NO: 6737 - protein, 19 aa, Artificial Sequence
  Synthetic
IGWFRQAPGKEREAVSCIS

SEQ ID NO: 6738 - protein, 19 aa, Artificial Sequence
  Synthetic
IGWFRQAPGKEREGVSCIS

SEQ ID NO: 6739 - protein, 19 aa, Artificial Sequence
  Synthetic
IGWFRQAPGKEREGLSSIS

SEQ ID NO: 6740 - protein, 19 aa, Artificial Sequence
  Synthetic
MGWFRQAPGKEREFVGGIG

SEQ ID NO: 6741 - protein, 19 aa, Artificial Sequence
  Synthetic
MAWFRQAPGKEREFVAGIG

SEQ ID NO: 6742 - protein, 19 aa, Artificial Sequence
  Synthetic
VGWFRQIPGKEREFVGGIA

SEQ ID NO: 6743 - protein, 19 aa, Artificial Sequence
  Synthetic
MNWYRQAPGKERELVARIY

SEQ ID NO: 6744 - protein, 19 aa, Artificial Sequence
  Synthetic
MGWYRQAPGKQRELVASID

SEQ ID NO: 6745 - protein, 19 aa, Artificial Sequence
  Synthetic
MDWYRQAPGKQRDLVATSF

SEQ ID NO: 6746 - protein, 19 aa, Artificial Sequence
  Synthetic
VGWYRQGPGKQRDVVASID

SEQ ID NO: 6747 - protein, 19 aa, Artificial Sequence
  Synthetic
MGWFRQAPGKEREFVADIS

SEQ ID NO: 6748 - protein, 19 aa, Artificial Sequence
  Synthetic
MGWFRQTPGKERELVAAIN

SEQ ID NO: 6749 - protein, 19 aa, Artificial Sequence
  Synthetic
MGWFRQVPGREREFVATIR

SEQ ID NO: 6750 - protein, 19 aa, Artificial Sequence
  Synthetic
SGWFRQAPGKEREFLASIR

SEQ ID NO: 6751 - protein, 19 aa, Artificial Sequence
  Synthetic
MAWFRQAPGKEREFVSGMR

SEQ ID NO: 6752 - protein, 19 aa, Artificial Sequence
  Synthetic
MGWYRQVTGKQRELVAAIT

SEQ ID NO: 6753 - protein, 19 aa, Artificial Sequence
  Synthetic
MGWFRQAPGKEREGVSYTG

SEQ ID NO: 6754 - protein, 19 aa, Artificial Sequence
  Synthetic
MGWFRQAPGKEREFVAAIR

SEQ ID NO: 6755 - protein, 19 aa, Artificial Sequence
  Synthetic
MAWFRQAPGKEREFVAAVE

SEQ ID NO: 6756 - protein, 19 aa, Artificial Sequence
  Synthetic
MGWYRQAPGKPRELVAEIS

SEQ ID NO: 6757 - protein, 19 aa, Artificial Sequence
  Synthetic
MGWYRQAPGKERELVADIS

SEQ ID NO: 6758 - protein, 19 aa, Artificial Sequence
  Synthetic
MGWYRQAPGKERELVADIS

SEQ ID NO: 6759 - protein, 19 aa, Artificial Sequence
  Synthetic
MGWYRQAPGKERELVADIS

SEQ ID NO: 6760 - protein, 19 aa, Artificial Sequence
  Synthetic
VGYYRQTPGRQRELIAGIS

SEQ ID NO: 6761 - protein, 19 aa, Artificial Sequence
  Synthetic
LGWFRQAPGKEREFVGSIS

SEQ ID NO: 6762 - protein, 19 aa, Artificial Sequence
  Synthetic
MGWLRQAPGKGTEFVAAIS

SEQ ID NO: 6763 - protein, 19 aa, Artificial Sequence
  Synthetic
MSWFRQAPGKGLEWVASIN

SEQ ID NO: 6764 - protein, 19 aa, Artificial Sequence
  Synthetic
MRWYRQAPGKEREWVAGMS

SEQ ID NO: 6765 - protein, 19 aa, Artificial Sequence
  Synthetic
VGWFRQAPGKERELVALIA

SEQ ID NO: 6766 - protein, 19 aa, Artificial Sequence
  Synthetic
MAWFRQAPGTEREFVALIT

SEQ ID NO: 6767 - protein, 4 aa, Artificial Sequence
  Synthetic
RDGT

SEQ ID NO: 6768 - protein, 5 aa, Artificial Sequence
  Synthetic
TGDGF

SEQ ID NO: 6769 - protein, 6 aa, Artificial Sequence
  Synthetic
GLGGVK

SEQ ID NO: 6770 - protein, 5 aa, Artificial Sequence
  Synthetic
SGRDI

SEQ ID NO: 6771 - protein, 5 aa, Artificial Sequence
  Synthetic
RFFGT

SEQ ID NO: 6772 - protein, 5 aa, Artificial Sequence
  Synthetic
TSGVS

SEQ ID NO: 6773 - protein, 5 aa, Artificial Sequence
  Synthetic
TYNGA

SEQ ID NO: 6774 - protein, 5 aa, Artificial Sequence
  Synthetic
TNDGT

SEQ ID NO: 6775 - protein, 4 aa, Artificial Sequence
  Synthetic
RGGY

SEQ ID NO: 6776 - protein, 5 aa, Artificial Sequence
  Synthetic
SAGDR

SEQ ID NO: 6777 - protein, 5 aa, Artificial Sequence
  Synthetic
SMGGL

SEQ ID NO: 6778 - protein, 5 aa, Artificial Sequence
  Synthetic
SRDGS

SEQ ID NO: 6779 - protein, 5 aa, Artificial Sequence
  Synthetic
SSGVG

SEQ ID NO: 6780 - protein, 5 aa, Artificial Sequence
  Synthetic
SSGVD

SEQ ID NO: 6781 - protein, 5 aa, Artificial Sequence
  Synthetic
ASGGS

SEQ ID NO: 6782 - protein, 4 aa, Artificial Sequence
  Synthetic
GDGD

SEQ ID NO: 6783 - protein, 5 aa, Artificial Sequence
  Synthetic
SGGGG

SEQ ID NO: 6784 - protein, 4 aa, Artificial Sequence
  Synthetic
SSGR

SEQ ID NO: 6785 - protein, 5 aa, Artificial Sequence
  Synthetic
TGRGN

SEQ ID NO: 6786 - protein, 5 aa, Artificial Sequence
  Synthetic
MGGGI

SEQ ID NO: 6787 - protein, 5 aa, Artificial Sequence
  Synthetic
IDNGN

SEQ ID NO: 6788 - protein, 4 aa, Artificial Sequence
  Synthetic
SDGS

SEQ ID NO: 6789 - protein, 5 aa, Artificial Sequence
  Synthetic
RRTGY

SEQ ID NO: 6790 - protein, 4 aa, Artificial Sequence
  Synthetic
NDGT

SEQ ID NO: 6791 - protein, 5 aa, Artificial Sequence
  Synthetic
SGGGS

SEQ ID NO: 6792 - protein, 5 aa, Artificial Sequence
  Synthetic
SSDGT

SEQ ID NO: 6793 - protein, 5 aa, Artificial Sequence
  Synthetic
SGGGG

SEQ ID NO: 6794 - protein, 5 aa, Artificial Sequence
  Synthetic
RGDHS

SEQ ID NO: 6795 - protein, 4 aa, Artificial Sequence
  Synthetic
SAGT

SEQ ID NO: 6796 - protein, 5 aa, Artificial Sequence
  Synthetic
FRGDS

SEQ ID NO: 6797 - protein, 5 aa, Artificial Sequence
  Synthetic
THTGN

SEQ ID NO: 6798 - protein, 5 aa, Artificial Sequence
  Synthetic
THTGN

SEQ ID NO: 6799 - protein, 5 aa, Artificial Sequence
  Synthetic
VGGSS

SEQ ID NO: 6800 - protein, 5 aa, Artificial Sequence
  Synthetic
SKRHT

SEQ ID NO: 6801 - protein, 5 aa, Artificial Sequence
  Synthetic
TNSGR

SEQ ID NO: 6802 - protein, 4 aa, Artificial Sequence
  Synthetic
SDGS

SEQ ID NO: 6803 - protein, 5 aa, Artificial Sequence
  Synthetic
STMSG

SEQ ID NO: 6804 - protein, 5 aa, Artificial Sequence
  Synthetic
TGRGS

SEQ ID NO: 6805 - protein, 5 aa, Artificial Sequence
  Synthetic
SSGDK

SEQ ID NO: 6806 - protein, 4 aa, Artificial Sequence
  Synthetic
SPGT

SEQ ID NO: 6807 - protein, 5 aa, Artificial Sequence
  Synthetic
VGGSS

SEQ ID NO: 6808 - protein, 5 aa, Artificial Sequence
  Synthetic
SGGGG

SEQ ID NO: 6809 - protein, 5 aa, Artificial Sequence
  Synthetic
PAGGT

SEQ ID NO: 6810 - protein, 5 aa, Artificial Sequence
  Synthetic
SDGGI

SEQ ID NO: 6811 - protein, 5 aa, Artificial Sequence
  Synthetic
WSGGN

SEQ ID NO: 6812 - protein, 5 aa, Artificial Sequence
  Synthetic
DSDGR

SEQ ID NO: 6813 - protein, 4 aa, Artificial Sequence
  Synthetic
SGGT

SEQ ID NO: 6814 - protein, 5 aa, Artificial Sequence
  Synthetic
WRGDS

SEQ ID NO: 6815 - protein, 5 aa, Artificial Sequence
  Synthetic
WSGGY

SEQ ID NO: 6816 - protein, 5 aa, Artificial Sequence
  Synthetic
WSSGS

SEQ ID NO: 6817 - protein, 5 aa, Artificial Sequence
  Synthetic
WSGEY

SEQ ID NO: 6818 - protein, 5 aa, Artificial Sequence
  Synthetic
STGRT

SEQ ID NO: 6819 - protein, 5 aa, Artificial Sequence
  Synthetic
STGTS

SEQ ID NO: 6820 - protein, 5 aa, Artificial Sequence
  Synthetic
RSGGD

SEQ ID NO: 6821 - protein, 5 aa, Artificial Sequence
  Synthetic
PSDGS

SEQ ID NO: 6822 - protein, 5 aa, Artificial Sequence
  Synthetic
WSGGT

SEQ ID NO: 6823 - protein, 5 aa, Artificial Sequence
  Synthetic
WGGGL

SEQ ID NO: 6824 - protein, 5 aa, Artificial Sequence
  Synthetic
WGGGL

SEQ ID NO: 6825 - protein, 4 aa, Artificial Sequence
  Synthetic
TTGT

SEQ ID NO: 6826 - protein, 5 aa, Artificial Sequence
  Synthetic
WSTGS

SEQ ID NO: 6827 - protein, 4 aa, Artificial Sequence
  Synthetic
ISGY

SEQ ID NO: 6828 - protein, 9 aa, Artificial Sequence
  Synthetic
RDAAGYADS

SEQ ID NO: 6829 - protein, 5 aa, Artificial Sequence
  Synthetic
SGGGG

SEQ ID NO: 6830 - protein, 5 aa, Artificial Sequence
  Synthetic
SGGGG

SEQ ID NO: 6831 - protein, 5 aa, Artificial Sequence
  Synthetic
SGGGG

SEQ ID NO: 6832 - protein, 8 aa, Artificial Sequence
  Synthetic
AAPGTAYY

SEQ ID NO: 6833 - protein, 4 aa, Artificial Sequence
  Synthetic
SGGS

SEQ ID NO: 6834 - protein, 5 aa, Artificial Sequence
  Synthetic
WSSDT

SEQ ID NO: 6835 - protein, 5 aa, Artificial Sequence
  Synthetic
RSGTL

SEQ ID NO: 6836 - protein, 5 aa, Artificial Sequence
  Synthetic
QSGAA

SEQ ID NO: 6837 - protein, 5 aa, Artificial Sequence
  Synthetic
FDYDM

SEQ ID NO: 6838 - protein, 5 aa, Artificial Sequence
  Synthetic
WSGGT

SEQ ID NO: 6839 - protein, 4 aa, Artificial Sequence
  Synthetic
RSGS

SEQ ID NO: 6840 - protein, 5 aa, Artificial Sequence
  Synthetic
RQSNL

SEQ ID NO: 6841 - protein, 5 aa, Artificial Sequence
  Synthetic
PRTDE

SEQ ID NO: 6842 - protein, 4 aa, Artificial Sequence
  Synthetic
NEGR

SEQ ID NO: 6843 - protein, 5 aa, Artificial Sequence
  Synthetic
RNGAN

SEQ ID NO: 6844 - protein, 5 aa, Artificial Sequence
  Synthetic
WSSGN

SEQ ID NO: 6845 - protein, 5 aa, Artificial Sequence
  Synthetic
WRGYN

SEQ ID NO: 6846 - protein, 4 aa, Artificial Sequence
  Synthetic
RDGN

SEQ ID NO: 6847 - protein, 5 aa, Artificial Sequence
  Synthetic
WSGID

SEQ ID NO: 6848 - protein, 4 aa, Artificial Sequence
  Synthetic
SGGS

SEQ ID NO: 6849 - protein, 5 aa, Artificial Sequence
  Synthetic
WSSGT

SEQ ID NO: 6850 - protein, 4 aa, Artificial Sequence
  Synthetic
PQGV

SEQ ID NO: 6851 - protein, 4 aa, Artificial Sequence
  Synthetic
SGST

SEQ ID NO: 6852 - protein, 5 aa, Artificial Sequence
  Synthetic
SGGGT

SEQ ID NO: 6853 - protein, 4 aa, Artificial Sequence
  Synthetic
TGGA

SEQ ID NO: 6854 - protein, 5 aa, Artificial Sequence
  Synthetic
PGTEK

SEQ ID NO: 6855 - protein, 4 aa, Artificial Sequence
  Synthetic
SGGT

SEQ ID NO: 6856 - protein, 4 aa, Artificial Sequence
  Synthetic
SGGS

SEQ ID NO: 6857 - protein, 4 aa, Artificial Sequence
  Synthetic
NSGR

SEQ ID NO: 6858 - protein, 5 aa, Artificial Sequence
  Synthetic
GSGRS

SEQ ID NO: 6859 - protein, 5 aa, Artificial Sequence
  Synthetic
SGDGS

SEQ ID NO: 6860 - protein, 5 aa, Artificial Sequence
  Synthetic
SSGQY

SEQ ID NO: 6861 - protein, 5 aa, Artificial Sequence
  Synthetic
WSGGS

SEQ ID NO: 6862 - protein, 5 aa, Artificial Sequence
  Synthetic
QTGSH

SEQ ID NO: 6863 - protein, 5 aa, Artificial Sequence
  Synthetic
MSDGR

SEQ ID NO: 6864 - protein, 5 aa, Artificial Sequence
  Synthetic
WSGSN

SEQ ID NO: 6865 - protein, 5 aa, Artificial Sequence
  Synthetic
SDGSI

SEQ ID NO: 6866 - protein, 5 aa, Artificial Sequence
  Synthetic
GDGRL

SEQ ID NO: 6867 - protein, 5 aa, Artificial Sequence
  Synthetic
WGGST

SEQ ID NO: 6868 - protein, 4 aa, Artificial Sequence
  Synthetic
TNNN

SEQ ID NO: 6869 - protein, 5 aa, Artificial Sequence
  Synthetic
RSGGK

SEQ ID NO: 6870 - protein, 4 aa, Artificial Sequence
  Synthetic
IDGR

SEQ ID NO: 6871 - protein, 4 aa, Artificial Sequence
  Synthetic
DRGR

SEQ ID NO: 6872 - protein, 5 aa, Artificial Sequence
  Synthetic
WSGTT

SEQ ID NO: 6873 - protein, 5 aa, Artificial Sequence
  Synthetic
SGGGT

SEQ ID NO: 6874 - protein, 5 aa, Artificial Sequence
  Synthetic
SKGGS

SEQ ID NO: 6875 - protein, 5 aa, Artificial Sequence
  Synthetic
RSTII

SEQ ID NO: 6876 - protein, 4 aa, Artificial Sequence
  Synthetic
SGGS

SEQ ID NO: 6877 - protein, 5 aa, Artificial Sequence
  Synthetic
RVTWL

SEQ ID NO: 6878 - protein, 5 aa, Artificial Sequence
  Synthetic
WSGKE

SEQ ID NO: 6879 - protein, 4 aa, Artificial Sequence
  Synthetic
SRGI

SEQ ID NO: 6880 - protein, 5 aa, Artificial Sequence
  Synthetic
TRGGR

SEQ ID NO: 6881 - protein, 5 aa, Artificial Sequence
  Synthetic
WDSAR

SEQ ID NO: 6882 - protein, 10 aa, Artificial Sequence
  Synthetic
RNLVGPSDFY

SEQ ID NO: 6883 - protein, 4 aa, Artificial Sequence
  Synthetic
SGGT

SEQ ID NO: 6884 - protein, 4 aa, Artificial Sequence
  Synthetic
SGGS

SEQ ID NO: 6885 - protein, 5 aa, Artificial Sequence
  Synthetic
LSGGG

SEQ ID NO: 6886 - protein, 5 aa, Artificial Sequence
  Synthetic
RSGEN

SEQ ID NO: 6887 - protein, 5 aa, Artificial Sequence
  Synthetic
RSGGR

SEQ ID NO: 6888 - protein, 4 aa, Artificial Sequence
  Synthetic
SSGT

SEQ ID NO: 6889 - protein, 5 aa, Artificial Sequence
  Synthetic
SAGDR

SEQ ID NO: 6890 - protein, 5 aa, Artificial Sequence
  Synthetic
STGSS

SEQ ID NO: 6891 - protein, 5 aa, Artificial Sequence
  Synthetic
WSGGS

SEQ ID NO: 6892 - protein, 5 aa, Artificial Sequence
  Synthetic
WSGGS

SEQ ID NO: 6893 - protein, 5 aa, Artificial Sequence
  Synthetic
RSGRM

SEQ ID NO: 6894 - protein, 5 aa, Artificial Sequence
  Synthetic
RSGDY

SEQ ID NO: 6895 - protein, 5 aa, Artificial Sequence
  Synthetic
ASAGT

SEQ ID NO: 6896 - protein, 4 aa, Artificial Sequence
  Synthetic
RGGR

SEQ ID NO: 6897 - protein, 5 aa, Artificial Sequence
  Synthetic
WSGGS

SEQ ID NO: 6898 - protein, 5 aa, Artificial Sequence
  Synthetic
GRGLS

SEQ ID NO: 6899 - protein, 5 aa, Artificial Sequence
  Synthetic
WTPGS

SEQ ID NO: 6900 - protein, 5 aa, Artificial Sequence
  Synthetic
WSGGS

SEQ ID NO: 6901 - protein, 5 aa, Artificial Sequence
  Synthetic
WDGGQ

SEQ ID NO: 6902 - protein, 5 aa, Artificial Sequence
  Synthetic
ALGTR

SEQ ID NO: 6903 - protein, 5 aa, Artificial Sequence
  Synthetic
KSGSW

SEQ ID NO: 6904 - protein, 5 aa, Artificial Sequence
  Synthetic
GSGSN

SEQ ID NO: 6905 - protein, 4 aa, Artificial Sequence
  Synthetic
TDDS

SEQ ID NO: 6906 - protein, 4 aa, Artificial Sequence
  Synthetic
AGDR

SEQ ID NO: 6907 - protein, 4 aa, Artificial Sequence
  Synthetic
SFGS

SEQ ID NO: 6908 - protein, 4 aa, Artificial Sequence
  Synthetic
KGFD

SEQ ID NO: 6909 - protein, 5 aa, Artificial Sequence
  Synthetic
WTGGR

SEQ ID NO: 6910 - protein, 5 aa, Artificial Sequence
  Synthetic
WSGGT

SEQ ID NO: 6911 - protein, 5 aa, Artificial Sequence
  Synthetic
WSGSY

SEQ ID NO: 6912 - protein, 4 aa, Artificial Sequence
  Synthetic
RGGS

SEQ ID NO: 6913 - protein, 4 aa, Artificial Sequence
  Synthetic
AGGT

SEQ ID NO: 6914 - protein, 4 aa, Artificial Sequence
  Synthetic
WGTI

SEQ ID NO: 6915 - protein, 4 aa, Artificial Sequence
  Synthetic
RRGN

SEQ ID NO: 6916 - protein, 4 aa, Artificial Sequence
  Synthetic
SGGS

SEQ ID NO: 6917 - protein, 4 aa, Artificial Sequence
  Synthetic
RVGN

SEQ ID NO: 6918 - protein, 4 aa, Artificial Sequence
  Synthetic
SGGD

SEQ ID NO: 6919 - protein, 4 aa, Artificial Sequence
  Synthetic
SGGS

SEQ ID NO: 6920 - protein, 5 aa, Artificial Sequence
  Synthetic
GNGSR

SEQ ID NO: 6921 - protein, 5 aa, Artificial Sequence
  Synthetic
RSGSV

SEQ ID NO: 6922 - protein, 5 aa, Artificial Sequence
  Synthetic
WTGRS

SEQ ID NO: 6923 - protein, 5 aa, Artificial Sequence
  Synthetic
WSGDR

SEQ ID NO: 6924 - protein, 5 aa, Artificial Sequence
  Synthetic
RIGGS

SEQ ID NO: 6925 - protein, 4 aa, Artificial Sequence
  Synthetic
QGRI

SEQ ID NO: 6926 - protein, 5 aa, Artificial Sequence
  Synthetic
SSGGN

SEQ ID NO: 6927 - protein, 5 aa, Artificial Sequence
  Synthetic
WSDYS

SEQ ID NO: 6928 - protein, 5 aa, Artificial Sequence
  Synthetic
SSGGS

SEQ ID NO: 6929 - protein, 5 aa, Artificial Sequence
  Synthetic
RSDNS

SEQ ID NO: 6930 - protein, 4 aa, Artificial Sequence
  Synthetic
STGR

SEQ ID NO: 6931 - protein, 4 aa, Artificial Sequence
  Synthetic
SGDS

SEQ ID NO: 6932 - protein, 5 aa, Artificial Sequence
  Synthetic
SSLGS

SEQ ID NO: 6933 - protein, 4 aa, Artificial Sequence
  Synthetic
RAGT

SEQ ID NO: 6934 - protein, 4 aa, Artificial Sequence
  Synthetic
RNGR

SEQ ID NO: 6935 - protein, 4 aa, Artificial Sequence
  Synthetic
SAGA

SEQ ID NO: 6936 - protein, 5 aa, Artificial Sequence
  Synthetic
WNGGV

SEQ ID NO: 6937 - protein, 4 aa, Artificial Sequence
  Synthetic
SFGD

SEQ ID NO: 6938 - protein, 4 aa, Artificial Sequence
  Synthetic
SNGD

SEQ ID NO: 6939 - protein, 4 aa, Artificial Sequence
  Synthetic
WNSA

SEQ ID NO: 6940 - protein, 4 aa, Artificial Sequence
  Synthetic
SGGS

SEQ ID NO: 6941 - protein, 5 aa, Artificial Sequence
  Synthetic
WSGGS

SEQ ID NO: 6942 - protein, 4 aa, Artificial Sequence
  Synthetic
SGGS

SEQ ID NO: 6943 - protein, 4 aa, Artificial Sequence
  Synthetic
NEGS

SEQ ID NO: 6944 - protein, 5 aa, Artificial Sequence
  Synthetic
GEYGS

SEQ ID NO: 6945 - protein, 5 aa, Artificial Sequence
  Synthetic
WTGSG

SEQ ID NO: 6946 - protein, 7 aa, Artificial Sequence
  Synthetic
RYPKSGI

SEQ ID NO: 6947 - protein, 5 aa, Artificial Sequence
  Synthetic
SSGGS

SEQ ID NO: 6948 - protein, 5 aa, Artificial Sequence
  Synthetic
WSGGS

SEQ ID NO: 6949 - protein, 4 aa, Artificial Sequence
  Synthetic
SGGS

SEQ ID NO: 6950 - protein, 5 aa, Artificial Sequence
  Synthetic
ANGVS

SEQ ID NO: 6951 - protein, 5 aa, Artificial Sequence
  Synthetic
RFGFP

SEQ ID NO: 6952 - protein, 5 aa, Artificial Sequence
  Synthetic
SAGGS

SEQ ID NO: 6953 - protein, 4 aa, Artificial Sequence
  Synthetic
SGDT

SEQ ID NO: 6954 - protein, 5 aa, Artificial Sequence
  Synthetic
AGGGV

SEQ ID NO: 6955 - protein, 6 aa, Artificial Sequence
  Synthetic
SSSDGF

SEQ ID NO: 6956 - protein, 5 aa, Artificial Sequence
  Synthetic
NSDDD

SEQ ID NO: 6957 - protein, 5 aa, Artificial Sequence
  Synthetic
NFDGG

SEQ ID NO: 6958 - protein, 5 aa, Artificial Sequence
  Synthetic
GGDMS

SEQ ID NO: 6959 - protein, 5 aa, Artificial Sequence
  Synthetic
RSGGS

SEQ ID NO: 6960 - protein, 4 aa, Artificial Sequence
  Synthetic
FGGD

SEQ ID NO: 6961 - protein, 5 aa, Artificial Sequence
  Synthetic
NSGGS

SEQ ID NO: 6962 - protein, 4 aa, Artificial Sequence
  Synthetic
SLRK

SEQ ID NO: 6963 - protein, 5 aa, Artificial Sequence
  Synthetic
KITGN

SEQ ID NO: 6964 - protein, 4 aa, Artificial Sequence
  Synthetic
SGGS

SEQ ID NO: 6965 - protein, 5 aa, Artificial Sequence
  Synthetic
WGGVI

SEQ ID NO: 6966 - protein, 5 aa, Artificial Sequence
  Synthetic
WRNDY

SEQ ID NO: 6967 - protein, 5 aa, Artificial Sequence
  Synthetic
WSGRR

SEQ ID NO: 6968 - protein, 5 aa, Artificial Sequence
  Synthetic
IDGNT

SEQ ID NO: 6969 - protein, 5 aa, Artificial Sequence
  Synthetic
DDGST

SEQ ID NO: 6970 - protein, 7 aa, Artificial Sequence
  Synthetic
CSGGGGG

SEQ ID NO: 6971 - protein, 5 aa, Artificial Sequence
  Synthetic
AVGLV

SEQ ID NO: 6972 - protein, 5 aa, Artificial Sequence
  Synthetic
SSDGS

SEQ ID NO: 6973 - protein, 4 aa, Artificial Sequence
  Synthetic
EAGT

SEQ ID NO: 6974 - protein, 5 aa, Artificial Sequence
  Synthetic
NIGGV

SEQ ID NO: 6975 - protein, 5 aa, Artificial Sequence
  Synthetic
SSDGS

SEQ ID NO: 6976 - protein, 4 aa, Artificial Sequence
  Synthetic
ERGN

SEQ ID NO: 6977 - protein, 5 aa, Artificial Sequence
  Synthetic
WNAVS

SEQ ID NO: 6978 - protein, 5 aa, Artificial Sequence
  Synthetic
SSDGS

SEQ ID NO: 6979 - protein, 5 aa, Artificial Sequence
  Synthetic
WSAAI

SEQ ID NO: 6980 - protein, 5 aa, Artificial Sequence
  Synthetic
GNGGN

SEQ ID NO: 6981 - protein, 4 aa, Artificial Sequence
  Synthetic
RAAY

SEQ ID NO: 6982 - protein, 5 aa, Artificial Sequence
  Synthetic
RSGGS

SEQ ID NO: 6983 - protein, 4 aa, Artificial Sequence
  Synthetic
DDGS

SEQ ID NO: 6984 - protein, 5 aa, Artificial Sequence
  Synthetic
STDGA

SEQ ID NO: 6985 - protein, 4 aa, Artificial Sequence
  Synthetic
SGGS

SEQ ID NO: 6986 - protein, 4 aa, Artificial Sequence
  Synthetic
TEGK

SEQ ID NO: 6987 - protein, 5 aa, Artificial Sequence
  Synthetic
WGSAG

SEQ ID NO: 6988 - protein, 4 aa, Artificial Sequence
  Synthetic
SGGS

SEQ ID NO: 6989 - protein, 5 aa, Artificial Sequence
  Synthetic
WTGGL

SEQ ID NO: 6990 - protein, 5 aa, Artificial Sequence
  Synthetic
RSGGL

SEQ ID NO: 6991 - protein, 4 aa, Artificial Sequence
  Synthetic
SGGR

SEQ ID NO: 6992 - protein, 5 aa, Artificial Sequence
  Synthetic
LNGGR

SEQ ID NO: 6993 - protein, 4 aa, Artificial Sequence
  Synthetic
SGGN

SEQ ID NO: 6994 - protein, 5 aa, Artificial Sequence
  Synthetic
WSASS

SEQ ID NO: 6995 - protein, 4 aa, Artificial Sequence
  Synthetic
SVGD

SEQ ID NO: 6996 - protein, 4 aa, Artificial Sequence
  Synthetic
WGGT

SEQ ID NO: 6997 - protein, 4 aa, Artificial Sequence
  Synthetic
SYGD

SEQ ID NO: 6998 - protein, 5 aa, Artificial Sequence
  Synthetic
NLDGS

SEQ ID NO: 6999 - protein, 5 aa, Artificial Sequence
  Synthetic
WSGGS

SEQ ID NO: 7000 - protein, 4 aa, Artificial Sequence
  Synthetic
SGGI

SEQ ID NO: 7001 - protein, 4 aa, Artificial Sequence
  Synthetic
TTGT

SEQ ID NO: 7002 - protein, 4 aa, Artificial Sequence
  Synthetic
TSGI

SEQ ID NO: 7003 - protein, 5 aa, Artificial Sequence
  Synthetic
TRGGI

SEQ ID NO: 7004 - protein, 4 aa, Artificial Sequence
  Synthetic
EGGI

SEQ ID NO: 7005 - protein, 4 aa, Artificial Sequence
  Synthetic
NTGV

SEQ ID NO: 7006 - protein, 5 aa, Artificial Sequence
  Synthetic
WTGIS

SEQ ID NO: 7007 - protein, 4 aa, Artificial Sequence
  Synthetic
SGGG

SEQ ID NO: 7008 - protein, 4 aa, Artificial Sequence
  Synthetic
REGS

SEQ ID NO: 7009 - protein, 4 aa, Artificial Sequence
  Synthetic
SGGS

SEQ ID NO: 7010 - protein, 5 aa, Artificial Sequence
  Synthetic
WTGAN

SEQ ID NO: 7011 - protein, 5 aa, Artificial Sequence
  Synthetic
WADGT

SEQ ID NO: 7012 - protein, 5 aa, Artificial Sequence
  Synthetic
WSSGR

SEQ ID NO: 7013 - protein, 5 aa, Artificial Sequence
  Synthetic
WVGAS

SEQ ID NO: 7014 - protein, 8 aa, Artificial Sequence
  Synthetic
VGGKTNYK

SEQ ID NO: 7015 - protein, 5 aa, Artificial Sequence
  Synthetic
WSGGS

SEQ ID NO: 7016 - protein, 5 aa, Artificial Sequence
  Synthetic
SSGGT

SEQ ID NO: 7017 - protein, 5 aa, Artificial Sequence
  Synthetic
SVGGS

SEQ ID NO: 7018 - protein, 5 aa, Artificial Sequence
  Synthetic
WSGGS

SEQ ID NO: 7019 - protein, 5 aa, Artificial Sequence
  Synthetic
TKGGS

SEQ ID NO: 7020 - protein, 5 aa, Artificial Sequence
  Synthetic
RLGGY

SEQ ID NO: 7021 - protein, 4 aa, Artificial Sequence
  Synthetic
SSGV

SEQ ID NO: 7022 - protein, 5 aa, Artificial Sequence
  Synthetic
GSGGS

SEQ ID NO: 7023 - protein, 4 aa, Artificial Sequence
  Synthetic
SDVS

SEQ ID NO: 7024 - protein, 4 aa, Artificial Sequence
  Synthetic
SVGS

SEQ ID NO: 7025 - protein, 9 aa, Artificial Sequence
  Synthetic
RINSGSGAR

SEQ ID NO: 7026 - protein, 4 aa, Artificial Sequence
  Synthetic
SAGM

SEQ ID NO: 7027 - protein, 5 aa, Artificial Sequence
  Synthetic
WRGGN

SEQ ID NO: 7028 - protein, 4 aa, Artificial Sequence
  Synthetic
SDRS

SEQ ID NO: 7029 - protein, 5 aa, Artificial Sequence
  Synthetic
THDGN

SEQ ID NO: 7030 - protein, 5 aa, Artificial Sequence
  Synthetic
GSSGS

SEQ ID NO: 7031 - protein, 5 aa, Artificial Sequence
  Synthetic
SSHGS

SEQ ID NO: 7032 - protein, 6 aa, Artificial Sequence
  Synthetic
SSSDGF

SEQ ID NO: 7033 - protein, 5 aa, Artificial Sequence
  Synthetic
GVAAT

SEQ ID NO: 7034 - protein, 5 aa, Artificial Sequence
  Synthetic
GIDGT

SEQ ID NO: 7035 - protein, 5 aa, Artificial Sequence
  Synthetic
WSSSD

SEQ ID NO: 7036 - protein, 5 aa, Artificial Sequence
  Synthetic
DAGGN

SEQ ID NO: 7037 - protein, 6 aa, Artificial Sequence
  Synthetic
SYSGSI

SEQ ID NO: 7038 - protein, 4 aa, Artificial Sequence
  Synthetic
RDGS

SEQ ID NO: 7039 - protein, 5 aa, Artificial Sequence
  Synthetic
WNGGS

SEQ ID NO: 7040 - protein, 5 aa, Artificial Sequence
  Synthetic
WSGGN

SEQ ID NO: 7041 - protein, 5 aa, Artificial Sequence
  Synthetic
DSDAS

SEQ ID NO: 7042 - protein, 5 aa, Artificial Sequence
  Synthetic
WSDST

SEQ ID NO: 7043 - protein, 5 aa, Artificial Sequence
  Synthetic
WSGMT

SEQ ID NO: 7044 - protein, 4 aa, Artificial Sequence
  Synthetic
SGGR

SEQ ID NO: 7045 - protein, 9 aa, Artificial Sequence
  Synthetic
WSGSMSGST

SEQ ID NO: 7046 - protein, 5 aa, Artificial Sequence
  Synthetic
WSGGS

SEQ ID NO: 7047 - protein, 4 aa, Artificial Sequence
  Synthetic
YIFN

SEQ ID NO: 7048 - protein, 4 aa, Artificial Sequence
  Synthetic
NYGR

SEQ ID NO: 7049 - protein, 4 aa, Artificial Sequence
  Synthetic
SSGR

SEQ ID NO: 7050 - protein, 4 aa, Artificial Sequence
  Synthetic
ASGR

SEQ ID NO: 7051 - protein, 4 aa, Artificial Sequence
  Synthetic
GSGR

SEQ ID NO: 7052 - protein, 4 aa, Artificial Sequence
  Synthetic
GGGS

SEQ ID NO: 7053 - protein, 10 aa, Artificial Sequence
  Synthetic
WSVDGDATYY

SEQ ID NO: 7054 - protein, 5 aa, Artificial Sequence
  Synthetic
PSGGD

SEQ ID NO: 7055 - protein, 6 aa, Artificial Sequence
  Synthetic
SSGGGI

SEQ ID NO: 7056 - protein, 5 aa, Artificial Sequence
  Synthetic
SAGDR

SEQ ID NO: 7057 - protein, 4 aa, Artificial Sequence
  Synthetic
VGGT

SEQ ID NO: 7058 - protein, 4 aa, Artificial Sequence
  Synthetic
AGGG

SEQ ID NO: 7059 - protein, 41 aa, Artificial Sequence
  Synthetic
TTYAGSVKGRFTISRDDAKNTVYLQMVNLKSEDTARYYCAA

SEQ ID NO: 7060 - protein, 41 aa, Artificial Sequence
  Synthetic
PYYADSVKGRFTISQDNAKNRMYLQMNSLEPEDTAMYYCAA

SEQ ID NO: 7061 - protein, 41 aa, Artificial Sequence
  Synthetic
TAYADSVKDRFTISRDNAENTVYLQMNSLKPEDTAIYYCAA

SEQ ID NO: 7062 - protein, 41 aa, Artificial Sequence
  Synthetic
TYYADSVKGRFTFSQDNAKNTVYLQMDSLEPEDTATYYCAT

SEQ ID NO: 7063 - protein, 41 aa, Artificial Sequence
  Synthetic
AYYADSVKGRFTISQDKAKNTVYLQMNSLKPEDTAIYYCAA

SEQ ID NO: 7064 - protein, 41 aa, Artificial Sequence
  Synthetic
AYYADSVLGRFTISQDNAKSTLYLQMNNLKPEDTAMYYCAA

SEQ ID NO: 7065 - protein, 41 aa, Artificial Sequence
  Synthetic
MRYADTVKGRFTVSQDKDKNTVYLQMNSLKPEDTAIYYCAA

SEQ ID NO: 7066 - protein, 41 aa, Artificial Sequence
  Synthetic
TDYADSVKGRFTISQNHATKTVYLQMNSLKPEDTAAYYCAA

SEQ ID NO: 7067 - protein, 41 aa, Artificial Sequence
  Synthetic
TWHADSVKGRFTISGDNAKTAAYLQMNSLKPEDTAIYYCAY

SEQ ID NO: 7068 - protein, 41 aa, Artificial Sequence
  Synthetic
SSYEDSVKGRFTISRDDARNTVYLQMNSLKPEDTAVYYCNV

SEQ ID NO: 7069 - protein, 41 aa, Artificial Sequence
  Synthetic
TYYADSVKGRFTISRDNAKNTVTLQMNNLKPEDTAIYYCAA

SEQ ID NO: 7070 - protein, 41 aa, Artificial Sequence
  Synthetic
TYYPDAVKGRFTISRDNAKNTVYLQMNSLKPEDTAVYYCAA

SEQ ID NO: 7071 - protein, 41 aa, Artificial Sequence
  Synthetic
TTYADSVKGRFTISRDNAKDTVYLRMNSLKPEDTAIYYCAS

SEQ ID NO: 7072 - protein, 41 aa, Artificial Sequence
  Synthetic
TTYADSVKGRFTISRDNAKDTMYLQMNSPKPEDTAIYRCAA

SEQ ID NO: 7073 - protein, 41 aa, Artificial Sequence
  Synthetic
TNYADSVKGRFTISRDNAKNTVYLQMNSLKSEDTAVYYCAA

SEQ ID NO: 7074 - protein, 41 aa, Artificial Sequence
  Synthetic
TWHKESVKGRFTISQDNVKKTLYLQMNSLKPEDTAVYFCAV

SEQ ID NO: 7075 - protein, 41 aa, Artificial Sequence
  Synthetic
TLYADSVKGRFTISRDKGKNTVYLQMDSLKPEDTATYYCAA

SEQ ID NO: 7076 - protein, 41 aa, Artificial Sequence
  Synthetic
TAYADSVKGRFTISRDVALDTAYLQMNSLKPEDTAMYYCAA

SEQ ID NO: 7077 - protein, 41 aa, Artificial Sequence
  Synthetic
TAYADSVQGRLTISLDNAKNTLYLQMNSLKPEDTAMYYCAA

SEQ ID NO: 7078 - protein, 41 aa, Artificial Sequence
  Synthetic
TYYADSVKGRFTISRDNAKNTVTLQMNSLKPEDTAMYYCAA

SEQ ID NO: 7079 - protein, 41 aa, Artificial Sequence
  Synthetic
TIYADSVQGRFTISQDNAKNTVYLQMNSLKPEDTAMYYCAA

SEQ ID NO: 7080 - protein, 41 aa, Artificial Sequence
  Synthetic
ANYADSVKGRFTISRDNAANTAYLQMDSLKPEDTAVYYCAA

SEQ ID NO: 7081 - protein, 41 aa, Artificial Sequence
  Synthetic
TYSADSVKGRFTLSQDNNKNTVYLQMNSLKPEDTGIYYCAT

SEQ ID NO: 7082 - protein, 41 aa, Artificial Sequence
  Synthetic
TTYVDSVAGRFTISQGNAKNTAYLQMDSLKPDDTAMYYCKP

SEQ ID NO: 7083 - protein, 41 aa, Artificial Sequence
  Synthetic
TYYADSVKGRFTISQDNAKNTVYLLMNSLEPEDTAIYYCAA

SEQ ID NO: 7084 - protein, 41 aa, Artificial Sequence
  Synthetic
TYYADSVKGRFTISQDNAKNTVYLQMNSLKPEDTAMYYCAA

SEQ ID NO: 7085 - protein, 41 aa, Artificial Sequence
  Synthetic
TYYGDSVKGRFTISQDNAKNTVYLQMNSLKPEDTAIYYCAG

SEQ ID NO: 7086 - protein, 41 aa, Artificial Sequence
  Synthetic
TLYADSVKGRMTISRDKGKNTVYLQMDSLKPEDTATYYCAA

SEQ ID NO: 7087 - protein, 41 aa, Artificial Sequence
  Synthetic
TYYTDSVKGRFTISQDSAKNTVSLQMNNLKPEDTAIYYCAA

SEQ ID NO: 7088 - protein, 41 aa, Artificial Sequence
  Synthetic
TYYADSVKGRFTMSRDNAKNTVYLDMNSLKPEDTAIYYCAS

SEQ ID NO: 7089 - protein, 41 aa, Artificial Sequence
  Synthetic
TYITDSVKGRFTISRDEDSDTVYLQMNSLKPEDTATYYCAA

SEQ ID NO: 7090 - protein, 41 aa, Artificial Sequence
  Synthetic
TYYTDSVKGRFTISQDKAKNMAYLRMDSVKSEDTAIYTCGA

SEQ ID NO: 7091 - protein, 41 aa, Artificial Sequence; identical to SEQ ID NO: 7090
  Synthetic

SEQ ID NO: 7092 - protein, 41 aa, Artificial Sequence
  Synthetic
TWYADSVRDRFTISQDNAKNTVYLQMNSLKLEDTAIYYCTL

SEQ ID NO: 7093 - protein, 41 aa, Artificial Sequence
  Synthetic
TSYADSVKGRFTISKDNADNIMYLEMNSLKPEDTAIYYCAA

SEQ ID NO: 7094 - protein, 41 aa, Artificial Sequence
  Synthetic
TYYADSVKGRFTISQDNAKNTVYLQMNSLKPEDTAIYYCAA

SEQ ID NO: 7095 - protein, 41 aa, Artificial Sequence
  Synthetic
TYYADSVKGRFTISRDNAKNTVYLQMNSLKPEDTAMYYCAA

SEQ ID NO: 7096 - protein, 41 aa, Artificial Sequence
  Synthetic
IIFAESKAGQFTISQDNAKNTVYLQMNNLKPEDTAIYYCAA

SEQ ID NO: 7097 - protein, 41 aa, Artificial Sequence
  Synthetic
TSYADSVKGRFTISQDNAKNTMFLQMNSLKPEDTAIYYCAV

SEQ ID NO: 7098 - protein, 41 aa, Artificial Sequence
  Synthetic
SDYTDSVKGRFTISRDNAKNTMYLQMNNLKPEDTATYYCAR

SEQ ID NO: 7099 - protein, 41 aa, Artificial Sequence
  Synthetic
IYYQDSVKGRFTISRDNAKNTVYLQMNSLQREDTGMYYCQI

SEQ ID NO: 7100 - protein, 41 aa, Artificial Sequence; identical to SEQ ID NO: 7092
  Synthetic

SEQ ID NO: 7101 - protein, 41 aa, Artificial Sequence; identical to SEQ ID NO: 7075
  Synthetic

SEQ ID NO: 7102 - protein, 41 aa, Artificial Sequence
  Synthetic
PYYADSVKGRFTVSLDNAENTVYLQMNSLKPEDTALYYCAA

SEQ ID NO: 7103 - protein, 41 aa, Artificial Sequence
  Synthetic
TYYADSVKGRFTISQDNAKNTVYLQMNSLKPEDTASYYCAA

SEQ ID NO: 7104 - protein, 41 aa, Artificial Sequence
  Synthetic
TYYADSVKGRFTISRDNARNTVYLQMNSLKPEDTAVYYCAG

SEQ ID NO: 7105 - protein, 41 aa, Artificial Sequence
  Synthetic
TYYADSVKGRFTISRDNAKNTVYLQMNSLKPEDTAVYYCAT

SEQ ID NO: 7106 - protein, 41 aa, Artificial Sequence
  Synthetic
TNYANSVKGRFTISRDNAANTVYLQMNSLKPEDTAVYYCNV

SEQ ID NO: 7107 - protein, 41 aa, Artificial Sequence
  Synthetic
TGYADSVKGRFTISRDNAKNTVDLQMNSLKPEDTAIYYCAA

SEQ ID NO: 7108 - protein, 41 aa, Artificial Sequence
  Synthetic
TYYTDSVKGRFTISRDNAKTTVYLQMNSLKPEDTAVYYCAA

SEQ ID NO: 7109 - protein, 41 aa, Artificial Sequence
  Synthetic
TYYADSVKGRFTISRDNAKNTMYLQMNSLKPEDTAVYYCAA

SEQ ID NO: 7110 - protein, 41 aa, Artificial Sequence
  Synthetic
TYYADSVKGRFTISRDNAKNTVYLQMTSLKPEDTALYYCAA

SEQ ID NO: 7111 - protein, 41 aa, Artificial Sequence
  Synthetic
TYYADSVKGRFTISRDNAKNTVYLQMNSLKPEDTAVYYCAA

SEQ ID NO: 7112 - protein, 41 aa, Artificial Sequence
  Synthetic
TYYADSVKGRFTISRDNAKVTVYLQMNNLKREDTAVYFCAV

SEQ ID NO: 7113 - protein, 41 aa, Artificial Sequence
  Synthetic
TKYADSVKGRFAISRDNDKNTVWLRMNSLKPEDTAVYYCAA

SEQ ID NO: 7114 - protein, 41 aa, Artificial Sequence
  Synthetic
TIYADSAKGRFTISSDNAENTVYLQMNSLKPEDTAVYVCSA

SEQ ID NO: 7115 - protein, 41 aa, Artificial Sequence
  Synthetic
TDYADSVKGRFAISKDNAKNAVYLQMNSLKPEDTAVYYCAA

SEQ ID NO: 7116 - protein, 41 aa, Artificial Sequence
  Synthetic
TVYGESVEGRFTISRDIAKNTMNLQMNVLRPEDTANYYCAA

SEQ ID NO: 7117 - protein, 41 aa, Artificial Sequence; identical to SEQ ID NO: 7116
  Synthetic

SEQ ID NO: 7118 - protein, 41 aa, Artificial Sequence
  Synthetic
ADYGDFVKGRFTISRDNANNAATLQMDSLKPEDTAVYYCNA

SEQ ID NO: 7119 - protein, 41 aa, Artificial Sequence
  Synthetic
TYYGRSMKGRCAASRDNAKNTVALQLNSLKPEDTAVYYCAA

SEQ ID NO: 7120 - protein, 41 aa, Artificial Sequence
  Synthetic
TDYADSVKDRFTISRDNAKNTVSLQMNSLKPEDTAIYFCAR

SEQ ID NO: 7121 - protein, 41 aa, Artificial Sequence
  Synthetic
TNYADSVKGRFTISRDSAKNTVYLQMNSLKPEDTAVYYCNA

SEQ ID NO: 7122 - protein, 41 aa, Artificial Sequence; identical to SEQ ID NO: 7075
  Synthetic

SEQ ID NO: 7123 - protein, 41 aa, Artificial Sequence; identical to SEQ ID NO: 7075
  Synthetic

SEQ ID NO: 7124 - protein, 41 aa, Artificial Sequence; identical to SEQ ID NO: 7075
  Synthetic

SEQ ID NO: 7125 - protein, 41 aa, Artificial Sequence
  Synthetic
AFYADSVRGRFSISADSAKNTVYLQMNSLKPEDTAVYYVAA

SEQ ID NO: 7126 - protein, 41 aa, Artificial Sequence
  Synthetic
TNYADSVKGRFTISRDNAKNTVYLQMNSLKPEDTAVYYCNA

SEQ ID NO: 7127 - protein, 41 aa, Artificial Sequence
  Synthetic
IYYADSVKGRFIISRDNAKNTVYLQMNSLKPEDTAVYYCAA

SEQ ID NO: 7128 - protein, 41 aa, Artificial Sequence
  Synthetic
TRYADSAKGRFTISVDNAKNTVSLQMDNLNPDDTAVYYCAA

SEQ ID NO: 7129 - protein, 41 aa, Artificial Sequence
  Synthetic
TAYADSVKGRFTFSRDNAKNLLYLEMLSLEPEDTAVYYCAA

SEQ ID NO: 7130 - protein, 41 aa, Artificial Sequence
  Synthetic
TYYADSVKGRFTVSRDSGKNTVYLQMNSLKPEDTAIYYCAA

SEQ ID NO: 7131 - protein, 41 aa, Artificial Sequence
  Synthetic
TNYVDSVKGRFDISKDNAKNAVYLQMNSLKPEDTAVYYCAA

SEQ ID NO: 7132 - protein, 41 aa, Artificial Sequence
  Synthetic
TFYADAVKGRFTISRDNAKNTVYLQMNSLKPEDTAAYYCAA

SEQ ID NO: 7133 - protein, 41 aa, Artificial Sequence
  Synthetic
SYYSDSVRGRFTISQDNAKTTAFLLMSSLKPEDTAIYYCAT

SEQ ID NO: 7134 - protein, 41 aa, Artificial Sequence
  Synthetic
TYYAESLEGRFSVSRDAAATMVFLQADNVRLDDTASYYCAA

SEQ ID NO: 7135 - protein, 41 aa, Artificial Sequence
  Synthetic
TNYVDSVKGRFTVSRDNAKNVMYLQMNSLKPEDTAVYYCNA

SEQ ID NO: 7136 - protein, 41 aa, Artificial Sequence
  Synthetic
TYYTDSVKGRFTISRDNAKNTVELQMNSLKPEDTAVYYCAA

SEQ ID NO: 7137 - protein, 41 aa, Artificial Sequence
  Synthetic
TYYADSVKGRFAISRDIAKNTVDLTMNNLEPEDTAVYYCAA

SEQ ID NO: 7138 - protein, 41 aa, Artificial Sequence
  Synthetic
IYYKDSVKGRFTISRDDAKNTIYLQMNRLKPEDTAVYYCAA

SEQ ID NO: 7139 - protein, 41 aa, Artificial Sequence
  Synthetic
ANYADSVKGRFTISRDRARNTVYLQMNSLKPEDTGVYYCNA

SEQ ID NO: 7140 - protein, 41 aa, Artificial Sequence
  Synthetic
PTYADSVADRFTTSRDVANNTLYLQMNSLKHEDTAVYYCAA

SEQ ID NO: 7141 - protein, 41 aa, Artificial Sequence
  Synthetic
TKYADSVKGRFTISRDNAKNTVYLQMNSLKAEDTAVYYCNA

SEQ ID NO: 7142 - protein, 41 aa, Artificial Sequence
  Synthetic
TRYLDTVKGRFTISRDNAKSTVYLQMNSLKPEDTAVYYCAA

SEQ ID NO: 7143 - protein, 41 aa, Artificial Sequence
  Synthetic
PNYADSVKGRFTISRDNAKNMLYLQMSSLKPEDTALYYCNR

SEQ ID NO: 7144 - protein, 41 aa, Artificial Sequence
  Synthetic
TYYADSVKGRFTISRDNAKNTLYLQMNSLKPEDTAMYYCAA

SEQ ID NO: 7145 - protein, 41 aa, Artificial Sequence
  Synthetic
IYYADSVKGRFTISREDAKNTVYLQMNSLKPEDTAVYYCYV

SEQ ID NO: 7146 - protein, 41 aa, Artificial Sequence
  Synthetic
TNYADSVKGRFTISRDNAKNTVYLQMNSLKPEDTAVYYCYA

SEQ ID NO: 7147 - protein, 41 aa, Artificial Sequence
  Synthetic
TYYADSVKGRFAFSRDNAKNTVYLQMNSLKPEDTAVYYCVA

SEQ ID NO: 7148 - protein, 41 aa, Artificial Sequence
  Synthetic
TNYADSVKGRFTISKDNAENTLYLRMNSLKPEDTAVYYCKA

SEQ ID NO: 7149 - protein, 41 aa, Artificial Sequence
  Synthetic
ANYADAVKGRFTISRDNARSTVYLQMNSLKPEDTAVYYCDA

SEQ ID NO: 7150 - protein, 41 aa, Artificial Sequence
  Synthetic
TNYVDSVKGRFTISKDNAKKTVYLQMNCLKPEDTADYFCNL

SEQ ID NO: 7151 - protein, 41 aa, Artificial Sequence
  Synthetic
ANYADSVKGRFTISRDNAKNAAYLQMNSLKPEDTAIYFCAL

SEQ ID NO: 7152 - protein, 41 aa, Artificial Sequence
  Synthetic
QYYADSVKGRFTISRDNAMNAVYLQMNSVKAEDTAVYYCAA

SEQ ID NO: 7153 - protein, 41 aa, Artificial Sequence
  Synthetic
AYYADSVKGRFTISSDNAKNTVYLQMNSLRPEDTAVYYCAR

SEQ ID NO: 7154 - protein, 41 aa, Artificial Sequence
  Synthetic
TYYADSVKGRFTISRDNAESTVYLQMNSLKPEDTAVYYCAT

SEQ ID NO: 7155 - protein, 41 aa, Artificial Sequence
  Synthetic
PYYADSVKDRFTISRDNAKNTVYLQMNSLRPEDTAVYLCGE

SEQ ID NO: 7156 - protein, 41 aa, Artificial Sequence
  Synthetic
TYYRNSVKGRFTISRDNAKNTVYLQMNNMKPEDTAVYYCAA

SEQ ID NO: 7157 - protein, 41 aa, Artificial Sequence
  Synthetic
TYVADSVTGRFTISSDNAKNTVYLQMNSLKLEDTAVYYCAA

SEQ ID NO: 7158 - protein, 41 aa, Artificial Sequence
  Synthetic
TYYADSAKGRFTISRDNAKNTVYLQMNSLKPEDTAIYYCAA

SEQ ID NO: 7159 - protein, 41 aa, Artificial Sequence
  Synthetic
TTYADSVKGRFTISRDNARNTLYLQMNSLKPEDTAVYYCTS

SEQ ID NO: 7160 - protein, 41 aa, Artificial Sequence
  Synthetic
TTYGDSVKGRFTISRDNAEYLVYLQMDSLKPEDTAVYYCAA

SEQ ID NO: 7161 - protein, 41 aa, Artificial Sequence
  Synthetic
TLYADSVKGRFTMSRDNAKNTVYLQMNSLKPEDTAVYYCAA

SEQ ID NO: 7162 - protein, 41 aa, Artificial Sequence
  Synthetic
TMTVDSVKGRFTISRDNVQNTVYLEMNNLKPEDTAVYYCNA

SEQ ID NO: 7163 - protein, 41 aa, Artificial Sequence
  Synthetic
SYNADSVKGRFTISRDNAKNTVSLQMNSLKPEDTAVYYCAA

SEQ ID NO: 7164 - protein, 41 aa, Artificial Sequence
  Synthetic
TNYQDSVKGRFTISRDYVKNTAYLQMNNLKPDDTAVYICNA

SEQ ID NO: 7165 - protein, 41 aa, Artificial Sequence
  Synthetic
TNYKVSVKGRFTISRDNSKNMVYLQMNSLKPEDTADYLCRA

SEQ ID NO: 7166 - protein, 41 aa, Artificial Sequence
  Synthetic
TYYAESVKDRTTISRDNAKNTVYLEMNNLNADDTGIYFCAA

SEQ ID NO: 7167 - protein, 41 aa, Artificial Sequence
  Synthetic
SYYADSVKGRFTISQDNAKDTVFLRMNSLKPEDTAIYYCAL

SEQ ID NO: 7168 - protein, 41 aa, Artificial Sequence
  Synthetic
TYYGASMKGRFTISRDNAKNTVYLQMNGLAPEDTAVYYCAA

SEQ ID NO: 7169 - protein, 41 aa, Artificial Sequence
  Synthetic
TDYADSVRGRFSISADSAKNTVYLQMNSLKPEDTAVYYCAV

SEQ ID NO: 7170 - protein, 41 aa, Artificial Sequence; identical to SEQ ID NO: 7106
  Synthetic

SEQ ID NO: 7171 - protein, 41 aa, Artificial Sequence
  Synthetic
IDIADSVKGRFTISRDNAKNTVYLEMNSLKPEDTAQYFCAA

SEQ ID NO: 7172 - protein, 41 aa, Artificial Sequence
  Synthetic
TWYKDSVKGRFTISRDNAKTTVYLQMNSLKGEDTAVYYCAA

SEQ ID NO: 7173 - protein, 41 aa, Artificial Sequence
  Synthetic
TNYADFVKGRFTISRDNAKKTVYLEMNSLEPEDTAVYYCYT

SEQ ID NO: 7174 - protein, 41 aa, Artificial Sequence
  Synthetic
TYYADSVKGRFTIAIDNAKNTVYLQMNSLKLDDTAVYYCAV

SEQ ID NO: 7175 - protein, 41 aa, Artificial Sequence
  Synthetic
TYYASSVRGRFTISRDNAKKTVYLQMNSLKPEDTAVYTCGA

SEQ ID NO: 7176 - protein, 41 aa, Artificial Sequence
  Synthetic
TRYADSVKGRFAVSRDNAKNTVNLQMNSLKPEDTAVYYCAA

SEQ ID NO: 7177 - protein, 41 aa, Artificial Sequence
  Synthetic
THYADSVKGRFTISRDNAKNTVYLQMNSLKPDDTAVYYCNA

SEQ ID NO: 7178 - protein, 41 aa, Artificial Sequence
  Synthetic
TNYADSVKGRFTISRDNAKKMVYLQMNSLKPEDTAVYYCHA

SEQ ID NO: 7179 - protein, 41 aa, Artificial Sequence
  Synthetic
TIYADSAKGRFTVSADNAKKTVYLQMTRLKPEDTAVYYCGA

SEQ ID NO: 7180 - protein, 41 aa, Artificial Sequence
  Synthetic
TDYADSVKGRFTISRDNNKNTISLQMNSLKPEDTAVYYCAA

SEQ ID NO: 7181 - protein, 41 aa, Artificial Sequence
  Synthetic
TYYADSVKGRFTISRDNGKNMVYLQMHSLKPEDTAIYYCAA

SEQ ID NO: 7182 - protein, 41 aa, Artificial Sequence
  Synthetic
TNYADSVKGRFSISRDNAKNTVPLQMNSLKPEDTAIYYCSA

SEQ ID NO: 7183 - protein, 41 aa, Artificial Sequence; identical to SEQ ID NO: 7068
  Synthetic

SEQ ID NO: 7184 - protein, 41 aa, Artificial Sequence
  Synthetic
TYYADSVKGRFTISRDNAKNTVYLQMNSLKPEDTADYYCAR

SEQ ID NO: 7185 - protein, 41 aa, Artificial Sequence
  Synthetic
AYYADSVKGRFTISRDKAKNTVYLQMNSLKYEDTAVYYCAR

SEQ ID NO: 7186 - protein, 41 aa, Artificial Sequence
  Synthetic
AYYADSVKGRFTISRDKAKNTVYLQMNSLKYEDTAVYYCAQ

SEQ ID NO: 7187 - protein, 41 aa, Artificial Sequence
  Synthetic
TSLADSVKGRFTISRDNGKRTVYLQMNSLKPEDTAVYYCAA

SEQ ID NO: 7188 - protein, 41 aa, Artificial Sequence
  Synthetic
TYYTNSVKGRFTISRDSAKNNLYLQMDSLKPEDTAVYYCAA

SEQ ID NO: 7189 - protein, 41 aa, Artificial Sequence
  Synthetic
IFYTDSVKGRFTISRDHAKNTVSLQMNSLRPEDTAVYYCAA

SEQ ID NO: 7190 - protein, 41 aa, Artificial Sequence
  Synthetic
TNYADSVKGRFTLSRDNAKNTVYLQMNSLKPEDTAVYYCNV

SEQ ID NO: 7191 - protein, 41 aa, Artificial Sequence
  Synthetic
TSYADSVKDRFTISRDNAKNTVYLEMNNLKPEDTAVYYCAA

SEQ ID NO: 7192 - protein, 41 aa, Artificial Sequence
  Synthetic
PDIADSVNGRFTISRDNAKNTLYLQMDSLKPEDTAVYYCAA

SEQ ID NO: 7193 - protein, 41 aa, Artificial Sequence
  Synthetic
TKYADSVKGRVAISRDIAKNTLYLQMNNLKPEDTAVYYCAA

SEQ ID NO: 7194 - protein, 41 aa, Artificial Sequence; identical to SEQ ID NO: 7111
  Synthetic

SEQ ID NO: 7195 - protein, 41 aa, Artificial Sequence; identical to SEQ ID NO: 7111
  Synthetic

SEQ ID NO: 7196 - protein, 41 aa, Artificial Sequence
  Synthetic
TYYSDSVKGRFTISRDNAKNTEYLEMNNLKPEDTAVYYCTA

SEQ ID NO: 7197 - protein, 41 aa, Artificial Sequence
  Synthetic
TYYTDSMRGRFTISRDNAENTVYLQMDSLKPEDTAVYYCAT

SEQ ID NO: 7198 - protein, 41 aa, Artificial Sequence
  Synthetic
TYYADSVKGRYTISRDNAKNTAYLQMNSLKPEDTANYYCAA

SEQ ID NO: 7199 - protein, 41 aa, Artificial Sequence
  Synthetic
TMYPDSVKGRFTISRDNAKNTVYLQMNSLKPEDTAVYYCYY

SEQ ID NO: 7200 - protein, 41 aa, Artificial Sequence; identical to SEQ ID NO: 7068
  Synthetic

SEQ ID NO: 7201 - protein, 41 aa, Artificial Sequence
  Synthetic
TNYADSVKGRFTISRDNAKNTVYLQMNSLKPEDTAVYYCTA

SEQ ID NO: 7202 - protein, 41 aa, Artificial Sequence
  Synthetic
PVLADSVKGRFTISIDSAENTLALQMNRLKPEDTAVYYCFA

SEQ ID NO: 7203 - protein, 41 aa, Artificial Sequence
  Synthetic
AYYGDSVKGRFTISRDNAKNTVYLQMNSLKPEDTAVYYCAR

SEQ ID NO: 7204 - protein, 41 aa, Artificial Sequence
  Synthetic
KLYADSVKGRFTISRDNAKNTVYLQMNTLKREDTAVYYCAA

SEQ ID NO: 7205 - protein, 41 aa, Artificial Sequence
  Synthetic
TEYADSVKGRVTISRDNAKNTVYLQMNSLKPGDTAVYHCAA

SEQ ID NO: 7206 - protein, 41 aa, Artificial Sequence
  Synthetic
TFYADSVSGRFTISGGSTKNTLYLQMNSLKPEDTAIYYCAR

SEQ ID NO: 7207 - protein, 41 aa, Artificial Sequence
  Synthetic
TTYADSVKDRFTISRDNAKNTVYLQMNSLKPEDTAVYYCNT

SEQ ID NO: 7208 - protein, 41 aa, Artificial Sequence; identical to SEQ ID NO: 7111
  Synthetic

SEQ ID NO: 7209 - protein, 41 aa, Artificial Sequence
  Synthetic
TAYADAVKGRFTISRDNAANTVYLQMTSLKPEDTAVYFCAA

SEQ ID NO: 7210 - protein, 41 aa, Artificial Sequence
  Synthetic
TNYADFVEGRFTISRDNAKNTVYLQMNGLRPEDTAVYYCHA

SEQ ID NO: 7211 - protein, 41 aa, Artificial Sequence
  Synthetic
TDYADSVKGRFTISRDNAKNTVYLQMNSLKPEDTATYYCHA

SEQ ID NO: 7212 - protein, 41 aa, Artificial Sequence
  Synthetic
TRYADSVKGRFTISRDNAKNTVYLQMDSLRPEDTAVYYCNA

SEQ ID NO: 7213 - protein, 41 aa, Artificial Sequence
  Synthetic
TRYAEPVKGRFTISRDNAQNKVYLQMNSLKPEDTAVYYCWL

SEQ ID NO: 7214 - protein, 41 aa, Artificial Sequence
  Synthetic
TDYADSVKGRFTISRDNAKNTVYLQMNSLKPEDTAVYYCNA

SEQ ID NO: 7215 - protein, 41 aa, Artificial Sequence
  Synthetic
RDYADSVKGRFTISRDNAKNTVYLQMNSLKPEDTAVYYCAA

SEQ ID NO: 7216 - protein, 41 aa, Artificial Sequence
  Synthetic
TRYADSAKGRFTISKDNAKNTVSLQMDNLNPDDTAVYYCAA

SEQ ID NO: 7217 - protein, 41 aa, Artificial Sequence
  Synthetic
ADYPDSVKGRFTISRDNAKNAVYLQMNSLKPEDTAVYYCAA

SEQ ID NO: 7218 - protein, 41 aa, Artificial Sequence
  Synthetic
TYGTDSVKGRFAISRDNAKNTMYLQMNSLKPEDTAVYYCAA

SEQ ID NO: 7219 - protein, 41 aa, Artificial Sequence
  Synthetic
TVYADFVKGRFTLSRDNAKNMVYLQMNSLKPEDTAVYYCGA

SEQ ID NO: 7220 - protein, 41 aa, Artificial Sequence
  Synthetic
QYYGDSVRGRFTISRDYAKNSVDLQLDGLRPEDTAVYYCAA

SEQ ID NO: 7221 - protein, 41 aa, Artificial Sequence
  Synthetic
VVYRDSVKGRFTIARDNAANAVYLQMNSLKPEDTAVYYCAA

SEQ ID NO: 7222 - protein, 41 aa, Artificial Sequence
  Synthetic
TDYANSVKNRFTISRDNAKNTVYLQMNSLKPEDTAVYYCAA

SEQ ID NO: 7223 - protein, 41 aa, Artificial Sequence
  Synthetic
THYADSVKGRFTISRDNSKNTVYLQMNSLKPEDTAVYYCAA

SEQ ID NO: 7224 - protein, 41 aa, Artificial Sequence
  Synthetic
TYYADSVKGRFTISRDSAKNTVYLQMNSLKPEDTAVYYCAA

SEQ ID NO: 7225 - protein, 41 aa, Artificial Sequence
  Synthetic
TNYIDSVKGRFTISRDNAKTTVYLQMNSLKPEDTAVYYCNL

SEQ ID NO: 7226 - protein, 41 aa, Artificial Sequence
  Synthetic
TNYADPVKGRFTISRDNAKNTVYLQMNSLKPEDTAVYYCNA

SEQ ID NO: 7227 - protein, 41 aa, Artificial Sequence
  Synthetic
TYYADSVKGRITISRDNAKNTVYLQMNSLKPEDTAVYYCAA

SEQ ID NO: 7228 - protein, 41 aa, Artificial Sequence
  Synthetic
TTYADSVKGRFTISRDNAKNTVYLQMSTLQSEDTAVYYCNV

SEQ ID NO: 7229 - protein, 41 aa, Artificial Sequence
  Synthetic
TIYAPSLKDRFTISRDDDNNILYLQMSDLTPGDTAVYYCNL

SEQ ID NO: 7230 - protein, 41 aa, Artificial Sequence
  Synthetic
LLYAEPVKGRFTISRDNAKNTVYLQMNSLKPEDTAVYYCRL

SEQ ID NO: 7231 - protein, 41 aa, Artificial Sequence
  Synthetic
TYYTNSVKGRFTISRDNAKNTVYLQMNSLKPEDTAVYYCAR

SEQ ID NO: 7232 - protein, 41 aa, Artificial Sequence
  Synthetic
AIYRDSVKGRFTISRDNARNAVSLQTNSLKTEDTAVYYCNT

SEQ ID NO: 7233 - protein, 41 aa, Artificial Sequence
  Synthetic
IRYADSVKGRFTLSRDNAKNTVSLQMNSLEPEDTAVYYCHS

SEQ ID NO: 7234 - protein, 41 aa, Artificial Sequence
  Synthetic
TWYADFVKGRFTISRDNAKNTLYLQMNSLKPEDTALYYCAR

SEQ ID NO: 7235 - protein, 41 aa, Artificial Sequence
  Synthetic
TKYGDSVKGRFTISRDNAKNTVYLQMSSLKPEDTAVYYCNA

SEQ ID NO: 7236 - protein, 41 aa, Artificial Sequence
  Synthetic
TYYTDSVKGRFTISRDNAKNTVYLQMNSLKPDDTAVYYCAA

SEQ ID NO: 7237 - protein, 41 aa, Artificial Sequence
  Synthetic
TNYGDFVKGRFTISRDNAKNTVYLQMDSLKPEDTAVYYCAA

SEQ ID NO: 7238 - protein, 41 aa, Artificial Sequence
  Synthetic
SNYADSVKGRFTISGDNAKNTVSLQMNSLKPEDTAVYYCSA

SEQ ID NO: 7239 - protein, 41 aa, Artificial Sequence
  Synthetic
TVYVDSVKGRFTASRDNAKNTVYLQLNSLKPDDTGIYYCVS

SEQ ID NO: 7240 - protein, 41 aa, Artificial Sequence
  Synthetic
TYYLDSVKGRFTISRDNAKNALYLQMNNLKPEDTAVYYCAR

SEQ ID NO: 7241 - protein, 41 aa, Artificial Sequence
  Synthetic
VTYLDSVKGRFTISRDNAKKMAFLQMDNLKPEDTAVYYCNV

SEQ ID NO: 7242 - protein, 41 aa, Artificial Sequence
  Synthetic
TNYADSVKGRFTISRDNAKNTVDLQMNSLKPEDTAIYYCAA

SEQ ID NO: 7243 - protein, 41 aa, Artificial Sequence
  Synthetic
TYYADSVKGRFTISRDNAKNTVYLQMNSLKLEDTAVYYCAA

SEQ ID NO: 7244 - protein, 41 aa, Artificial Sequence
  Synthetic
STYADSVKGRFTVSRDNAKNTVYLQMNSLKPEDTAVYYCNA

SEQ ID NO: 7245 - protein, 41 aa, Artificial Sequence
  Synthetic
TDYADSVKGRFTISRDNAKNTVYLQMNSLKPEDTAVYYCHV

SEQ ID NO: 7246 - protein, 41 aa, Artificial Sequence
  Synthetic
LDYADSIKGRFTISRDNAKNTVYLQMNDLKPEDTATYSCAA

SEQ ID NO: 7247 - protein, 41 aa, Artificial Sequence
  Synthetic
LYYSDSVKGRFTISRDNAKTTVYLQMHNLKPEDTAIYFCAA

SEQ ID NO: 7248 - protein, 41 aa, Artificial Sequence
  Synthetic
THYADSVKERFTISRDNAKNTMYLQMNSLKPEDTAVYYCNA

SEQ ID NO: 7249 - protein, 41 aa, Artificial Sequence
  Synthetic
TTYADSVQGRFTISRDNAKNAVYLQMNSLTPEDTAVYFCNA

SEQ ID NO: 7250 - protein, 41 aa, Artificial Sequence
  Synthetic
TYYTGSVQGRFTISRDNAKRTVYLQMDSLKPEDTAVYSCAA

SEQ ID NO: 7251 - protein, 41 aa, Artificial Sequence
  Synthetic
TSYSDSVKGRFTISRDNAKNTVYLQMNSLKPEDTAVYYCAA

SEQ ID NO: 7252 - protein, 41 aa, Artificial Sequence
  Synthetic
TYYADSVKGRFTIFMNNAKDTVYLQMNSLKPEDTAIYYCAE

SEQ ID NO: 7253 - protein, 41 aa, Artificial Sequence
  Synthetic
TYYADSVKSRFTMSRDNAKNTVYLQMNSLKPEDTAVYYCAA

SEQ ID NO: 7254 - protein, 41 aa, Artificial Sequence
  Synthetic
TVYDDSVKGRFTITRDDDKNILYLQMNDLKPEDTAMYYCKA

SEQ ID NO: 7255 - protein, 41 aa, Artificial Sequence
  Synthetic
THYADSVKGRFTISRDNAKNTVYLQMNSLKPEDTAVYYCAA

SEQ ID NO: 7256 - protein, 41 aa, Artificial Sequence
  Synthetic
TNYADSVKGRFTISRDNAKNAVYLQMNSLKPEDTAVYYCNA

SEQ ID NO: 7257 - protein, 41 aa, Artificial Sequence
  Synthetic
TKYADSVKGRFTISRDKAKNTVYLQMNSLKPEDTGVYYCAA

SEQ ID NO: 7258 - protein, 41 aa, Artificial Sequence
  Synthetic
INYADSVKGRFTISRDDAKNTVSLQMNSLKPEDTAVYYCHA

SEQ ID NO: 7259 - protein, 41 aa, Artificial Sequence
  Synthetic
TAYADSVKGRFTISRDNAKNTVHLQMNSLKPEDTAVYYCAT

SEQ ID NO: 7260 - protein, 41 aa, Artificial Sequence
  Synthetic
TVYSESVKDRFTISRDNAKKIVYLQMNSLQPEDTAVYYCAA

SEQ ID NO: 7261 - protein, 41 aa, Artificial Sequence
  Synthetic
TNYADSVKGRFTISRDDAKNTVYLQMNSLKPEETAVYYCAA

SEQ ID NO: 7262 - protein, 41 aa, Artificial Sequence
  Synthetic
TTYADSVKGRFTISRDNASNMVYLLMNNLKPEDTAVYYCAA

SEQ ID NO: 7263 - protein, 41 aa, Artificial Sequence
  Synthetic
TYYADSVKGRFTISRDNAKNTVYLQMNSLKPEDTAVYNCAA

SEQ ID NO: 7264 - protein, 41 aa, Artificial Sequence
  Synthetic
QSYSDSVKGRFTISRDTANNRVHLQMNNLKPEDTAVYYCAA

SEQ ID NO: 7265 - protein, 41 aa, Artificial Sequence
  Synthetic
TRYADSVKGRFTISRDNAKNTVYLQMNSLKPEDTAVYFCAA

SEQ ID NO: 7266 - protein, 41 aa, Artificial Sequence
  Synthetic
TYYADSMQGRFTISRDNAKKTVALQMNSLKPEDTAVYYCAA

SEQ ID NO: 7267 - protein, 41 aa, Artificial Sequence
  Synthetic
RNYADSVLGRFSISRDFAKNEVYLQMNSLEPEDTAVYYCAA

SEQ ID NO: 7268 - protein, 41 aa, Artificial Sequence
  Synthetic
TYYADSVKGRFTISRDNAKNTVYLQMNNLKPEDTDVYYCAA

SEQ ID NO: 7269 - protein, 41 aa, Artificial Sequence
  Synthetic
TTYADSVRGRFTIARDNAKNTVYLQMNSLNPEDTAVYYCNA

SEQ ID NO: 7270 - protein, 41 aa, Artificial Sequence
  Synthetic
TDYGDSVKGRFTISRDNAKTTVYLEMNSLKPEDTATYYCSA

SEQ ID NO: 7271 - protein, 41 aa, Artificial Sequence
  Synthetic
AYYADSVKGRFTISSDNAKNTVYLQMNSLKPEDTAVYYCAA

SEQ ID NO: 7272 - protein, 41 aa, Artificial Sequence
  Synthetic
AMYRESVQGRFTVTRDFTNKMVSLQMDNLKPEDTAVYYCHV

SEQ ID NO: 7273 - protein, 41 aa, Artificial Sequence
  Synthetic
TNYADSVKGRFTVSRDNAKNTVYLQMNSLKPEDTAVYYCAG

SEQ ID NO: 7274 - protein, 41 aa, Artificial Sequence
  Synthetic
TYYTDSVEGRFTISRDNAKNTVYLQMNSLKPDDTAVYYCAA

SEQ ID NO: 7275 - protein, 41 aa, Artificial Sequence
  Synthetic
TNYADSVKGRFTILRDKGMNTAYLQMNSLEPEDTAVYYCAA

SEQ ID NO: 7276 - protein, 41 aa, Artificial Sequence
  Synthetic
TYYLDSVKGRFTTSRDNAKNTVYLQLNNLKPEDTAIYYCAA

SEQ ID NO: 7277 - protein, 41 aa, Artificial Sequence
  Synthetic
TYYADSVKGRFTISRDNAKNMVSLQMNSLKPEDTAVYVCAG

SEQ ID NO: 7278 - protein, 41 aa, Artificial Sequence
  Synthetic
PNYADSVKGRFTISRDNAKNTVYLQMSSLKPEDTAVYYCAG

SEQ ID NO: 7279 - protein, 41 aa, Artificial Sequence
  Synthetic
TDYVDSVKGRFTISRDIAENTVYLQMNSLNPEDTAVYYCKG

SEQ ID NO: 7280 - protein, 41 aa, Artificial Sequence
  Synthetic
TYYADSVKGRFTISRNNAKNTVYLQMNNLKPEDTAIYYCAA

SEQ ID NO: 7281 - protein, 41 aa, Artificial Sequence
  Synthetic
TDYAGSVKGRFTISRDNAKKTSYLQMNNVKPEDTGVYYCRL

SEQ ID NO: 7282 - protein, 41 aa, Artificial Sequence
  Synthetic
TNYGGSVKGRFTISRDNAKNTVYLQMFGLKPEDAGNYVCNA

SEQ ID NO: 7283 - protein, 41 aa, Artificial Sequence
  Synthetic
INYADSVKGRFTISRDNAKNTVDLQMDSLRPEDSATYYCHI

SEQ ID NO: 7284 - protein, 41 aa, Artificial Sequence; identical to SEQ ID NO: 7175
  Synthetic

SEQ ID NO: 7285 - protein, 41 aa, Artificial Sequence
  Synthetic
TKYADSVKGRFTISKDNAKNTVYLQMNSLKPEDTAVYYCAA

SEQ ID NO: 7286 - protein, 41 aa, Artificial Sequence
  Synthetic
LFYADSVNGRFTISRDNAKRTVTLQMNSLKPEDTAVYYCAA

SEQ ID NO: 7287 - protein, 41 aa, Artificial Sequence
  Synthetic
TQYAESLKGRFAISRDNAKNTVYLQMGSLKPEDTAVYYCAG

SEQ ID NO: 7288 - protein, 41 aa, Artificial Sequence
  Synthetic
TTYADSVKGRFTISRDNAKTTVYLQMNSLKPEDTAVYYCNA

SEQ ID NO: 7289 - protein, 41 aa, Artificial Sequence
  Synthetic
TYSADSVKGRFTISRDNDKNTVYLQMSNLKPEDTAVYYCAA

SEQ ID NO: 7290 - protein, 41 aa, Artificial Sequence
  Synthetic
TYYADSVKGRFTISRDNAKNTIDLQMNSLKPEDTAVYYCNA

SEQ ID NO: 7291 - protein, 41 aa, Artificial Sequence
  Synthetic
TYYRDSVKGRFTVSRDNAKNTVYLHLNSLKLEDTAAYYCAG

SEQ ID NO: 7292 - protein, 41 aa, Artificial Sequence
  Synthetic
TTYAGSVKGRFTISRDNAKNTVYLEMSSLKPEDTAVYYCNA

SEQ ID NO: 7293 - protein, 41 aa, Artificial Sequence
  Synthetic
PNYADSVKGRFTISRDNSKNTQYLQMNSLKPEDTAVYYCAA

SEQ ID NO: 7294 - protein, 41 aa, Artificial Sequence
  Synthetic
TNYRDSVKGRFTISRDNAKNTVYLQMNSLKPEDTAVYYCNA

SEQ ID NO: 7295 - protein, 41 aa, Artificial Sequence
  Synthetic
TYYPDSVKGRFTASSDKAKNMVYLQMNSLKPEDTAVYYCAA

SEQ ID NO: 7296 - protein, 41 aa, Artificial Sequence
  Synthetic
TYYADSVQGRFTISRDNDKNSVYLQMNSLKPEDTAVYYCAA

SEQ ID NO: 7297 - protein, 41 aa, Artificial Sequence
  Synthetic
TRYADSVKGRFTISRDNGKNTVYLDMNSLKPEDTAVYYCMY

SEQ ID NO: 7298 - protein, 41 aa, Artificial Sequence
  Synthetic
ADYGDFVKGRFTISRDNAENTVDLHMNSLKPEDTAVYYCHE

SEQ ID NO: 7299 - protein, 41 aa, Artificial Sequence
  Synthetic
VNYADSVKGRFTISQDSAKKTLYLEMNSLKPEDTALYSCAT

SEQ ID NO: 7300 - protein, 41 aa, Artificial Sequence
  Synthetic
TYYADSVKGRFTISRDNAKNTVSLQMNSLKPEDTATYYCAA

SEQ ID NO: 7301 - protein, 41 aa, Artificial Sequence
  Synthetic
LNYGDFVKGRFTISRDNAKNTVYLQMSNLKSEDTGVYFCAA

SEQ ID NO: 7302 - protein, 41 aa, Artificial Sequence
  Synthetic
TEFADSVKGRFTISRDNAKTTVDLQMNSLKPEDTAVYYCAA

SEQ ID NO: 7303 - protein, 41 aa, Artificial Sequence
  Synthetic
TYYADIAKGRFTISRDNAKNTLYLQMDSLKPEDTAVYYCAA

SEQ ID NO: 7304 - protein, 41 aa, Artificial Sequence
  Synthetic
TNYADSVKGRFTISGDNAKNTVYLQMNSLKPEDTAVYYCKR

SEQ ID NO: 7305 - protein, 41 aa, Artificial Sequence
  Synthetic
TDYADSVKGRFTISRDNAKNMVYLLMSNLRPEDTAVYYCNR

SEQ ID NO: 7306 - protein, 41 aa, Artificial Sequence
  Synthetic
TDYADSVKGRFTISRDNAKNTVYLQMDSLKPEDTAIYYCNA

SEQ ID NO: 7307 - protein, 41 aa, Artificial Sequence
  Synthetic
TYYADSVRGRFTISRDNAKNTVYLEMNSLKPEDTAVYYCAA

SEQ ID NO: 7308 - protein, 41 aa, Artificial Sequence
  Synthetic
TLYGDSVKGRFTVSRDNVKNMVYLQMNNLKPEDTALYYCAD

SEQ ID NO: 7309 - protein, 41 aa, Artificial Sequence
  Synthetic
TSIADSVKGRFTMSRDPAKITVYLQMNGLKPEDTAVYYCAA

SEQ ID NO: 7310 - protein, 41 aa, Artificial Sequence
  Synthetic
TLYADFAKGRFTISRDNAKNTVYLQMNSLKPEDTAVYSCAA

SEQ ID NO: 7311 - protein, 41 aa, Artificial Sequence
  Synthetic
DSVQGRFIITRDNTGDNTKSTVTLQMNRLKPEDTAVYYCNT

SEQ ID NO: 7312 - protein, 41 aa, Artificial Sequence
  Synthetic
IHYADSVKGRFTISRDNAKNTVYLQMNSLKPEDTAVYTCVA

SEQ ID NO: 7313 - protein, 41 aa, Artificial Sequence
  Synthetic
TNYADSVKGRFTVSRDNAKNTVYLQMNSLKPEDTAVYYCVA

SEQ ID NO: 7314 - protein, 41 aa, Artificial Sequence
  Synthetic
TNYADSVKGRFTISRDNGKNTLYLQMNSLKPEDTAVYFCVA

SEQ ID NO: 7315 - protein, 41 aa, Artificial Sequence
  Synthetic
TNYADSVKGRFTISRDNAKNTVYLQMNSLKPEDTAVYYCAA

SEQ ID NO: 7316 - protein, 41 aa, Artificial Sequence
  Synthetic
TWYHDSVKGRFTISRDNAKNTVYLQMNSLKPEDTAVYYCAA

SEQ ID NO: 7317 - protein, 41 aa, Artificial Sequence
  Synthetic
TSYAGPVKGRFTISQDNAKNTVYLLMNSLKPEDTAIYYCAA

SEQ ID NO: 7318 - protein, 41 aa, Artificial Sequence
  Synthetic
TTYVDSVKGRFSISRDSAEDSAKNTVSLQMNSLKPEDTAFY

SEQ ID NO: 7319 - protein, 41 aa, Artificial Sequence
  Synthetic
ANYAASVKGRFTISRDNAKNTVYLQMNSLKPEDTAIYYCAA

SEQ ID NO: 7320 - protein, 41 aa, Artificial Sequence
  Synthetic
TKYADSVKGRFTISRDNAKRTVYLQMNDLKPEDAAVYYCNV

SEQ ID NO: 7321 - protein, 41 aa, Artificial Sequence
  Synthetic
TNYADSLKGRFTISRENAENTVYLQMNSLKPEDTAIYYCKY

SEQ ID NO: 7322 - protein, 41 aa, Artificial Sequence
  Synthetic
TDYADSVKGRFTISRDDAKNTVTLQMNSLEPEDTARYYCAL

SEQ ID NO: 7323 - protein, 41 aa, Artificial Sequence
  Synthetic
TNYADSVKGRFTISRDNAKNTVYLQMNSLKPEDTAVYYCHT

SEQ ID NO: 7324 - protein, 41 aa, Artificial Sequence
  Synthetic
THYADFVKGRFTISRDNVKNTVYLQMNSLKPEDTAVYYCAA

SEQ ID NO: 7325 - protein, 41 aa, Artificial Sequence
  Synthetic
TWYAESVEGRFTISRDNVKNTLYLQMNSLKPEDTAMYYCRD

SEQ ID NO: 7326 - protein, 41 aa, Artificial Sequence
  Synthetic
THYTDSVKGRFTISRDNAENTLYLQMNSLKTEDTAVYYCAA

SEQ ID NO: 7327 - protein, 41 aa, Artificial Sequence
  Synthetic
TYYPDSVKGRFTISRDNAKNTVYLQMNSLKPEDTAVYYCAT

SEQ ID NO: 7328 - protein, 41 aa, Artificial Sequence; identical to SEQ ID NO: 7105
  Synthetic

SEQ ID NO: 7329 - protein, 41 aa, Artificial Sequence; identical to SEQ ID NO: 7251
  Synthetic

SEQ ID NO: 7330 - protein, 41 aa, Artificial Sequence
  Synthetic
TTYADSVRGRFTISRDDAKATVYLQMNSLKPEDTAVYYCAT

SEQ ID NO: 7331 - protein, 41 aa, Artificial Sequence
  Synthetic
AAYADSVRGRATISRDSAKKTVYLQMNSLKPEDTAVYSCAT

SEQ ID NO: 7332 - protein, 41 aa, Artificial Sequence
  Synthetic
TWYADSVKGRFTISKDDAANGVHLQMSSLKPEDTAVYYCAS

SEQ ID NO: 7333 - protein, 41 aa, Artificial Sequence
  Synthetic
GSIADPVKGRFTISRDNAKNTVHLQMNSLKPEDTAMYVCNA

SEQ ID NO: 7334 - protein, 41 aa, Artificial Sequence
  Synthetic
TNYADSVKGRFTISRDNVEKRVYLEMNNLKPEDTAVYYCNA

SEQ ID NO: 7335 - protein, 41 aa, Artificial Sequence
  Synthetic
TNYADSVKGRFTISRDNAKNTLYLQMNSLKPEDTAVYLCHV

SEQ ID NO: 7336 - protein, 41 aa, Artificial Sequence
  Synthetic
NTRYDGSAEGRFTIARENANTVYLQMNNLRPEDSNVYVCGA

SEQ ID NO: 7337 - protein, 41 aa, Artificial Sequence
  Synthetic
TYYADSVKGRFTIYRDNYKNTVYLQMNSLKPEDTAVYYCNA

SEQ ID NO: 7338 - protein, 41 aa, Artificial Sequence
  Synthetic
THYADSVKGRFTISRDNAKSTVYLQMNSLKPEDTAVYYCAA

SEQ ID NO: 7339 - protein, 41 aa, Artificial Sequence
  Synthetic
IYYTDSVKGRFTISRDNAKNTVYLQMNSLIPDDTAVYYCAA

SEQ ID NO: 7340 - protein, 41 aa, Artificial Sequence
  Synthetic
TNYADSVKGRFTISRDTAKNTVYLQMNSLKLEDTAVYHCAA

SEQ ID NO: 7341 - protein, 41 aa, Artificial Sequence
  Synthetic
TYSADSVKDRFTISRDKTKNTVYLQMNSLKPEDTAVYYCAA

SEQ ID NO: 7342 - protein, 41 aa, Artificial Sequence
  Synthetic
TNYADSVKGRFTISRDNIKNTVYLQMNSLKPEDTAVYYCNA

SEQ ID NO: 7343 - protein, 41 aa, Artificial Sequence
  Synthetic
TYYTDSVKGRFTISRDNAKNTLYLQMNSLKPEDTAMYYCAA

SEQ ID NO: 7344 - protein, 41 aa, Artificial Sequence
  Synthetic
TYYADSVKGRFTISRDNAKNTVYLQMNSLKPEDTAVYLCAA

SEQ ID NO: 7345 - protein, 41 aa, Artificial Sequence
  Synthetic
TYYADSVKGRFTISRDNAKNTVFLQMNSLKPEDTAVYYCAA

SEQ ID NO: 7346 - protein, 41 aa, Artificial Sequence
  Synthetic
TDYGDSLKGRFTISRDNAANTVNLQMNNLAPEDTALYYCNA

SEQ ID NO: 7347 - protein, 41 aa, Artificial Sequence
  Synthetic
INEADSVKGRFTISRDNAKNTVYLQMNSLKPEDTAVYYCNV

SEQ ID NO: 7348 - protein, 41 aa, Artificial Sequence
  Synthetic
TNYADSVKGRFTISRDNAKNTVSLQMNSLKPEDTAVYYCNA

SEQ ID NO: 7349 - protein, 41 aa, Artificial Sequence
  Synthetic
TNYADSVKGRFTISRDNAKNTVSLQMNSLKPEDTAVYYCNV

SEQ ID NO: 7350 - protein, 41 aa, Artificial Sequence
  Synthetic
THYADPVKGRFTISRDNAKNRVDLQMNNLKPEDTAVYYCNA

SEQ ID NO: 7351 - protein, 41 aa, Artificial Sequence
  Synthetic
TDLANSVKGRFTISGVNAKNTVYLQMNSLKPEDTAVYYCAA

SEQ ID NO: 7352 - protein, 41 aa, Artificial Sequence
  Synthetic
RIYADSVKGRFTISRDNAGNFIYLQMNSLKPEDTAVYYCAV

SEQ ID NO: 7353 - protein, 41 aa, Artificial Sequence
  Synthetic
QSYADSVKGRFTISRDNAKNTLYLQMNSLEPEDTAVYYCAA

SEQ ID NO: 7354 - protein, 41 aa, Artificial Sequence; identical to SEQ ID NO: 7068
  Synthetic

SEQ ID NO: 7355 - protein, 41 aa, Artificial Sequence
  Synthetic
THSIDSVKGRFTISRDNMKNTVYLQMNSLNVEDTAVYYCNA

SEQ ID NO: 7356 - protein, 41 aa, Artificial Sequence
  Synthetic
THYADSVKGRFVISRDNDKNMAYLQMNSLKSEDTAIYYCGA

SEQ ID NO: 7357 - protein, 21 aa, Artificial Sequence
  Synthetic
DSGTQLGYVGAVGLSCLDYVM

SEQ ID NO: 7358 - protein, 17 aa, Artificial Sequence
  Synthetic
KTGAFSYGSLWWMSRAY

SEQ ID NO: 7359 - protein, 14 aa, Artificial Sequence
  Synthetic
KFSPGYCGGSWSNF

SEQ ID NO: 7360 - protein, 17 aa, Artificial Sequence
  Synthetic
DIPLRCRDIVAKGGDGF

SEQ ID NO: 7361 - protein, 17 aa, Artificial Sequence
  Synthetic
GQGCLTTIQALGGAYGY

SEQ ID NO: 7362 - protein, 9 aa, Artificial Sequence
  Synthetic
TSISCSSGY

SEQ ID NO: 7363 - protein, 15 aa, Artificial Sequence
  Synthetic
GRWRFGDICHEGSGY

SEQ ID NO: 7364 - protein, 13 aa, Artificial Sequence
  Synthetic
TWRWSCPLDPEGY

SEQ ID NO: 7365 - protein, 11 aa, Artificial Sequence
  Synthetic
SNTCPGASADF

SEQ ID NO: 7366 - protein, 4 aa, Artificial Sequence
  Synthetic
NVGF

SEQ ID NO: 7367 - protein, 14 aa, Artificial Sequence
  Synthetic
VRGYFMRLPSSHNF

SEQ ID NO: 7368 - protein, 17 aa, Artificial Sequence
  Synthetic
DRRQRWGPYYYLSALEY

SEQ ID NO: 7369 - protein, 11 aa, Artificial Sequence
  Synthetic
GFGLSLSRYTY

SEQ ID NO: 7370 - protein, 11 aa, Artificial Sequence
  Synthetic
GFGLSLSRYTY

SEQ ID NO: 7371 - protein, 16 aa, Artificial Sequence
  Synthetic
DHPGLCTSESGRRRYL

SEQ ID NO: 7372 - protein, 5 aa, Artificial Sequence
  Synthetic
CYNLE

SEQ ID NO: 7373 - protein, 10 aa, Artificial Sequence
  Synthetic
GGHHLRDHTY

SEQ ID NO: 7374 - protein, 15 aa, Artificial Sequence
  Synthetic
GWSSLGSCGTNRNRY

SEQ ID NO: 7375 - protein, 17 aa, Artificial Sequence
  Synthetic
DTSTWYRGYCGTNPNYF

SEQ ID NO: 7376 - protein, 22 aa, Artificial Sequence
  Synthetic
DSTIYASYYECGHGLSTGGYGY

SEQ ID NO: 7377 - protein, 15 aa, Artificial Sequence
  Synthetic
SSRWMDYSALTAKAY

SEQ ID NO: 7378 - protein, 17 aa, Artificial Sequence
  Synthetic
GPGSGKLVVAGRTCYGP

SEQ ID NO: 7379 - protein, 12 aa, Artificial Sequence
  Synthetic
GNSVRLASWEGY

SEQ ID NO: 7380 - protein, 11 aa, Artificial Sequence
  Synthetic
SLRYGLPGCPI

SEQ ID NO: 7381 - protein, 22 aa, Artificial Sequence
  Synthetic
DSTIYASYYECGHGLSTGGYGY

SEQ ID NO: 7382 - protein, 13 aa, Artificial Sequence
  Synthetic
TEVAGWPLDIGIY

SEQ ID NO: 7383 - protein, 17 aa, Artificial Sequence
  Synthetic
STVASTGWCSRLRPYDY

SEQ ID NO: 7384 - protein, 10 aa, Artificial Sequence
  Synthetic
GGYELRDRTY

SEQ ID NO: 7385 - protein, 17 aa, Artificial Sequence
  Synthetic
DFAHSFLLSVHSGAGQY

SEQ ID NO: 7386 - protein, 17 aa, Artificial Sequence
  Synthetic
STRVWGGYCGGLDDATN

SEQ ID NO: 7387 - protein, 15 aa, Artificial Sequence
  Synthetic
DVNRGGFCYIEDWYF

SEQ ID NO: 7388 - protein, 16 aa, Artificial Sequence
  Synthetic
TRKYVPVRFALDQSSY

SEQ ID NO: 7389 - protein, 16 aa, Artificial Sequence
  Synthetic
TRKAVPVRFALDQSSY

SEQ ID NO: 7390 - protein, 12 aa, Artificial Sequence
  Synthetic
HRFCNTWSLGTL

SEQ ID NO: 7391 - protein, 20 aa, Artificial Sequence
  Synthetic
ADAIGLAEYWSTPTLSAARY

SEQ ID NO: 7392 - protein, 14 aa, Artificial Sequence
  Synthetic
RPSIRCASFSATEY

SEQ ID NO: 7393 - protein, 15 aa, Artificial Sequence
  Synthetic
ATTTVASPPVRHVCN

SEQ ID NO: 7394 - protein, 13 aa, Artificial Sequence
  Synthetic
RRDYSLSSSSDDF

SEQ ID NO: 7395 - protein, 16 aa, Artificial Sequence
  Synthetic
AACHFCDSLPKTQDEY

SEQ ID NO: 7396 - protein, 13 aa, Artificial Sequence
  Synthetic
GLGIYIIRARGGY

SEQ ID NO: 7397 - protein, 8 aa, Artificial Sequence
  Synthetic
QCGVRSIR

SEQ ID NO: 7398 - protein, 12 aa, Artificial Sequence
  Synthetic
HRFANTWSLGTL

SEQ ID NO: 7399 - protein, 10 aa, Artificial Sequence
  Synthetic
GGDALVATRY

SEQ ID NO: 7400 - protein, 14 aa, Artificial Sequence
  Synthetic
ARQGWYIPLNSYGY

SEQ ID NO: 7401 - protein, 10 aa, Artificial Sequence
  Synthetic
GYRNYGQCAT

SEQ ID NO: 7402 - protein, 11 aa, Artificial Sequence
  Synthetic
GTYYGTLSYKY

SEQ ID NO: 7403 - protein, 12 aa, Artificial Sequence
  Synthetic
DCTVDPSLLYVM

SEQ ID NO: 7404 - protein, 10 aa, Artificial Sequence
  Synthetic
KDFGAIIYDY

SEQ ID NO: 7405 - protein, 13 aa, Artificial Sequence
  Synthetic
AAGSAWYGTLYEY

SEQ ID NO: 7406 - protein, 19 aa, Artificial Sequence
  Synthetic
TYLSSDYSRYALPQRPLDY

SEQ ID NO: 7407 - protein, 16 aa, Artificial Sequence
  Synthetic
GYQINSGNYNFKDYEY

SEQ ID NO: 7408 - protein, 7 aa, Artificial Sequence
  Synthetic
RLTLGQF

SEQ ID NO: 7409 - protein, 12 aa, Artificial Sequence
  Synthetic
APYGANWYRDEY

SEQ ID NO: 7410 - protein, 13 aa, Artificial Sequence
  Synthetic
NSQRTRLQDPNEY

SEQ ID NO: 7411 - protein, 16 aa, Artificial Sequence
  Synthetic
TTYASLSDTYIGEHIY

SEQ ID NO: 7412 - protein, 7 aa, Artificial Sequence
  Synthetic
WTLFHSD

SEQ ID NO: 7413 - protein, 16 aa, Artificial Sequence
  Synthetic
KWRPLRYSDYPSNSDY

SEQ ID NO: 7414 - protein, 16 aa, Artificial Sequence
  Synthetic
SRISYRVWNTIPYNKL

SEQ ID NO: 7415 - protein, 16 aa, Artificial Sequence
  Synthetic
SRISYAVWNTIPYNKL

SEQ ID NO: 7416 - protein, 13 aa, Artificial Sequence
  Synthetic
DGRRFDGARWREY

SEQ ID NO: 7417 - protein, 12 aa, Artificial Sequence
  Synthetic
TLDWGKTLSDEY

SEQ ID NO: 7418 - protein, 6 aa, Artificial Sequence
  Synthetic
RVGSEY

SEQ ID NO: 7419 - protein, 9 aa, Artificial Sequence
  Synthetic
DARTITGRA

SEQ ID NO: 7420 - protein, 10 aa, Artificial Sequence
  Synthetic
GGYQLRDRTY

SEQ ID NO: 7421 - protein, 10 aa, Artificial Sequence
  Synthetic
GGYQLRDRTY

SEQ ID NO: 7422 - protein, 10 aa, Artificial Sequence
  Synthetic
GGYELRDRTY

SEQ ID NO: 7423 - protein, 15 aa, Artificial Sequence
  Synthetic
DLKMQVAAYMNQRSV

SEQ ID NO: 7424 - protein, 10 aa, Artificial Sequence
  Synthetic
NVKTWAGMTR

SEQ ID NO: 7425 - protein, 11 aa, Artificial Sequence
  Synthetic
GAGWAGTMTDY

SEQ ID NO: 7426 - protein, 16 aa, Artificial Sequence
  Synthetic
DLHRPYGPGTQRSDEY

SEQ ID NO: 7427 - protein, 16 aa, Artificial Sequence
  Synthetic
SSRVFYTEVLQTTTGY

SEQ ID NO: 7428 - protein, 12 aa, Artificial Sequence
  Synthetic
RSGGFSSNRELY

SEQ ID NO: 7429 - protein, 16 aa, Artificial Sequence
  Synthetic
KWRPLRYSDNPSNSDY

SEQ ID NO: 7430 - protein, 16 aa, Artificial Sequence
  Synthetic
DRFSPVVPGPIPVNTV

SEQ ID NO: 7431 - protein, 13 aa, Artificial Sequence
  Synthetic
TTDCAAFVERATA

SEQ ID NO: 7432 - protein, 15 aa, Artificial Sequence
  Synthetic
DEDVTPRVMGVIPHA

SEQ ID NO: 7433 - protein, 11 aa, Artificial Sequence
  Synthetic
NLQTGTLSGAR

SEQ ID NO: 7434 - protein, 16 aa, Artificial Sequence
  Synthetic
DRFPTMEVVTIMTNEY

SEQ ID NO: 7435 - protein, 13 aa, Artificial Sequence
  Synthetic
RDGIPTSRSVESY

SEQ ID NO: 7436 - protein, 12 aa, Artificial Sequence
  Synthetic
SILPLSDDPGWN

SEQ ID NO: 7437 - protein, 11 aa, Artificial Sequence
  Synthetic
AIRTTVRTSAQ

SEQ ID NO: 7438 - protein, 13 aa, Artificial Sequence
  Synthetic
RAPVGQSSSPYDY

SEQ ID NO: 7439 - protein, 9 aa, Artificial Sequence
  Synthetic
KVAGTFSIY

SEQ ID NO: 7440 - protein, 17 aa, Artificial Sequence
  Synthetic
RYQPRYYDSGDMDGYEY

SEQ ID NO: 7441 - protein, 4 aa, Artificial Sequence
  Synthetic
LPNY

SEQ ID NO: 7442 - protein, 13 aa, Artificial Sequence
  Synthetic
YSDRLTDCSNCEA

SEQ ID NO: 7443 - protein, 10 aa, Artificial Sequence
  Synthetic
PMIYYGGRYS

SEQ ID NO: 7444 - protein, 14 aa, Artificial Sequence
  Synthetic
TPYYRGSYYAASTY

SEQ ID NO: 7445 - protein, 9 aa, Artificial Sequence
  Synthetic
FFRRDYVGY

SEQ ID NO: 7446 - protein, 9 aa, Artificial Sequence
  Synthetic
RIWRGTVYD

SEQ ID NO: 7447 - protein, 8 aa, Artificial Sequence
  Synthetic
LGATTMSN

SEQ ID NO: 7448 - skipped

SEQ ID NO: 7449 - protein, 13 aa, Artificial Sequence
  Synthetic
RVVPVFSDSTKGY

SEQ ID NO: 7450 - protein, 14 aa, Artificial Sequence
  Synthetic
VRTGWGLNAPDYAM

SEQ ID NO: 7451 - protein, 15 aa, Artificial Sequence
  Synthetic
DPECYRVRGYYNGEY

SEQ ID NO: 7452 - protein, 12 aa, Artificial Sequence
  Synthetic
TSLFPTSRGSHY

SEQ ID NO: 7453 - protein, 12 aa, Artificial Sequence
  Synthetic
GDNYYYTRTYEY

SEQ ID NO: 7454 - protein, 20 aa, Artificial Sequence
  Synthetic
GRFVTFGSAWSFVGGGPYGI

SEQ ID NO: 7455 - protein, 18 aa, Artificial Sequence
  Synthetic
PGRPHGSSWSLNKKGQGY

SEQ ID NO: 7456 - protein, 13 aa, Artificial Sequence
  Synthetic
DDNYVTASWRSGP

SEQ ID NO: 7457 - protein, 17 aa, Artificial Sequence
  Synthetic
DGSQYRSTYSFRDKPDY

SEQ ID NO: 7458 - protein, 7 aa, Artificial Sequence
  Synthetic
NRGLAGP

SEQ ID NO: 7459 - protein, 11 aa, Artificial Sequence
  Synthetic
GDTAITSWYGY

SEQ ID NO: 7460 - protein, 5 aa, Artificial Sequence
  Synthetic
ETRGF

SEQ ID NO: 7461 - protein, 12 aa, Artificial Sequence
  Synthetic
ESRTSWSSPSPL

SEQ ID NO: 7462 - protein, 12 aa, Artificial Sequence
  Synthetic
HPQRGWGSTLGW

SEQ ID NO: 7463 - protein, 14 aa, Artificial Sequence
  Synthetic
SSNSVCPPGHVAWY

SEQ ID NO: 7464 - protein, 13 aa, Artificial Sequence
  Synthetic
SDKYNFDTSHAGY

SEQ ID NO: 7465 - protein, 15 aa, Artificial Sequence
  Synthetic
IANPVYATSRNSDDY

SEQ ID NO: 7466 - protein, 10 aa, Artificial Sequence
  Synthetic
KDYGAVLYEY

SEQ ID NO: 7467 - protein, 12 aa, Artificial Sequence
  Synthetic
SQQRLSRSDVQY

SEQ ID NO: 7468 - protein, 14 aa, Artificial Sequence
  Synthetic
RPVRVADISLPVGF

SEQ ID NO: 7469 - protein, 4 aa, Artificial Sequence
  Synthetic
HYFR

SEQ ID NO: 7470 - protein, 14 aa, Artificial Sequence
  Synthetic
RMPYSGDYRSSGTY

SEQ ID NO: 7471 - protein, 6 aa, Artificial Sequence
  Synthetic
GEGGTW

SEQ ID NO: 7472 - protein, 13 aa, Artificial Sequence
  Synthetic
KTTTWGGNDPNNW

SEQ ID NO: 7473 - protein, 7 aa, Artificial Sequence
  Synthetic
RVYFGDR

SEQ ID NO: 7474 - protein, 9 aa, Artificial Sequence
  Synthetic
DFSTGWAPY

SEQ ID NO: 7475 - protein, 12 aa, Artificial Sequence
  Synthetic
ERYNVEGCGYDV

SEQ ID NO: 7476 - protein, 13 aa, Artificial Sequence
  Synthetic
GRAILVHTTKKEY

SEQ ID NO: 7477 - protein, 12 aa, Artificial Sequence
  Synthetic
GTGWSPQTDNEY

SEQ ID NO: 7478 - protein, 10 aa, Artificial Sequence
  Synthetic
VLVRFGGLRR

SEQ ID NO: 7479 - protein, 168 aa, Artificial Sequence
  Synthetic
NVGFLPADLAWFKRNTLNKPVIMGRHTWESIGRPLPGRKNIILSSQPGTDDRVTWVKSVDEAIAACGDVPEIMVIGGGRVYEQFLPKAQKLYLTHIDAEVEGDTHFPDYEPDDWESVFSEFHDADAQNSHSYCFEILERRGGGGGMISLIAALAVDRVIGMENAMPWN

SEQ ID NO: 7480 - protein, 13 aa, Artificial Sequence
  Synthetic
KVAGGSYYQKDKY

SEQ ID NO: 7481 - protein, 16 aa, Artificial Sequence
  Synthetic
TENVRSLLSDYATWPY

SEQ ID NO: 7482 - protein, 16 aa, Artificial Sequence
  Synthetic
THYVSYLLSDYATWPY

SEQ ID NO: 7483 - protein, 11 aa, Artificial Sequence
  Synthetic
DPQWSRVRSGA

SEQ ID NO: 7484 - protein, 12 aa, Artificial Sequence
  Synthetic
KTGTWATMDRRY

SEQ ID NO: 7485 - protein, 12 aa, Artificial Sequence
  Synthetic
KTGTWATLDRRY

SEQ ID NO: 7486 - protein, 4 aa, Artificial Sequence
  Synthetic
GRSR

SEQ ID NO: 7487 - protein, 14 aa, Artificial Sequence
  Synthetic
KGRYSGGLYYPTNY

SEQ ID NO: 7488 - protein, 16 aa, Artificial Sequence
  Synthetic
DLQYGSSWPQRSSAEY

SEQ ID NO: 7489 - protein, 13 aa, Artificial Sequence
  Synthetic
CAYGTCYYGDRAY

SEQ ID NO: 7490 - protein, 8 aa, Artificial Sequence
  Synthetic
ITYTRGIY

SEQ ID NO: 7491 - protein, 14 aa, Artificial Sequence
  Synthetic
RGRRYFDFTYSDVY

SEQ ID NO: 7492 - protein, 15 aa, Artificial Sequence
  Synthetic
QGQWRAAPVAVAAEY

SEQ ID NO: 7493 - protein, 18 aa, Artificial Sequence
  Synthetic
TTAGGGLCWDGTTFSRLA

SEQ ID NO: 7494 - protein, 13 aa, Artificial Sequence
  Synthetic
RDDGRMYQGFYDF

SEQ ID NO: 7495 - protein, 7 aa, Artificial Sequence
  Synthetic
QRTVMSQ

SEQ ID NO: 7496 - protein, 4 aa, Artificial Sequence
  Synthetic
NVGF

SEQ ID NO: 7497 - protein, 7 aa, Artificial Sequence
  Synthetic
GWGATPR

SEQ ID NO: 7498 - protein, 4 aa, Artificial Sequence
  Synthetic
ALDT

SEQ ID NO: 7499 - protein, 14 aa, Artificial Sequence
  Synthetic
QGTNGGGYSEATSY

SEQ ID NO: 7500 - protein, 13 aa, Artificial Sequence
  Synthetic
RRINEVLTTAPDY

SEQ ID NO: 7501 - protein, 13 aa, Artificial Sequence
  Synthetic
KNGGAASNYPNDY

SEQ ID NO: 7502 - protein, 14 aa, Artificial Sequence
  Synthetic
SITGYGLVDSASHY

SEQ ID NO: 7503 - protein, 4 aa, Artificial Sequence
  Synthetic
FVRS

SEQ ID NO: 7504 - protein, 12 aa, Artificial Sequence
  Synthetic
QDLLYYSFPGDH

SEQ ID NO: 7505 - protein, 16 aa, Artificial Sequence
  Synthetic
FRVAVTTYTSQQANEY

SEQ ID NO: 7506 - protein, 11 aa, Artificial Sequence
  Synthetic
TVVVSRYGLTY

SEQ ID NO: 7507 - protein, 13 aa, Artificial Sequence
  Synthetic
EITEQSRPFYLTD

SEQ ID NO: 7508 - protein, 8 aa, Artificial Sequence
  Synthetic
AVQVRDYR

SEQ ID NO: 7509 - protein, 7 aa, Artificial Sequence
  Synthetic
NWGRTSV

SEQ ID NO: 7510 - protein, 10 aa, Artificial Sequence
  Synthetic
DVRTRWYASN

SEQ ID NO: 7511 - protein, 12 aa, Artificial Sequence
  Synthetic
SSTYYYTDPEKY

SEQ ID NO: 7512 - protein, 16 aa, Artificial Sequence
  Synthetic
DLHRPYGPGSQRTDDY

SEQ ID NO: 7513 - protein, 14 aa, Artificial Sequence
  Synthetic
KQYGSRADYPWDDY

SEQ ID NO: 7514 - protein, 10 aa, Artificial Sequence
  Synthetic
DRFLTRSVKY

SEQ ID NO: 7515 - protein, 13 aa, Artificial Sequence
  Synthetic
RIGGSDRLAPENY

SEQ ID NO: 7516 - protein, 13 aa, Artificial Sequence
  Synthetic
GAGFWGLRTASSY

SEQ ID NO: 7517 - protein, 7 aa, Artificial Sequence
  Synthetic
KWLAADY

SEQ ID NO: 7518 - protein, 13 aa, Artificial Sequence
  Synthetic
GWPVKVISSADEY

SEQ ID NO: 7519 - protein, 12 aa, Artificial Sequence
  Synthetic
AMYGSRWPDWEY

SEQ ID NO: 7520 - protein, 15 aa, Artificial Sequence
  Synthetic
TPYGSRYYLRELREY

SEQ ID NO: 7521 - protein, 8 aa, Artificial Sequence
  Synthetic
LGATTMIN

SEQ ID NO: 7522 - protein, 10 aa, Artificial Sequence
  Synthetic
KEKGWSFSLY

SEQ ID NO: 7523 - protein, 18 aa, Artificial Sequence
  Synthetic
GRDADPTIFAILRSEYPF

SEQ ID NO: 7524 - protein, 10 aa, Artificial Sequence
  Synthetic
NVRTAVAGRN

SEQ ID NO: 7525 - protein, 4 aa, Artificial Sequence
  Synthetic
YAEA

SEQ ID NO: 7526 - protein, 13 aa, Artificial Sequence
  Synthetic
TSRASVTTRVADF

SEQ ID NO: 7527 - protein, 4 aa, Artificial Sequence
  Synthetic
YPVN

SEQ ID NO: 7528 - protein, 11 aa, Artificial Sequence
  Synthetic
FLRHTASASYN

SEQ ID NO: 7529 - protein, 14 aa, Artificial Sequence
  Synthetic
RAYGFDTDSRESAY

SEQ ID NO: 7530 - protein, 11 aa, Artificial Sequence
  Synthetic
EYRTGIWEELL

SEQ ID NO: 7531 - protein, 14 aa, Artificial Sequence
  Synthetic
AGLGTVVSEWDYDY

SEQ ID NO: 7532 - protein, 10 aa, Artificial Sequence
  Synthetic
EVGGWGPPRP

SEQ ID NO: 7533 - protein, 11 aa, Artificial Sequence
  Synthetic
TFGSRWPYAHS

SEQ ID NO: 7534 - protein, 6 aa, Artificial Sequence
  Synthetic
GCYSWR

SEQ ID NO: 7535 - protein, 18 aa, Artificial Sequence
  Synthetic
STVFAEITGLAGYQSGSY

SEQ ID NO: 7536 - protein, 22 aa, Artificial Sequence
  Synthetic
EWVPPGYGATVQALCNNAGYGM

SEQ ID NO: 7537 - protein, 18 aa, Artificial Sequence
  Synthetic
AARPSYSGDYGYTEALRY

SEQ ID NO: 7538 - protein, 10 aa, Artificial Sequence
  Synthetic
WGQDGWLGQY

SEQ ID NO: 7539 - protein, 12 aa, Artificial Sequence
  Synthetic
DPRPWGYDVTDY

SEQ ID NO: 7540 - protein, 12 aa, Artificial Sequence
  Synthetic
TREFCSAYVFLY

SEQ ID NO: 7541 - protein, 13 aa, Artificial Sequence
  Synthetic
RNPRATAEDVSAY

SEQ ID NO: 7542 - protein, 13 aa, Artificial Sequence
  Synthetic
RRDYGDSWFTAGG

SEQ ID NO: 7543 - protein, 12 aa, Artificial Sequence
  Synthetic
RRNPINGPYYTT

SEQ ID NO: 7544 - protein, 15 aa, Artificial Sequence
  Synthetic
DLEYSQIMPSCRGSY

SEQ ID NO: 7545 - protein, 13 aa, Artificial Sequence
  Synthetic
RLGGWASFSPQEY

SEQ ID NO: 7546 - protein, 11 aa, Artificial Sequence
  Synthetic
ARGCKRGRYEY

SEQ ID NO: 7547 - protein, 16 aa, Artificial Sequence
  Synthetic
DKGLCSWLRAGGKVTF

SEQ ID NO: 7548 - protein, 16 aa, Artificial Sequence
  Synthetic
TFTPDGSWYYTRGSSY

SEQ ID NO: 7549 - protein, 8 aa, Artificial Sequence
  Synthetic
EETIVEEA

SEQ ID NO: 7550 - protein, 18 aa, Artificial Sequence
  Synthetic
DRGYSEYDLPCDLVIYGM

SEQ ID NO: 7551 - protein, 5 aa, Artificial Sequence
  Synthetic
SLPGL

SEQ ID NO: 7552 - protein, 13 aa, Artificial Sequence
  Synthetic
VTAVLLPGRCVPG

SEQ ID NO: 7553 - protein, 18 aa, Artificial Sequence
  Synthetic
DPFGERLCIDPNTFAGYL

SEQ ID NO: 7554 - protein, 13 aa, Artificial Sequence
  Synthetic
FDSTGSPIVRDNY

SEQ ID NO: 7555 - protein, 14 aa, Artificial Sequence
  Synthetic
TKAYNGGETSGRGF

SEQ ID NO: 7556 - protein, 11 aa, Artificial Sequence
  Synthetic
GKWDGSYYGAP

SEQ ID NO: 7557 - protein, 17 aa, Artificial Sequence
  Synthetic
DRYTSVRQMCTMIEGLH

SEQ ID NO: 7558 - protein, 14 aa, Artificial Sequence
  Synthetic
KSVWFCSVIRSHEF

SEQ ID NO: 7559 - protein, 16 aa, Artificial Sequence
  Synthetic
STTYCSATTYSSDRLY

SEQ ID NO: 7560 - protein, 16 aa, Artificial Sequence
  Synthetic
RYYSGTYSSTYDRDDY

SEQ ID NO: 7561 - protein, 12 aa, Artificial Sequence
  Synthetic
TKYGSSCPIRPY

SEQ ID NO: 7562 - protein, 11 aa, Artificial Sequence
  Synthetic
YIQLDSTIWFR

SEQ ID NO: 7563 - protein, 5 aa, Artificial Sequence
  Synthetic
VRLPQ

SEQ ID NO: 7564 - protein, 10 aa, Artificial Sequence
  Synthetic
VWARVCRNPY

SEQ ID NO: 7565 - protein, 9 aa, Artificial Sequence
  Synthetic
LEDRVDSFH

SEQ ID NO: 7566 - protein, 18 aa, Artificial Sequence
  Synthetic
SSIYSDISGAATVWATSY

SEQ ID NO: 7567 - protein, 12 aa, Artificial Sequence
  Synthetic
DYGSSWCTFNGM

SEQ ID NO: 7568 - protein, 11 aa, Artificial Sequence
  Synthetic
TYSTIAPRTSY

SEQ ID NO: 7569 - protein, 17 aa, Artificial Sequence
  Synthetic
RSRFSAMHLAYRRLVDY

SEQ ID NO: 7570 - protein, 7 aa, Artificial Sequence
  Synthetic
KGQGGTW

SEQ ID NO: 7571 - protein, 6 aa, Artificial Sequence
  Synthetic
RGSVYY

SEQ ID NO: 7572 - protein, 9 aa, Artificial Sequence
  Synthetic
TIVVFTTPM

SEQ ID NO: 7573 - protein, 14 aa, Artificial Sequence
  Synthetic
APLAGRYCPASHEY

SEQ ID NO: 7574 - protein, 4 aa, Artificial Sequence
  Synthetic
YGSG

SEQ ID NO: 7575 - protein, 14 aa, Artificial Sequence
  Synthetic
DWKMGAWTAGDYGI

SEQ ID NO: 7576 - protein, 16 aa, Artificial Sequence
  Synthetic
GRIGRSVFNLRRESWV

SEQ ID NO: 7577 - protein, 9 aa, Artificial Sequence
  Synthetic
EDRHRIGTV

SEQ ID NO: 7578 - protein, 11 aa, Artificial Sequence
  Synthetic
RPQGDYVTAHY

SEQ ID NO: 7579 - protein, 13 aa, Artificial Sequence
  Synthetic
DLYGLGSHMENEY

SEQ ID NO: 7580 - protein, 8 aa, Artificial Sequence
  Synthetic
ASLVRGPL

SEQ ID NO: 7581 - protein, 16 aa, Artificial Sequence
  Synthetic
REGDVGLVSYKRSSNY

SEQ ID NO: 7582 - protein, 9 aa, Artificial Sequence
  Synthetic
DEAGIGGFN

SEQ ID NO: 7583 - protein, 18 aa, Artificial Sequence
  Synthetic
SSVYAEMPYADSVKATSY

SEQ ID NO: 7584 - protein, 10 aa, Artificial Sequence
  Synthetic
FMSTNSGRTG

SEQ ID NO: 7585 - protein, 12 aa, Artificial Sequence
  Synthetic
GLGWDSRYSQSY

SEQ ID NO: 7586 - protein, 12 aa, Artificial Sequence
  Synthetic
NIEAGTYYGPGR

SEQ ID NO: 7587 - protein, 18 aa, Artificial Sequence
  Synthetic
VNAQGIYCTDYIIGPYGM

SEQ ID NO: 7588 - protein, 13 aa, Artificial Sequence
  Synthetic
DKYYTGPGGESVY

SEQ ID NO: 7589 - protein, 8 aa, Artificial Sequence
  Synthetic
RNWGGGLD

SEQ ID NO: 7590 - protein, 8 aa, Artificial Sequence
  Synthetic
DPYGMESL

SEQ ID NO: 7591 - protein, 15 aa, Artificial Sequence
  Synthetic
GPFVYGRGCLGQAFY

SEQ ID NO: 7592 - protein, 18 aa, Artificial Sequence
  Synthetic
VREATYSDNRCSVRSYTY

SEQ ID NO: 7593 - protein, 11 aa, Artificial Sequence
  Synthetic
SHWGTLLIKGI

SEQ ID NO: 7594 - protein, 11 aa, Artificial Sequence
  Synthetic
TDWGTLLIKGI

SEQ ID NO: 7595 - protein, 10 aa, Artificial Sequence
  Synthetic
QKSLNVPAPW

SEQ ID NO: 7596 - protein, 10 aa, Artificial Sequence
  Synthetic
EDYSAYAPPS

SEQ ID NO: 7597 - protein, 7 aa, Artificial Sequence
  Synthetic
RVGITML

SEQ ID NO: 7598 - protein, 14 aa, Artificial Sequence
  Synthetic
RRWLGGSYFDPGNY

SEQ ID NO: 7599 - protein, 15 aa, Artificial Sequence
  Synthetic
NKFVRGLVAVRAIDY

SEQ ID NO: 7600 - protein, 15 aa, Artificial Sequence
  Synthetic
SNRGSLYTLDNQNRY

SEQ ID NO: 7601 - protein, 13 aa, Artificial Sequence
  Synthetic
GRGIVAGRIPAEY

SEQ ID NO: 7602 - protein, 7 aa, Artificial Sequence
  Synthetic
ASPAVGA

SEQ ID NO: 7603 - protein, 19 aa, Artificial Sequence
  Synthetic
GFAGYGSFTSRSARDSDKY

SEQ ID NO: 7604 - protein, 10 aa, Artificial Sequence
  Synthetic
DFACPLIREY

SEQ ID NO: 7605 - protein, 6 aa, Artificial Sequence
  Synthetic
RLSLIS

SEQ ID NO: 7606 - protein, 10 aa, Artificial Sequence
  Synthetic
DLASSRDVSS

SEQ ID NO: 7607 - protein, 12 aa, Artificial Sequence
  Synthetic
GAVTYYSARYEY

SEQ ID NO: 7608 - protein, 10 aa, Artificial Sequence
  Synthetic
DSRPIYSGTW

SEQ ID NO: 7609 - protein, 14 aa, Artificial Sequence
  Synthetic
TCYEESRRPLGSRN

SEQ ID NO: 7610 - protein, 24 aa, Artificial Sequence
  Synthetic
DLSSLTTVQAMCVIPRPGFSAKAY

SEQ ID NO: 7611 - protein, 5 aa, Artificial Sequence
  Synthetic
RRASA

SEQ ID NO: 7612 - protein, 10 aa, Artificial Sequence
  Synthetic
IRYSPIHAPL

SEQ ID NO: 7613 - protein, 22 aa, Artificial Sequence
  Synthetic
DTTDRYDSANGRYYCTISSDTY

SEQ ID NO: 7614 - protein, 5 aa, Artificial Sequence
  Synthetic
LPRFS

SEQ ID NO: 7615 - protein, 13 aa, Artificial Sequence
  Synthetic
NPNPSGSSVYRRN

SEQ ID NO: 7616 - protein, 12 aa, Artificial Sequence
  Synthetic
SLGYSGAYASGY

SEQ ID NO: 7617 - protein, 14 aa, Artificial Sequence
  Synthetic
IRSSSWGGCVHYGM

SEQ ID NO: 7618 - protein, 14 aa, Artificial Sequence
  Synthetic
VAVAHFRGCGVDGM

SEQ ID NO: 7619 - protein, 13 aa, Artificial Sequence
  Synthetic
RLGGWASFSPQEY

SEQ ID NO: 7620 - protein, 13 aa, Artificial Sequence
  Synthetic
RASMAVSTSPRVY

SEQ ID NO: 7621 - protein, 13 aa, Artificial Sequence
  Synthetic
RASMQVLTSPRVY

SEQ ID NO: 7622 - protein, 18 aa, Artificial Sequence
  Synthetic
ALRRPGSDASDYTRIPDY

SEQ ID NO: 7623 - protein, 8 aa, Artificial Sequence
  Synthetic
GIFDGNYR

SEQ ID NO: 7624 - protein, 5 aa, Artificial Sequence
  Synthetic
NLRTN

SEQ ID NO: 7625 - protein, 14 aa, Artificial Sequence
  Synthetic
SLYRDPLGVAGGMG

SEQ ID NO: 7626 - protein, 7 aa, Artificial Sequence
  Synthetic
LSSGVNP

SEQ ID NO: 7627 - protein, 7 aa, Artificial Sequence
  Synthetic
DDLMIDR

SEQ ID NO: 7628 - protein, 7 aa, Artificial Sequence
  Synthetic
PKGHTGD

SEQ ID NO: 7629 - protein, 16 aa, Artificial Sequence
  Synthetic
RQYYSGRVYSTFREEY

SEQ ID NO: 7630 - protein, 6 aa, Artificial Sequence
  Synthetic
RRLATY

SEQ ID NO: 7631 - protein, 15 aa, Artificial Sequence
  Synthetic
RSRFIVGVPQARDLY

SEQ ID NO: 7632 - protein, 9 aa, Artificial Sequence
  Synthetic
DLGTGGRSY

SEQ ID NO: 7633 - protein, 15 aa, Artificial Sequence
  Synthetic
ARYRGIGSQVRWTDF

SEQ ID NO: 7634 - protein, 11 aa, Artificial Sequence
  Synthetic
GVWRSSGWDTP

SEQ ID NO: 7635 - protein, 13 aa, Artificial Sequence
  Synthetic
GVGASVSVSESWY

SEQ ID NO: 7636 - protein, 9 aa, Artificial Sequence
  Synthetic
RKWERSVLE

SEQ ID NO: 7637 - protein, 10 aa, Artificial Sequence
  Synthetic
LAGSHYYDEY

SEQ ID NO: 7638 - protein, 10 aa, Artificial Sequence
  Synthetic
VGGTYYYDEY

SEQ ID NO: 7639 - protein, 10 aa, Artificial Sequence
  Synthetic
VGGSYYYDEY

SEQ ID NO: 7640 - protein, 10 aa, Artificial Sequence
  Synthetic
GPTLTTGDAG

SEQ ID NO: 7641 - protein, 14 aa, Artificial Sequence
  Synthetic
GLRGGTYARTIYEY

SEQ ID NO: 7642 - protein, 14 aa, Artificial Sequence
  Synthetic
RRRFDGTSYYTGDY

SEQ ID NO: 7643 - protein, 8 aa, Artificial Sequence
  Synthetic
AAWRVGTY

SEQ ID NO: 7644 - protein, 168 aa, Artificial Sequence
  Synthetic
NVGLPADLAWFKRNTLNKPVIMGRHTWESIGRPLPGRKNIILSSQPGTDDRVTWVKSVDEAIAACGDVPEIMVIGGGRVYEQFLPKAQKLYLTHIDAEVEGDTHFPDYEPDDWESVFSEFHDADAQNSHSYCFEILERRGGGGGMISLIAALAVDRVIGMENAMPWNF

SEQ ID NO: 7645 - protein, 7 aa, Artificial Sequence
  Synthetic
YSSAYDR

SEQ ID NO: 7646 - protein, 15 aa, Artificial Sequence
  Synthetic
DENPPGWPSRWSSAY

SEQ ID NO: 7647 - protein, 13 aa, Artificial Sequence
  Synthetic
DYWGKGTQVTVSS

SEQ ID NO: 7648 - protein, 13 aa, Artificial Sequence
  Synthetic
NHWGQGTQVTVSS

SEQ ID NO: 7649 - protein, 13 aa, Artificial Sequence
  Synthetic
GYWGQGTQVTVSS

SEQ ID NO: 7650 - protein, 13 aa, Artificial Sequence
  Synthetic
RYWGQGTQVTVSS

SEQ ID NO: 7651 - protein, 13 aa, Artificial Sequence
  Synthetic
NAWGQGTQVTVSS

SEQ ID NO: 7652 - protein, 13 aa, Artificial Sequence
  Synthetic
MFWGQGTQVTVSS

SEQ ID NO: 7653 - protein, 13 aa, Artificial Sequence
  Synthetic
NYWGQGTQVTVSS

SEQ ID NO: 7654 - protein, 13 aa, Artificial Sequence
  Synthetic
QYWGQGTQVTVSS

SEQ ID NO: 7655 - protein, 13 aa, Artificial Sequence
  Synthetic
RSWGQGTQVTVSS

SEQ ID NO: 7656 - protein, 13 aa, Artificial Sequence
  Synthetic
EYWGQGTQVTVSS

SEQ ID NO: 7657 - protein, 13 aa, Artificial Sequence
  Synthetic
RYWGQGTQVTVSS

SEQ ID NO: 7658 - protein, 13 aa, Artificial Sequence
  Synthetic
VYWGQGTQVTVSS

SEQ ID NO: 7659 - protein, 13 aa, Artificial Sequence
  Synthetic
AYWGQGTQVTVSS

SEQ ID NO: 7660 - protein, 13 aa, Artificial Sequence
  Synthetic
AHWGQGTQVTVSS

SEQ ID NO: 7661 - protein, 13 aa, Artificial Sequence
  Synthetic
EVWGQGTQVTVSS

SEQ ID NO: 7662 - protein, 13 aa, Artificial Sequence
  Synthetic
TYWGQGTQVTVSS

SEQ ID NO: 7663 - protein, 13 aa, Artificial Sequence
  Synthetic
GQWGQGTQVTVSS

SEQ ID NO: 7664 - protein, 13 aa, Artificial Sequence
  Synthetic
NYWGQGTQVTVSS

SEQ ID NO: 7665 - protein, 13 aa, Artificial Sequence
  Synthetic
SYWGQGTQVTVSS

SEQ ID NO: 7666 - protein, 13 aa, Artificial Sequence
  Synthetic
DSWGQGTQVTVSS

SEQ ID NO: 7667 - protein, 13 aa, Artificial Sequence
  Synthetic
NSWGQGTQVTVSS

SEQ ID NO: 7668 - protein, 13 aa, Artificial Sequence
  Synthetic
NYWGQGTQVTVSS

SEQ ID NO: 7669 - protein, 13 aa, Artificial Sequence
  Synthetic
FYWGQGTQVTVSS

SEQ ID NO: 7670 - protein, 13 aa, Artificial Sequence
  Synthetic
IPWGQGTQVTVSS

SEQ ID NO: 7671 - protein, 13 aa, Artificial Sequence
  Synthetic
DSWGQGTQVTVSS

SEQ ID NO: 7672 - protein, 13 aa, Artificial Sequence
  Synthetic
DYWGQGTQVTVSS

SEQ ID NO: 7673 - protein, 13 aa, Artificial Sequence
  Synthetic
HYRGQGTQVTVSS

SEQ ID NO: 7674 - protein, 13 aa, Artificial Sequence
  Synthetic
GQWGQGTQVTVSS

SEQ ID NO: 7675 - protein, 13 aa, Artificial Sequence
  Synthetic
SYWGQGTQVTVSS

SEQ ID NO: 7676 - protein, 13 aa, Artificial Sequence
  Synthetic
NDWGQGTQVTVSS

SEQ ID NO: 7677 - protein, 13 aa, Artificial Sequence
  Synthetic
SYWGQGTQVTVSS

SEQ ID NO: 7678 - protein, 13 aa, Artificial Sequence
  Synthetic
DYWGQGTQVTVSS

SEQ ID NO: 7679 - protein, 13 aa, Artificial Sequence
  Synthetic
DYWGQGTQVTVSS

SEQ ID NO: 7680 - protein, 13 aa, Artificial Sequence
  Synthetic
NVWGQGTQVTVSS

SEQ ID NO: 7681 - protein, 13 aa, Artificial Sequence
  Synthetic
KYWGQGTQVTVSS

SEQ ID NO: 7682 - protein, 13 aa, Artificial Sequence
  Synthetic
KDWGQGTQVTVSS

SEQ ID NO: 7683 - protein, 13 aa, Artificial Sequence
  Synthetic
GYWGQGTQVTVSS

SEQ ID NO: 7684 - protein, 13 aa, Artificial Sequence
  Synthetic
DYWGQGTQVTVSS

SEQ ID NO: 7685 - protein, 13 aa, Artificial Sequence
  Synthetic
ILWGQGTQVTVSS

SEQ ID NO: 7686 - protein, 13 aa, Artificial Sequence
  Synthetic
DHWGQGTQVTVSS

SEQ ID NO: 7687 - protein, 13 aa, Artificial Sequence
  Synthetic
EYWGQGTQVTVSS

SEQ ID NO: 7688 - protein, 13 aa, Artificial Sequence
  Synthetic
NVWGQGTQVTVSS

SEQ ID NO: 7689 - protein, 13 aa, Artificial Sequence
  Synthetic
GRWGQGTQVTVSS

SEQ ID NO: 7690 - protein, 13 aa, Artificial Sequence
  Synthetic
NYWGQGTQVTVSS

SEQ ID NO: 7691 - protein, 13 aa, Artificial Sequence
  Synthetic
RYWGQGTQVTVSS

SEQ ID NO: 7692 - protein, 13 aa, Artificial Sequence
  Synthetic
DFWGRGTQVTVSS

SEQ ID NO: 7693 - protein, 13 aa, Artificial Sequence
  Synthetic
DYYGKGTQVTVSS

SEQ ID NO: 7694 - protein, 13 aa, Artificial Sequence
  Synthetic
DYWGQGTQVTVSS

SEQ ID NO: 7695 - protein, 13 aa, Artificial Sequence
  Synthetic
DYWGQGTQVTVSS

SEQ ID NO: 7696 - protein, 13 aa, Artificial Sequence
  Synthetic
DYWGQGTQVTVSS

SEQ ID NO: 7697 - protein, 13 aa, Artificial Sequence
  Synthetic
DYWGQGTQVTVSS

SEQ ID NO: 7698 - protein, 13 aa, Artificial Sequence
  Synthetic
DYWGQGTQVTVSS

SEQ ID NO: 7699 - protein, 13 aa, Artificial Sequence
  Synthetic
AYWGQGTQVTVSS

SEQ ID NO: 7700 - protein, 13 aa, Artificial Sequence
  Synthetic
DYWGQGTQVTVSS

SEQ ID NO: 7701 - protein, 13 aa, Artificial Sequence
  Synthetic
DDWGQGTQVTVSS

SEQ ID NO: 7702 - protein, 13 aa, Artificial Sequence
  Synthetic
EYWGQGTQVTVSS

SEQ ID NO: 7703 - protein, 13 aa, Artificial Sequence
  Synthetic
YDWGQGTQVTVSS

SEQ ID NO: 7704 - protein, 13 aa, Artificial Sequence
  Synthetic
TLWGRGTQVTVSS

SEQ ID NO: 7705 - protein, 13 aa, Artificial Sequence
  Synthetic
TLWGRGTQVTVSS

SEQ ID NO: 7706 - protein, 13 aa, Artificial Sequence
  Synthetic
ESWGQGTQVTISS

SEQ ID NO: 7707 - protein, 13 aa, Artificial Sequence
  Synthetic
DYWGQGTQVTVSS

SEQ ID NO: 7708 - protein, 13 aa, Artificial Sequence
  Synthetic
DLWGQGTQVTVSS

SEQ ID NO: 7709 - protein, 13 aa, Artificial Sequence
  Synthetic
DYWGQGTQVTVSS

SEQ ID NO: 7710 - protein, 13 aa, Artificial Sequence
  Synthetic
GHWGQGTQVTVSS

SEQ ID NO: 7711 - protein, 13 aa, Artificial Sequence
  Synthetic
GHWGQGTQVTVSS

SEQ ID NO: 7712 - protein, 13 aa, Artificial Sequence
  Synthetic
GHWGQGTQVTVSS

SEQ ID NO: 7713 - protein, 13 aa, Artificial Sequence
  Synthetic
DYWGQGTQVTVSS

SEQ ID NO: 7714 - protein, 13 aa, Artificial Sequence
  Synthetic
DYWGQGTQVTVSS

SEQ ID NO: 7715 - protein, 13 aa, Artificial Sequence
  Synthetic
NYWGQGTQVTVSS

SEQ ID NO: 7716 - protein, 13 aa, Artificial Sequence
  Synthetic
DSWGQGTQVTVSS

SEQ ID NO: 7717 - protein, 13 aa, Artificial Sequence
  Synthetic
DYWGQGTQVTVSS

SEQ ID NO: 7718 - protein, 13 aa, Artificial Sequence
  Synthetic
DGWGQGTQVTVSS

SEQ ID NO: 7719 - protein, 13 aa, Artificial Sequence
  Synthetic
NYWGQGTQVTVSS

SEQ ID NO: 7720 - protein, 13 aa, Artificial Sequence
  Synthetic
DSWGQGTQVTVSS

SEQ ID NO: 7721 - protein, 13 aa, Artificial Sequence
  Synthetic
ITAGQGTQVTVSS

SEQ ID NO: 7722 - protein, 13 aa, Artificial Sequence
  Synthetic
DHWGQGTLVTVSS

SEQ ID NO: 7723 - protein, 13 aa, Artificial Sequence
  Synthetic
LYWGQGTQVTVSS

SEQ ID NO: 7724 - protein, 13 aa, Artificial Sequence
  Synthetic
DYWGQGTQVTVSS

SEQ ID NO: 7725 - protein, 13 aa, Artificial Sequence
  Synthetic
NYWGQGTQVTVSS

SEQ ID NO: 7726 - protein, 12 aa, Artificial Sequence
  Synthetic
TYWGQGTQVTVS

SEQ ID NO: 7727 - protein, 13 aa, Artificial Sequence
  Synthetic
EYWGQGTQVTVSS

SEQ ID NO: 7728 - protein, 13 aa, Artificial Sequence
  Synthetic
DYWGQGTQVTVSS

SEQ ID NO: 7729 - protein, 13 aa, Artificial Sequence
  Synthetic
DYWGQGTQVTVSS

SEQ ID NO: 7730 - protein, 13 aa, Artificial Sequence
  Synthetic
DNWGQGTQVTVSS

SEQ ID NO: 7731 - protein, 13 aa, Artificial Sequence
  Synthetic
RSWGQGTQVTVSS

SEQ ID NO: 7732 - protein, 13 aa, Artificial Sequence
  Synthetic
DYWGQGTQVTVSH

SEQ ID NO: 7733 - protein, 13 aa, Artificial Sequence
  Synthetic
GFWGQGTQVTVSS

SEQ ID NO: 7734 - protein, 12 aa, Artificial Sequence
  Synthetic
DYWGQGTQVTVS

SEQ ID NO: 7735 - protein, 13 aa, Artificial Sequence
  Synthetic
TYWGQGTQVTVSS

SEQ ID NO: 7736 - protein, 13 aa, Artificial Sequence
  Synthetic
DYWGQGTQVTVSS

SEQ ID NO: 7737 - protein, 13 aa, Artificial Sequence
  Synthetic
NISGPGTQVTVSS

SEQ ID NO: 7738 - protein, 13 aa, Artificial Sequence
  Synthetic
AVWGQGTQVTVSS

SEQ ID NO: 7739 - protein, 13 aa, Artificial Sequence
  Synthetic
YYWGQGTQVTVSS

SEQ ID NO: 7740 - protein, 13 aa, Artificial Sequence
  Synthetic
VYWGQGTQVTVSS

SEQ ID NO: 7741 - protein, 13 aa, Artificial Sequence
  Synthetic
DYWGKGTLVTVSS

SEQ ID NO: 7742 - protein, 13 aa, Artificial Sequence
  Synthetic
DYWGQGTQVTVSS

SEQ ID NO: 7743 - protein, 13 aa, Artificial Sequence
  Synthetic
DTWGQGTQVTVSS

SEQ ID NO: 7744 - protein, 13 aa, Artificial Sequence
  Synthetic
DYWGQGTQVTVSS

SEQ ID NO: 7745 - protein, 13 aa, Artificial Sequence
  Synthetic
DYWGKGTLVTVSS

SEQ ID NO: 7746 - protein, 13 aa, Artificial Sequence
  Synthetic
DYWGQGTQVTVSS

SEQ ID NO: 7747 - protein, 13 aa, Artificial Sequence
  Synthetic
GRRGPGTQVTVSS

SEQ ID NO: 7748 - protein, 13 aa, Artificial Sequence
  Synthetic
DYWGQGTQVTVSS

SEQ ID NO: 7749 - protein, 13 aa, Artificial Sequence
  Synthetic
GSWGQGTQVTVSS

SEQ ID NO: 7750 - protein, 13 aa, Artificial Sequence
  Synthetic
AYWGQGTQVTVSS

SEQ ID NO: 7751 - protein, 12 aa, Artificial Sequence
  Synthetic
DYWGQGTQVTVS

SEQ ID NO: 7752 - protein, 13 aa, Artificial Sequence
  Synthetic
MHWGQGTQVTVSS

SEQ ID NO: 7753 - protein, 13 aa, Artificial Sequence
  Synthetic
DVWGRGTQVTVSS

SEQ ID NO: 7754 - protein, 13 aa, Artificial Sequence
  Synthetic
TYWGQGTQVTVSS

SEQ ID NO: 7755 - protein, 13 aa, Artificial Sequence
  Synthetic
NDWGQGTQVTVSS

SEQ ID NO: 7756 - protein, 13 aa, Artificial Sequence
  Synthetic
GYWGQGTQVTVSS

SEQ ID NO: 7757 - protein, 13 aa, Artificial Sequence
  Synthetic
GHWGQGTQVTVSS

SEQ ID NO: 7758 - protein, 13 aa, Artificial Sequence
  Synthetic
DYWGQGTQVTVSS

SEQ ID NO: 7759 - protein, 13 aa, Artificial Sequence
  Synthetic
DYWGQGTQVTVSS

SEQ ID NO: 7760 - protein, 13 aa, Artificial Sequence
  Synthetic
DYWGQGTQVTVSS

SEQ ID NO: 7761 - protein, 13 aa, Artificial Sequence
  Synthetic
SYWGQGTQVTVSS

SEQ ID NO: 7762 - protein, 13 aa, Artificial Sequence
  Synthetic
DYWGQGTQVTVSS

SEQ ID NO: 7763 - protein, 13 aa, Artificial Sequence
  Synthetic
DSWGQGTQVTVSS

SEQ ID NO: 7764 - protein, 13 aa, Artificial Sequence
  Synthetic
NYWGQGTQVTVSS

SEQ ID NO: 7765 - protein, 13 aa, Artificial Sequence
  Synthetic
DYWGQGTQVTVSS

SEQ ID NO: 7766 - protein, 13 aa, Artificial Sequence
  Synthetic
DYWGQGTQVTVSS

SEQ ID NO: 7767 - protein, 13 aa, Artificial Sequence
  Synthetic
AYWGKGTQVTVSS

SEQ ID NO: 7768 - protein, 13 aa, Artificial Sequence
  Synthetic
DHWGQGTQVTVSS

SEQ ID NO: 7769 - protein, 13 aa, Artificial Sequence
  Synthetic
NYWGQGTQVTVSS

SEQ ID NO: 7770 - protein, 13 aa, Artificial Sequence
  Synthetic
SYWGQGTQVTVSS

SEQ ID NO: 7771 - protein, 12 aa, Artificial Sequence
  Synthetic
EYWGQGTQVTVS

SEQ ID NO: 7772 - protein, 13 aa, Artificial Sequence
  Synthetic
DYWGQGTQVTVSS

SEQ ID NO: 7773 - protein, 13 aa, Artificial Sequence
  Synthetic
DYWGQGTQVTVSS

SEQ ID NO: 7774 - protein, 13 aa, Artificial Sequence
  Synthetic
DYWGQGTQVTVSS

SEQ ID NO: 7775 - protein, 13 aa, Artificial Sequence
  Synthetic
DYWGQGTRVTVSA

SEQ ID NO: 7776 - protein, 13 aa, Artificial Sequence
  Synthetic
DYWGQGTRVTVSA

SEQ ID NO: 7777 - protein, 13 aa, Artificial Sequence
  Synthetic
DYWGQGTRVTVSA

SEQ ID NO: 7778 - protein, 13 aa, Artificial Sequence
  Synthetic
GYWGQGTQVTVSS

SEQ ID NO: 7779 - protein, 12 aa, Artificial Sequence
  Synthetic
DYWGQGTQVTVS

SEQ ID NO: 7780 - protein, 13 aa, Artificial Sequence
  Synthetic
DYWGQGTTVTVSS

SEQ ID NO: 7781 - protein, 13 aa, Artificial Sequence
  Synthetic
EYWGQGTQVTVSS

SEQ ID NO: 7782 - protein, 13 aa, Artificial Sequence
  Synthetic
KYWGQGTQVTVSS

SEQ ID NO: 7783 - protein, 12 aa, Artificial Sequence
  Synthetic
DYWGQGTQVTVS

SEQ ID NO: 7784 - protein, 12 aa, Artificial Sequence
  Synthetic
EFWGQGTQVTVS

SEQ ID NO: 7785 - protein, 13 aa, Artificial Sequence
  Synthetic
SSWGQGTQVTVSS

SEQ ID NO: 7786 - protein, 13 aa, Artificial Sequence
  Synthetic
EYWGQGTQVTVSS

SEQ ID NO: 7787 - protein, 13 aa, Artificial Sequence
  Synthetic
PYWGQGTQVTVSS

SEQ ID NO: 7788 - protein, 12 aa, Artificial Sequence
  Synthetic
EYWGQGTQVTVS

SEQ ID NO: 7789 - protein, 13 aa, Artificial Sequence
  Synthetic
SYWGQGTQVTVSS

SEQ ID NO: 7790 - protein, 13 aa, Artificial Sequence
  Synthetic
AYWGQGTQVTVSS

SEQ ID NO: 7791 - protein, 13 aa, Artificial Sequence
  Synthetic
NYWGQGTQVTVSS

SEQ ID NO: 7792 - protein, 13 aa, Artificial Sequence
  Synthetic
DFWGQGTQVTVSS

SEQ ID NO: 7793 - protein, 13 aa, Artificial Sequence
  Synthetic
VYWGQGTQVTVSS

SEQ ID NO: 7794 - protein, 13 aa, Artificial Sequence
  Synthetic
TIWGQGTQVTVSS

SEQ ID NO: 7795 - protein, 13 aa, Artificial Sequence
  Synthetic
LSWGQGTQVTVSS

SEQ ID NO: 7796 - protein, 13 aa, Artificial Sequence
  Synthetic
AYWGQGTQVTVSS

SEQ ID NO: 7797 - protein, 13 aa, Artificial Sequence
  Synthetic
NYWGQGTQVTVSS

SEQ ID NO: 7798 - protein, 13 aa, Artificial Sequence
  Synthetic
DYWGQGTQVTVSS

SEQ ID NO: 7799 - protein, 13 aa, Artificial Sequence
  Synthetic
DYWGQGTQVTVSS

SEQ ID NO: 7800 - protein, 13 aa, Artificial Sequence
  Synthetic
NYWGQGTQVTVSS

SEQ ID NO: 7801 - protein, 13 aa, Artificial Sequence
  Synthetic
NSWGQGTQVTVSS

SEQ ID NO: 7802 - protein, 13 aa, Artificial Sequence
  Synthetic
NYWGQGTQVTVSS

SEQ ID NO: 7803 - protein, 13 aa, Artificial Sequence
  Synthetic
DYWGQGTQVTVSS

SEQ ID NO: 7804 - protein, 13 aa, Artificial Sequence
  Synthetic
DTWGQGTQVTVSS

SEQ ID NO: 7805 - protein, 13 aa, Artificial Sequence
  Synthetic
DYWGQGTQVTVSS

SEQ ID NO: 7806 - protein, 13 aa, Artificial Sequence
  Synthetic
DYWGQGTQVTVSS

SEQ ID NO: 7807 - protein, 13 aa, Artificial Sequence
  Synthetic
GYWGQGTQVTVSS

SEQ ID NO: 7808 - protein, 13 aa, Artificial Sequence
  Synthetic
HYWGQGTQVTVSS

SEQ ID NO: 7809 - protein, 13 aa, Artificial Sequence
  Synthetic
NYWGQGTQVTVSS

SEQ ID NO: 7810 - protein, 13 aa, Artificial Sequence
  Synthetic
INWGQGTQVTVSS

SEQ ID NO: 7811 - protein, 13 aa, Artificial Sequence
  Synthetic
DYWGQGTQVTVSS

SEQ ID NO: 7812 - protein, 13 aa, Artificial Sequence
  Synthetic
DYWGQGTQVTVSS

SEQ ID NO: 7813 - protein, 13 aa, Artificial Sequence
  Synthetic
TKWGQGTQVTVSS

SEQ ID NO: 7814 - protein, 13 aa, Artificial Sequence
  Synthetic
DYWGQGTPVTVVK

SEQ ID NO: 7815 - protein, 13 aa, Artificial Sequence
  Synthetic
DYWGQGTQVTVSS

SEQ ID NO: 7816 - protein, 13 aa, Artificial Sequence
  Synthetic
ASWGQGTQVTVSS

SEQ ID NO: 7817 - protein, 13 aa, Artificial Sequence
  Synthetic
DYWGQGTQVTVSS

SEQ ID NO: 7818 - protein, 13 aa, Artificial Sequence
  Synthetic
IYWGQGTQVTVSS

SEQ ID NO: 7819 - protein, 13 aa, Artificial Sequence
  Synthetic
GYWGQGTQVTVSS

SEQ ID NO: 7820 - protein, 13 aa, Artificial Sequence
  Synthetic
SAWGQGTQVTVSS

SEQ ID NO: 7821 - protein, 13 aa, Artificial Sequence
  Synthetic
NYYGQGTQVTVSS

SEQ ID NO: 7822 - protein, 13 aa, Artificial Sequence
  Synthetic
SNWGQGTQVTVSS

SEQ ID NO: 7823 - protein, 13 aa, Artificial Sequence
  Synthetic
DGWGQGTQVTVSS

SEQ ID NO: 7824 - protein, 13 aa, Artificial Sequence
  Synthetic
DYWGQGTQVTVSS

SEQ ID NO: 7825 - protein, 13 aa, Artificial Sequence
  Synthetic
DYWGHGTQVTVSS

SEQ ID NO: 7826 - protein, 12 aa, Artificial Sequence
  Synthetic
DHWGQGTQVTVS

SEQ ID NO: 7827 - protein, 12 aa, Artificial Sequence
  Synthetic
GPWGQGTQVTVS

SEQ ID NO: 7828 - protein, 13 aa, Artificial Sequence
  Synthetic
DYWGQGTQVTVSS

SEQ ID NO: 7829 - protein, 13 aa, Artificial Sequence
  Synthetic
EFWGQGTQVTISS

SEQ ID NO: 7830 - protein, 13 aa, Artificial Sequence
  Synthetic
EYWGKGTQVTVSS

SEQ ID NO: 7831 - protein, 13 aa, Artificial Sequence
  Synthetic
DYWGQGTQVTVSS

SEQ ID NO: 7832 - protein, 13 aa, Artificial Sequence
  Synthetic
DYWGQGTQVTVSS

SEQ ID NO: 7833 - protein, 13 aa, Artificial Sequence
  Synthetic
DYWGQGTQVTVSS

SEQ ID NO: 7834 - protein, 13 aa, Artificial Sequence
  Synthetic
EHWGQGTQVTVSS

SEQ ID NO: 7835 - protein, 13 aa, Artificial Sequence
  Synthetic
DYWGQGTQVTVSS

SEQ ID NO: 7836 - protein, 13 aa, Artificial Sequence
  Synthetic
GYWGQGTQVTVSS

SEQ ID NO: 7837 - protein, 13 aa, Artificial Sequence
  Synthetic
AYWGQGTQVTVSS

SEQ ID NO: 7838 - protein, 13 aa, Artificial Sequence
  Synthetic
GVRGQGTQVTVSS

SEQ ID NO: 7839 - protein, 13 aa, Artificial Sequence
  Synthetic
DYWGQGTQVTVSS

SEQ ID NO: 7840 - protein, 13 aa, Artificial Sequence
  Synthetic
DFWGQGTQVTVSS

SEQ ID NO: 7841 - protein, 13 aa, Artificial Sequence
  Synthetic
GSWGQGTQVTVSS

SEQ ID NO: 7842 - protein, 13 aa, Artificial Sequence
  Synthetic
SSWGQGTQVTVSS

SEQ ID NO: 7843 - protein, 13 aa, Artificial Sequence
  Synthetic
DYWGQGTQVTVSS

SEQ ID NO: 7844 - protein, 13 aa, Artificial Sequence
  Synthetic
DYWGQGTQVTVSS

SEQ ID NO: 7845 - protein, 13 aa, Artificial Sequence
  Synthetic
DYWGKGTPVTVSA

SEQ ID NO: 7846 - protein, 13 aa, Artificial Sequence
  Synthetic
PYWGQGTPVTVSA

SEQ ID NO: 7847 - protein, 13 aa, Artificial Sequence
  Synthetic
KYWGQGTPVTVSS

SEQ ID NO: 7848 - protein, 13 aa, Artificial Sequence
  Synthetic
ETWGQGTQVTVSS

SEQ ID NO: 7849 - protein, 13 aa, Artificial Sequence
  Synthetic
EYWGQGTQVTVSS

SEQ ID NO: 7850 - protein, 13 aa, Artificial Sequence
  Synthetic
YYWGQGTQVTVSS

SEQ ID NO: 7851 - protein, 13 aa, Artificial Sequence
  Synthetic
DYWGQGTQVTVSS

SEQ ID NO: 7852 - protein, 13 aa, Artificial Sequence
  Synthetic
RVWGQGTQVTVSS

SEQ ID NO: 7853 - protein, 13 aa, Artificial Sequence
  Synthetic
NSWGQGTQVTVSS

SEQ ID NO: 7854 - protein, 13 aa, Artificial Sequence
  Synthetic
DFWGQGTQVTVSS

SEQ ID NO: 7855 - protein, 13 aa, Artificial Sequence
  Synthetic
DYWGQGTQVTVSS

SEQ ID NO: 7856 - protein, 13 aa, Artificial Sequence
  Synthetic
DYWGQGTQVTVSS

SEQ ID NO: 7857 - protein, 13 aa, Artificial Sequence
  Synthetic
AYWGQGTQVTVSS

SEQ ID NO: 7858 - protein, 13 aa, Artificial Sequence
  Synthetic
RYWGRGTQVTVSS

SEQ ID NO: 7859 - protein, 13 aa, Artificial Sequence
  Synthetic
DYWGQGTQVTVSS

SEQ ID NO: 7860 - protein, 13 aa, Artificial Sequence
  Synthetic
DYWGQGTQVTVSS

SEQ ID NO: 7861 - protein, 13 aa, Artificial Sequence
  Synthetic
NYWGQGTQVTVSS

SEQ ID NO: 7862 - protein, 13 aa, Artificial Sequence
  Synthetic
DYWGQGTQVTVSS

SEQ ID NO: 7863 - protein, 13 aa, Artificial Sequence
  Synthetic
DFWGQGTQVTVSS

SEQ ID NO: 7864 - protein, 13 aa, Artificial Sequence
  Synthetic
DDWGQGTQVTVSS

SEQ ID NO: 7865 - protein, 13 aa, Artificial Sequence
  Synthetic
DYWGQGTQVTVSS

SEQ ID NO: 7866 - protein, 13 aa, Artificial Sequence
  Synthetic
DVWGQGTQVTVSS

SEQ ID NO: 7867 - protein, 13 aa, Artificial Sequence
  Synthetic
HYWGKGTQVTVSS

SEQ ID NO: 7868 - protein, 13 aa, Artificial Sequence
  Synthetic
GYWGQGTQVTVSS

SEQ ID NO: 7869 - protein, 13 aa, Artificial Sequence
  Synthetic
DYWGQGTQVTVSS

SEQ ID NO: 7870 - protein, 13 aa, Artificial Sequence
  Synthetic
DYWGKGTLVTVSS

SEQ ID NO: 7871 - protein, 13 aa, Artificial Sequence
  Synthetic
HYWGKGTLVTVSS

SEQ ID NO: 7872 - protein, 13 aa, Artificial Sequence
  Synthetic
TWWGQGTQVTVSS

SEQ ID NO: 7873 - protein, 13 aa, Artificial Sequence
  Synthetic
GYWGQGTQVTVSS

SEQ ID NO: 7874 - protein, 13 aa, Artificial Sequence
  Synthetic
DYWGQGTQVTVSS

SEQ ID NO: 7875 - protein, 13 aa, Artificial Sequence
  Synthetic
DSWGQGTQVTVSS

SEQ ID NO: 7876 - protein, 13 aa, Artificial Sequence
  Synthetic
DHWGQGTQVTVSS

SEQ ID NO: 7877 - protein, 13 aa, Artificial Sequence
  Synthetic
PYWGQGTQVTVSS

SEQ ID NO: 7878 - protein, 13 aa, Artificial Sequence
  Synthetic
DYWGQGTQVTVSS

SEQ ID NO: 7879 - protein, 13 aa, Artificial Sequence
  Synthetic
NYWGQGTQVTVSS

SEQ ID NO: 7880 - protein, 13 aa, Artificial Sequence
  Synthetic
SFWGQGTQVTVSS

SEQ ID NO: 7881 - protein, 13 aa, Artificial Sequence
  Synthetic
NYWGQGTQVTVSS

SEQ ID NO: 7882 - protein, 13 aa, Artificial Sequence
  Synthetic
DYWGQGTQVTVSS

SEQ ID NO: 7883 - protein, 13 aa, Artificial Sequence
  Synthetic
DYWGKGTQVTVSS

SEQ ID NO: 7884 - protein, 13 aa, Artificial Sequence
  Synthetic
DYWGRGTQVTVSS

SEQ ID NO: 7885 - protein, 13 aa, Artificial Sequence
  Synthetic
VYWGQGTQVTVSS

SEQ ID NO: 7886 - protein, 13 aa, Artificial Sequence
  Synthetic
RYWGQGTQVTVSS

SEQ ID NO: 7887 - protein, 13 aa, Artificial Sequence
  Synthetic
SYWGQGTQVTVSS

SEQ ID NO: 7888 - protein, 13 aa, Artificial Sequence
  Synthetic
DYWGQGTQVTVSS

SEQ ID NO: 7889 - protein, 13 aa, Artificial Sequence
  Synthetic
EHWGKGTQVTVSS

SEQ ID NO: 7890 - protein, 13 aa, Artificial Sequence
  Synthetic
DHWGKGTQVTVSS

SEQ ID NO: 7891 - protein, 13 aa, Artificial Sequence
  Synthetic
DYWGQGTQVTVSS

SEQ ID NO: 7892 - protein, 13 aa, Artificial Sequence
  Synthetic
GSRGRGTQVTVSS

SEQ ID NO: 7893 - protein, 13 aa, Artificial Sequence
  Synthetic
NPWGQGTQVTVSS

SEQ ID NO: 7894 - protein, 13 aa, Artificial Sequence
  Synthetic
AHWGQGTQVTVSS

SEQ ID NO: 7895 - protein, 13 aa, Artificial Sequence
  Synthetic
DFWGQGTQVTVSS

SEQ ID NO: 7896 - protein, 12 aa, Artificial Sequence
  Synthetic
DYWGQGTQVTVS

SEQ ID NO: 7897 - protein, 13 aa, Artificial Sequence
  Synthetic
EDWGQGTQVTVSS

SEQ ID NO: 7898 - protein, 13 aa, Artificial Sequence
  Synthetic
ADWGQGTQVTVSS

SEQ ID NO: 7899 - protein, 13 aa, Artificial Sequence
  Synthetic
DTWGQGTRVTVSS

SEQ ID NO: 7900 - protein, 13 aa, Artificial Sequence
  Synthetic
DYWGQGTKVTVSS

SEQ ID NO: 7901 - protein, 13 aa, Artificial Sequence
  Synthetic
DYWGQGTQVTVSS

SEQ ID NO: 7902 - protein, 13 aa, Artificial Sequence
  Synthetic
DSWGQGTQVTVSS

SEQ ID NO: 7903 - protein, 13 aa, Artificial Sequence
  Synthetic
WYWGQGTQVTVSS

SEQ ID NO: 7904 - protein, 13 aa, Artificial Sequence
  Synthetic
DYWGQGTQVTVSS

SEQ ID NO: 7905 - protein, 13 aa, Artificial Sequence
  Synthetic
RYWGQGTQVTVSS

SEQ ID NO: 7906 - protein, 13 aa, Artificial Sequence
  Synthetic
TYWGQGTQVTVSS

SEQ ID NO: 7907 - protein, 13 aa, Artificial Sequence
  Synthetic
DYWGLGTQVTVSS

SEQ ID NO: 7908 - protein, 13 aa, Artificial Sequence
  Synthetic
DYWGQGTQVTVSS

SEQ ID NO: 7909 - protein, 13 aa, Artificial Sequence
  Synthetic
DYWGQGTQVTVSS

SEQ ID NO: 7910 - protein, 13 aa, Artificial Sequence
  Synthetic
DYWGQGTQVTVSS

SEQ ID NO: 7911 - protein, 13 aa, Artificial Sequence
  Synthetic
HLWGQGTRVTVSS

SEQ ID NO: 7912 - protein, 13 aa, Artificial Sequence
  Synthetic
DYWGQGTQVTVSS

SEQ ID NO: 7913 - protein, 13 aa, Artificial Sequence
  Synthetic
GSWGQGTQVTVSS

SEQ ID NO: 7914 - protein, 13 aa, Artificial Sequence
  Synthetic
DYWGQGTQVTVSS

SEQ ID NO: 7915 - protein, 13 aa, Artificial Sequence
  Synthetic
DYWGKGTQVTVSS

SEQ ID NO: 7916 - protein, 13 aa, Artificial Sequence
  Synthetic
DYWGKGTQVTVSS

SEQ ID NO: 7917 - protein, 12 aa, Artificial Sequence
  Synthetic
DYWGQGTQVTVS

SEQ ID NO: 7918 - protein, 13 aa, Artificial Sequence
  Synthetic
PIWGQGTQVTVSS

SEQ ID NO: 7919 - protein, 13 aa, Artificial Sequence
  Synthetic
PIWGRGTQVTVSS

SEQ ID NO: 7920 - protein, 13 aa, Artificial Sequence
  Synthetic
PYWGQGTQVTVSS

SEQ ID NO: 7921 - protein, 13 aa, Artificial Sequence
  Synthetic
TYWGQGTQVTVSS

SEQ ID NO: 7922 - protein, 13 aa, Artificial Sequence
  Synthetic
NYWGQGTQVTVSS

SEQ ID NO: 7923 - protein, 13 aa, Artificial Sequence
  Synthetic
VYWGKGALVTVSS

SEQ ID NO: 7924 - protein, 13 aa, Artificial Sequence
  Synthetic
WAWGQGTQVTVSS

SEQ ID NO: 7925 - protein, 13 aa, Artificial Sequence
  Synthetic
DYWGQGTQVTVSS

SEQ ID NO: 7926 - protein, 13 aa, Artificial Sequence
  Synthetic
HYWGPGTQVTVSS

SEQ ID NO: 7927 - protein, 13 aa, Artificial Sequence
  Synthetic
DYWGQGTQVTVSS

SEQ ID NO: 7928 - protein, 13 aa, Artificial Sequence
  Synthetic
DYWGQGTQVTVSS

SEQ ID NO: 7929 - protein, 13 aa, Artificial Sequence
  Synthetic
DYWGQGTQVTVSS

SEQ ID NO: 7930 - protein, 13 aa, Artificial Sequence
  Synthetic
DYWGQGTQVTVSS

SEQ ID NO: 7931 - protein, 13 aa, Artificial Sequence
  Synthetic
IYWGQGTQVTVSS

SEQ ID NO: 7932 - protein, 13 aa, Artificial Sequence
  Synthetic
DYWGQGTQVTVSS

SEQ ID NO: 7933 - protein, 13 aa, Artificial Sequence
  Synthetic
NYWGQGTQVTVSS

SEQ ID NO: 7934 - protein, 13 aa, Artificial Sequence
  Synthetic
DYWGQGTQVTVSS

SEQ ID NO: 7935 - protein, 12 aa, Artificial Sequence
  Synthetic
EYWGQGTQVTVS

SEQ ID NO: 7936 - protein, 12 aa, Artificial Sequence
  Synthetic
DYWGQGTQVTVS

SEQ ID NO: 7937 - protein, 13 aa, Artificial Sequence
  Synthetic
NYWGQGTQVTVSS

SEQ ID NO: 7938 - protein, 13 aa, Artificial Sequence
  Synthetic
PYWGQGTQVTVSS

SEQ ID NO: 7939 - protein, 13 aa, Artificial Sequence
  Synthetic
DYWGQGTQVTVSL

SEQ ID NO: 7940 - protein, 13 aa, Artificial Sequence
  Synthetic
DSWGQGTLVTVSS

SEQ ID NO: 7941 - protein, 13 aa, Artificial Sequence
  Synthetic
DYRGQGTQVTVSS

SEQ ID NO: 7942 - protein, 12 aa, Artificial Sequence
  Synthetic
EYWGQGTQVTVS

SEQ ID NO: 7943 - protein, 13 aa, Artificial Sequence
  Synthetic
NYWGQGTQVTVSS

SEQ ID NO: 7944 - protein, 13 aa, Artificial Sequence
  Synthetic
DYWGQGTQVTVSS

SEQ ID NO: 7945 - protein, 26 aa, Artificial Sequence
  Synthetic
EVQLVESGGGLVQPGGSLRLSCTASG

SEQ ID NO: 7946 - protein, 26 aa, Artificial Sequence
  Synthetic
EVQLVESGGGSVQPGGSLRLSCTASG

SEQ ID NO: 7947 - protein, 26 aa, Artificial Sequence
  Synthetic
QVQLQESGGGSVQAGGSLRLSCAASG

SEQ ID NO: 7948 - protein, 26 aa, Artificial Sequence
  Synthetic
QVQLVETGGGLVQPGGSLRLSCTASG

SEQ ID NO: 7949 - protein, 26 aa, Artificial Sequence
  Synthetic
QVQLVESGGGLAQPGGSLRLSCAASG

SEQ ID NO: 7950 - protein, 26 aa, Artificial Sequence
  Synthetic
QVQLVESGGGLVQAGGSLRLSCAASG

SEQ ID NO: 7951 - protein, 26 aa, Artificial Sequence
  Synthetic
QVQLQESGGGLVQPGGSLRLSCAASG

SEQ ID NO: 7952 - protein, 26 aa, Artificial Sequence
  Synthetic
QVQLVESGGGLVQAGGSLRLSCTASG

SEQ ID NO: 7953 - protein, 26 aa, Artificial Sequence
  Synthetic
QVKLEESGGGSVQAGGSLRLSCAASG

SEQ ID NO: 7954 - protein, 26 aa, Artificial Sequence
  Synthetic
QVKLEESGGGLVQAGGSLRLSCAASG

SEQ ID NO: 7955 - protein, 26 aa, Artificial Sequence
  Synthetic
QVKLEESGGGLVQAGGSLRLSCAASG

SEQ ID NO: 7956 - protein, 26 aa, Artificial Sequence
  Synthetic
QVQLVESGGGSVQAGGSLSVSCAASG

SEQ ID NO: 7957 - protein, 26 aa, Artificial Sequence
  Synthetic
EVQLQASGGGLVQAGGSLRLSCAASG

SEQ ID NO: 7958 - protein, 26 aa, Artificial Sequence
  Synthetic
EVQLQASGGGLVQAGGSLRLSCAASG

SEQ ID NO: 7959 - protein, 26 aa, Artificial Sequence
  Synthetic
EVQLQASGGGLVQPGGSLRLSCAASA

SEQ ID NO: 7960 - protein, 26 aa, Artificial Sequence
  Synthetic
DVQLQASGGGLVQPGGSLRLSCAASG

SEQ ID NO: 7961 - protein, 26 aa, Artificial Sequence
  Synthetic
EVQLQASGGGLVQAGGSLRLSCAASE

SEQ ID NO: 7962 - protein, 26 aa, Artificial Sequence
  Synthetic
RVQLQASGGGLVQAGGSLRLSCAASG

SEQ ID NO: 7963 - protein, 25 aa, Artificial Sequence
  Synthetic
CELQASGGGLVQPGGSLRLSCAASG

SEQ ID NO: 7964 - protein, 26 aa, Artificial Sequence
  Synthetic
EVQLQASGGGLLQAGDSLRLSCAASG

SEQ ID NO: 7965 - protein, 26 aa, Artificial Sequence
  Synthetic
QVQLVESGGGSVQAGGSLRLSCVASG

SEQ ID NO: 7966 - protein, 26 aa, Artificial Sequence
  Synthetic
DVQLVESGGGSVPAGGSLRLSCAVSG

SEQ ID NO: 7967 - protein, 26 aa, Artificial Sequence
  Synthetic
QVQLVESGGGSVEAGGSLRLSCVVSG

SEQ ID NO: 7968 - protein, 26 aa, Artificial Sequence
  Synthetic
DVQLVESGGGSVLTGGSLRLSCAAPG

SEQ ID NO: 7969 - protein, 26 aa, Artificial Sequence
  Synthetic
DVQLVESGGGSVQAGGSLRLSCAVSG

SEQ ID NO: 7970 - protein, 26 aa, Artificial Sequence
  Synthetic
QVQLVESGGGSVLAGGSLRLSCAASE

SEQ ID NO: 7971 - protein, 26 aa, Artificial Sequence
  Synthetic
EVQLQASGGGSVQAGDSLRLSCAASG

SEQ ID NO: 7972 - protein, 26 aa, Artificial Sequence
  Synthetic
DVQLQESGGGSVQAGGSLKLSCAISG

SEQ ID NO: 7973 - protein, 26 aa, Artificial Sequence
  Synthetic
DVQLQESGGGSVQAGGSLKLACTVSG

SEQ ID NO: 7974 - protein, 26 aa, Artificial Sequence
  Synthetic
QVQLQESGGGSVQAGGSLRLSCAASG

SEQ ID NO: 7975 - protein, 26 aa, Artificial Sequence
  Synthetic
QVQLVESGGGSVQAGESLRLSCAGSG

SEQ ID NO: 7976 - protein, 26 aa, Artificial Sequence
  Synthetic
QVQLVESGGGSVQAGGSLRLSCASST

SEQ ID NO: 7977 - protein, 26 aa, Artificial Sequence
  Synthetic
QRQVVESGGGSVQAGETLELSCTGSG

SEQ ID NO: 7978 - protein, 26 aa, Artificial Sequence
  Synthetic
QVALEECGGVSVQAGGSLRLSCTAPG

SEQ ID NO: 7979 - protein, 26 aa, Artificial Sequence
  Synthetic
QMQLVESGGGSVQAGGSLRLSCAASG

SEQ ID NO: 7980 - protein, 26 aa, Artificial Sequence
  Synthetic
QAQVVETGGGSVKAGGSLRLSCATSE

SEQ ID NO: 7981 - protein, 26 aa, Artificial Sequence
  Synthetic
QVQLVESGGGSVQAGGSLRLSCTASG

SEQ ID NO: 7982 - protein, 26 aa, Artificial Sequence
  Synthetic
QVQLQESGGGLVQAGGSLRLSCVASG

SEQ ID NO: 7983 - protein, 26 aa, Artificial Sequence
  Synthetic
RVHVVLSGGGSVQAGGSLTLSCEASG

SEQ ID NO: 7984 - protein, 26 aa, Artificial Sequence
  Synthetic
QVQMVESGGGKVQVGGSLTLSCECSG

SEQ ID NO: 7985 - protein, 26 aa, Artificial Sequence
  Synthetic
QVQLEEAGGGSVQAGGSLRLSCAASG

SEQ ID NO: 7986 - protein, 26 aa, Artificial Sequence
  Synthetic
QAQLRESGGGSVQPGGTLRLSCVASG

SEQ ID NO: 7987 - protein, 26 aa, Artificial Sequence
  Synthetic
QEELMESGGGPVQAGESLRLSCSASG

SEQ ID NO: 7988 - protein, 26 aa, Artificial Sequence
  Synthetic
QVRVMESGGGSVQAGGSLRLSCTASG

SEQ ID NO: 7989 - protein, 26 aa, Artificial Sequence
  Synthetic
QAQMVESGGGSVQAGGSLRLSCRAST

SEQ ID NO: 7990 - protein, 26 aa, Artificial Sequence
  Synthetic
QVQLVESGGGSGQAGGSLRLTCGASG

SEQ ID NO: 7991 - protein, 26 aa, Artificial Sequence
  Synthetic
EVQVVESGGGSVQAGGSLRLSCAASG

SEQ ID NO: 7992 - protein, 26 aa, Artificial Sequence
  Synthetic
DVQLVESGGGSVQGAAGGSLRLSCAA

SEQ ID NO: 7993 - protein, 26 aa, Artificial Sequence
  Synthetic
DVQLEESGGGSVQAGGSLRLSCAASG

SEQ ID NO: 7994 - protein, 26 aa, Artificial Sequence
  Synthetic
DVQLEESGGGSVQTGGSLRLSCAASG

SEQ ID NO: 7995 - protein, 26 aa, Artificial Sequence
  Synthetic
EVQLEESGGGLVQPGGSLTLSCAASG

SEQ ID NO: 7996 - protein, 26 aa, Artificial Sequence
  Synthetic
EVQLEESGGGSVQAGGSLRLSCAASG

SEQ ID NO: 7997 - protein, 26 aa, Artificial Sequence
  Synthetic
GLVGGLKARSLVQAGGSLRLACAASA

SEQ ID NO: 7998 - protein, 26 aa, Artificial Sequence
  Synthetic
HVQLVESGGGSVQAGGSLRLSCAASG

SEQ ID NO: 7999 - protein, 26 aa, Artificial Sequence
  Synthetic
HVQLVESGGGSVQAGGSLRLSCTYSV

SEQ ID NO: 8000 - protein, 26 aa, Artificial Sequence
  Synthetic
DVQLVESGGGAVQAGGSLRLSCAASR

SEQ ID NO: 8001 - protein, 26 aa, Artificial Sequence
  Synthetic
HVQLVESGGGSVQAGGSLRLSCKASG

SEQ ID NO: 8002 - protein, 26 aa, Artificial Sequence
  Synthetic
HVQLVESGGGSVQAGGSLRLSCAASG

SEQ ID NO: 8003 - protein, 26 aa, Artificial Sequence
  Synthetic
QVQLVESGGGSVQAGGSLRLSCTASG

SEQ ID NO: 8004 - protein, 26 aa, Artificial Sequence
  Synthetic
HVQLVESGGGSVQAGGSLKLSCAVSG

SEQ ID NO: 8005 - protein, 26 aa, Artificial Sequence
  Synthetic
QVQLVESGGGSVQAGGSLRLSCVASG

SEQ ID NO: 8006 - protein, 26 aa, Artificial Sequence
  Synthetic
DVQLVESGGGSVQAGGSLRLSCAASG

SEQ ID NO: 8007 - protein, 26 aa, Artificial Sequence
  Synthetic
QVQLVESGGGSVQAGGSLRLSCAASG

SEQ ID NO: 8008 - protein, 26 aa, Artificial Sequence
  Synthetic
DVQLVESGGGSVQAGGSLRLSCAASG

SEQ ID NO: 8009 - protein, 26 aa, Artificial Sequence
  Synthetic
QVQLVESGGGSVQAGGSLRLSCATSG

SEQ ID NO: 8010 - protein, 26 aa, Artificial Sequence
  Synthetic
HVQLVESGGGSVQAGGSLRLSCVASE

SEQ ID NO: 8011 - protein, 26 aa, Artificial Sequence
  Synthetic
DVQLVESGGGSVQAGGSLRLSCAASG

SEQ ID NO: 8012 - protein, 26 aa, Artificial Sequence
  Synthetic
EVQLVESGGGSVQAGGSLRLSCRASR

SEQ ID NO: 8013 - protein, 26 aa, Artificial Sequence
  Synthetic
QVQLVESGGGSVQAGGSLRLSCAASG

SEQ ID NO: 8014 - protein, 26 aa, Artificial Sequence
  Synthetic
HVQLVESGGGSVQAGGSLRLSCTASG

SEQ ID NO: 8015 - protein, 26 aa, Artificial Sequence
  Synthetic
QVQLVESGGGSVQAGGSLRLSCAASG

SEQ ID NO: 8016 - protein, 26 aa, Artificial Sequence
  Synthetic
QVQLVESGGGSVQAGGSLRLSCVASG

SEQ ID NO: 8017 - protein, 26 aa, Artificial Sequence
  Synthetic
QVQLVESGGGSVQAGGSLRLSCAASG

SEQ ID NO: 8018 - protein, 26 aa, Artificial Sequence
  Synthetic
QVQLVESGGGSVQAGGSLKLSCAASG

SEQ ID NO: 8019 - protein, 26 aa, Artificial Sequence
  Synthetic
DVQLVESGGGLVQAGGSLRLSCTASG

SEQ ID NO: 8020 - protein, 26 aa, Artificial Sequence
  Synthetic
DVQLVESGGGLVQAGGSLRLSCTASG

SEQ ID NO: 8021 - protein, 26 aa, Artificial Sequence
  Synthetic
DVQLVESGGGSVQAGGSLRLSCAGSG

SEQ ID NO: 8022 - protein, 26 aa, Artificial Sequence
  Synthetic
QVQLQESGGGSVQAGGSLKLSCAASG

SEQ ID NO: 8023 - protein, 26 aa, Artificial Sequence
  Synthetic
QVQLQESGGGSVQAGGSLRLSCAASG

SEQ ID NO: 8024 - protein, 26 aa, Artificial Sequence
  Synthetic
QVQLQESGGGSVQAGGSLRLACAAPG

SEQ ID NO: 8025 - protein, 26 aa, Artificial Sequence
  Synthetic
QVQLQESGGGSVQAGGSLRLSCADSG

SEQ ID NO: 8026 - protein, 26 aa, Artificial Sequence
  Synthetic
QVQLQESGGGSVQAGGSLRLSCESSG

SEQ ID NO: 8027 - protein, 26 aa, Artificial Sequence
  Synthetic
QVQLQESGGGSVQTGGSLTLSCAASV

SEQ ID NO: 8028 - protein, 26 aa, Artificial Sequence
  Synthetic
QVQLQESGGGSVQVGGSLRLSCVYSG

SEQ ID NO: 8029 - protein, 26 aa, Artificial Sequence
  Synthetic
QVQLQESGGGSVQAGESLRLSCTVPG

SEQ ID NO: 8030 - protein, 26 aa, Artificial Sequence
  Synthetic
DVQLVESGGGSVQTGGSLTLSCAASG

SEQ ID NO: 8031 - protein, 26 aa, Artificial Sequence
  Synthetic
QVQLQESGGGSVQAGGSLRLSCVASG

SEQ ID NO: 8032 - protein, 26 aa, Artificial Sequence
  Synthetic
QVQLQESGGGSVQDGGSLRLSCAASG

SEQ ID NO: 8033 - protein, 26 aa, Artificial Sequence
  Synthetic
EVQLVESGGGSVQAGGSLRLSCAASG

SEQ ID NO: 8034 - protein, 26 aa, Artificial Sequence
  Synthetic
QVQLVESGGGSVQAGGSLRLSCVASG

SEQ ID NO: 8035 - protein, 26 aa, Artificial Sequence
  Synthetic
QVQLQESGGGSVQAGGSLKLSCAASG

SEQ ID NO: 8036 - protein, 26 aa, Artificial Sequence
  Synthetic
QVQLQESGGDSVQAGGSLKLSCAASG

SEQ ID NO: 8037 - protein, 26 aa, Artificial Sequence
  Synthetic
QVQLQESGGGSVHSGGSLRLSCLAAG

SEQ ID NO: 8038 - protein, 26 aa, Artificial Sequence
  Synthetic
QVQLQESGGGSVQSGGSLRLSCVASG

SEQ ID NO: 8039 - protein, 26 aa, Artificial Sequence
  Synthetic
DVQLQASGGGSVQAGGSLRLSCAASG

SEQ ID NO: 8040 - protein, 26 aa, Artificial Sequence
  Synthetic
QVQLQESGGGSVQVGGSLRVACAASG

SEQ ID NO: 8041 - protein, 26 aa, Artificial Sequence
  Synthetic
DVQLQESGGGSVQAGGSLRLSCAVNA

SEQ ID NO: 8042 - protein, 26 aa, Artificial Sequence
  Synthetic
DVQLQESGGGSVQAGGSLRLSCVVSG

SEQ ID NO: 8043 - protein, 26 aa, Artificial Sequence
  Synthetic
DVQLQESGGGSVQAGGSLRLSCTASG

SEQ ID NO: 8044 - protein, 26 aa, Artificial Sequence
  Synthetic
DVQLQESGGGSVQAGGSLRLSCAASE

SEQ ID NO: 8045 - protein, 26 aa, Artificial Sequence
  Synthetic
DVQLQESGGGSVQAGGSLRLSCVASG

SEQ ID NO: 8046 - protein, 26 aa, Artificial Sequence
  Synthetic
DVQLQESGGGSVQAGGSLRLSCAASG

SEQ ID NO: 8047 - protein, 26 aa, Artificial Sequence
  Synthetic
DVQLQESGGGLVQPGGSLTLSCAASG

SEQ ID NO: 8048 - protein, 26 aa, Artificial Sequence
  Synthetic
DVQLQESGGGSVQTGGSLRLSCVASE

SEQ ID NO: 8049 - protein, 26 aa, Artificial Sequence
  Synthetic
QVQLQESGGGLVQPGGSLRLSCAASG

SEQ ID NO: 8050 - protein, 26 aa, Artificial Sequence
  Synthetic
EVQLVESGGGSVQTGGSLRLSCAASG

SEQ ID NO: 8051 - protein, 26 aa, Artificial Sequence
  Synthetic
DVQLVESGGGSVQAGGSLRLSCAASR

SEQ ID NO: 8052 - protein, 26 aa, Artificial Sequence
  Synthetic
EVQLVESGGGSVQAGGSLRLSCAAPR

SEQ ID NO: 8053 - protein, 26 aa, Artificial Sequence
  Synthetic
QVQLVESGGGSVQAGGSLRLSCKHIG

SEQ ID NO: 8054 - protein, 26 aa, Artificial Sequence
  Synthetic
EVQLVESGGGSVQAGGSLNLGCSASG

SEQ ID NO: 8055 - protein, 26 aa, Artificial Sequence
  Synthetic
EVQLVESGGGTVQAGGSLRLSCAASG

SEQ ID NO: 8056 - protein, 26 aa, Artificial Sequence
  Synthetic
DVQLVESGGGSVQAGGSLRLSCTVSG

SEQ ID NO: 8057 - protein, 26 aa, Artificial Sequence
  Synthetic
AVQLVDSGGGSVQAGGSLTLSCTGSG

SEQ ID NO: 8058 - protein, 26 aa, Artificial Sequence
  Synthetic
QVKLEESGGGSVQAGGSLRLSCAPSG

SEQ ID NO: 8059 - protein, 26 aa, Artificial Sequence
  Synthetic
QVQLVESGGGSVQAGGSLRLSCVITE

SEQ ID NO: 8060 - protein, 26 aa, Artificial Sequence
  Synthetic
VVQLVESGGGSVQAGGSLRLSCAASG

SEQ ID NO: 8061 - protein, 26 aa, Artificial Sequence
  Synthetic
QVQLVESGGGSVQAGGSLRLSCAPSG

SEQ ID NO: 8062 - protein, 26 aa, Artificial Sequence
  Synthetic
AVQLVESGGGSVQAGGSLRLSCTVSG

SEQ ID NO: 8063 - protein, 26 aa, Artificial Sequence
  Synthetic
DVQLVESGGGSVQAGGSLRLSCTVSG

SEQ ID NO: 8064 - protein, 26 aa, Artificial Sequence
  Synthetic
AVQLVESGGGSAQAGGSLRLACVAAE

SEQ ID NO: 8065 - protein, 26 aa, Artificial Sequence
  Synthetic
EVQLVESGGGSVQAGGSLRLSCTASQ

SEQ ID NO: 8066 - protein, 26 aa, Artificial Sequence
  Synthetic
AVQLVESGGGSVKAGGSLRLSCATSR

SEQ ID NO: 8067 - protein, 26 aa, Artificial Sequence
  Synthetic
DVQLVESGGGSVQAGGNLTLSCEASG

SEQ ID NO: 8068 - protein, 26 aa, Artificial Sequence
  Synthetic
EVQLVESGGGSVQAGGSLRLSCVASG

SEQ ID NO: 8069 - protein, 26 aa, Artificial Sequence
  Synthetic
QVQLVESGGGSVQAGGSLRLSCAASA

SEQ ID NO: 8070 - protein, 26 aa, Artificial Sequence
  Synthetic
EVQLVESGGGSVQAGGSLRLSCVASG

SEQ ID NO: 8071 - protein, 26 aa, Artificial Sequence
  Synthetic
QVQLVESGGGSVQAGGSLRLSCANSR

SEQ ID NO: 8072 - protein, 26 aa, Artificial Sequence
  Synthetic
AVQLVESGGGSVQAGGSLRLSCVASS

SEQ ID NO: 8073 - protein, 26 aa, Artificial Sequence
  Synthetic
AVQLVESGGGSVQTGGSLRLTRALSG

SEQ ID NO: 8074 - protein, 26 aa, Artificial Sequence
  Synthetic
QVKLEESGGGSVQAGGSLRLSCVVSA

SEQ ID NO: 8075 - protein, 26 aa, Artificial Sequence
  Synthetic
AVQLVESGGGSVQAGGSLKLSCAATT

SEQ ID NO: 8076 - protein, 26 aa, Artificial Sequence
  Synthetic
QVQLVESGGGSVQAGGSLNLSCVASG

SEQ ID NO: 8077 - protein, 26 aa, Artificial Sequence
  Synthetic
AVQLVESGGGSVQAGGSLSLSCAASG

SEQ ID NO: 8078 - protein, 26 aa, Artificial Sequence
  Synthetic
QVKLEESGGGSVQAGGSLRLSCVVSG

SEQ ID NO: 8079 - protein, 26 aa, Artificial Sequence
  Synthetic
QVQLVESGGGSVQAGGSLTLSCVASG

SEQ ID NO: 8080 - protein, 26 aa, Artificial Sequence
  Synthetic
QVKLEESGGGLVQAGGSLRLSCEASG

SEQ ID NO: 8081 - protein, 26 aa, Artificial Sequence
  Synthetic
DVQLVESGGGSVQAGGSLRLSCAASG

SEQ ID NO: 8082 - protein, 26 aa, Artificial Sequence
  Synthetic
DVQLVESGGGSVHVGGSLRLSCVVSP

SEQ ID NO: 8083 - protein, 26 aa, Artificial Sequence
  Synthetic
QVQLVESGGGSVQAGGSLRLSCTASG

SEQ ID NO: 8084 - protein, 26 aa, Artificial Sequence
  Synthetic
AVQLVESGGGSVQAGGSLRLSCASSG

SEQ ID NO: 8085 - protein, 26 aa, Artificial Sequence
  Synthetic
DVQLVESGGGSVQPGGSLRLSCEVSG

SEQ ID NO: 8086 - protein, 26 aa, Artificial Sequence
  Synthetic
QVKLEESGGGSVQAGGSLRLSCATSG

SEQ ID NO: 8087 - protein, 26 aa, Artificial Sequence
  Synthetic
EVQLVESGGGSVQAGGSLRLSCVLSG

SEQ ID NO: 8088 - protein, 26 aa, Artificial Sequence
  Synthetic
QVQLVESGGGSVQTGGSLRLSCAGSE

SEQ ID NO: 8089 - protein, 26 aa, Artificial Sequence
  Synthetic
AVQLVESGGGSVQAGGSLRLSCAASG

SEQ ID NO: 8090 - protein, 26 aa, Artificial Sequence
  Synthetic
AVQLVESGGGSVPAGGSLKLSCAASG

SEQ ID NO: 8091 - protein, 26 aa, Artificial Sequence
  Synthetic
AVQLVDSGGGSVQAGGSLRLSCAASG

SEQ ID NO: 8092 - protein, 26 aa, Artificial Sequence
  Synthetic
QVQLVESGGGSVQAGGSLRLSCSASG

SEQ ID NO: 8093 - protein, 26 aa, Artificial Sequence
  Synthetic
QVQLVESGGGSVQAGGSLRLSCAASG

SEQ ID NO: 8094 - protein, 26 aa, Artificial Sequence
  Synthetic
QVQLVESGGGSVQAGGSLTLSCAASR

SEQ ID NO: 8095 - protein, 26 aa, Artificial Sequence
  Synthetic
QVQLVESGGGSAQAGGSLRLACGASG

SEQ ID NO: 8096 - protein, 26 aa, Artificial Sequence
  Synthetic
DVQLVESGGGSVQPGGSLRLSCTASG

SEQ ID NO: 8097 - protein, 26 aa, Artificial Sequence
  Synthetic
QVQLVESGGGSVQASGSLRLSCDASE

SEQ ID NO: 8098 - protein, 26 aa, Artificial Sequence
  Synthetic
DVQLVESGGGSVQAGGSLRLSCDASG

SEQ ID NO: 8099 - protein, 26 aa, Artificial Sequence
  Synthetic
EVQLVESGGGSVQAGGSLRLSCAASK

SEQ ID NO: 8100 - protein, 26 aa, Artificial Sequence
  Synthetic
EVQLVESGGGSVHVGGSLRLSCAASG

SEQ ID NO: 8101 - protein, 26 aa, Artificial Sequence
  Synthetic
AVQLVESGGGSVQAGGSLRLSCVLSG

SEQ ID NO: 8102 - protein, 26 aa, Artificial Sequence
  Synthetic
QVQLVESGGGSVEAGGSLRLSCTVSG

SEQ ID NO: 8103 - protein, 26 aa, Artificial Sequence
  Synthetic
EVQLVESGGGSVQAGGSLKLSCSVTG

SEQ ID NO: 8104 - protein, 26 aa, Artificial Sequence
  Synthetic
QVQLVESGGGSVQAGGSLRLSCASSE

SEQ ID NO: 8105 - protein, 26 aa, Artificial Sequence
  Synthetic
QVQLVESGGGSVQAGGSLRLSCAASV

SEQ ID NO: 8106 - protein, 26 aa, Artificial Sequence
  Synthetic
EVQLVESGGGSVQAGGSLRLSCAASG

SEQ ID NO: 8107 - protein, 26 aa, Artificial Sequence
  Synthetic
AVQLVESGGGSVQAGGSLRLSCAASG

SEQ ID NO: 8108 - protein, 26 aa, Artificial Sequence
  Synthetic
QVQLVESGGGSVQAGGSLRLSCAVSG

SEQ ID NO: 8109 - protein, 26 aa, Artificial Sequence
  Synthetic
QVKLEESGGGSVQVGGSLTLSCVVSG

SEQ ID NO: 8110 - protein, 26 aa, Artificial Sequence
  Synthetic
QVQLVESGGGSVQAGGSLRLSCAASG

SEQ ID NO: 8111 - protein, 26 aa, Artificial Sequence
  Synthetic
QVQLVESGGGSVQAGGSLNLACKASQ

SEQ ID NO: 8112 - protein, 26 aa, Artificial Sequence
  Synthetic
QVKLEESGGGSGQAGGSLRLSCASSG

SEQ ID NO: 8113 - protein, 26 aa, Artificial Sequence
  Synthetic
QVQLVESGGASAQAGESLRLSCTASG

SEQ ID NO: 8114 - protein, 26 aa, Artificial Sequence
  Synthetic
AVQLVESGGGSVQAGGSLRLSCAASG

SEQ ID NO: 8115 - protein, 26 aa, Artificial Sequence
  Synthetic
DVQLVESGGGSVEAGGSLRLSCKVSG

SEQ ID NO: 8116 - protein, 26 aa, Artificial Sequence
  Synthetic
QVQLVESGGGLVQAGGSLTLSCAPSG

SEQ ID NO: 8117 - protein, 26 aa, Artificial Sequence
  Synthetic
QVQLVESGGGSVQAGGPLALSCEASG

SEQ ID NO: 8118 - protein, 26 aa, Artificial Sequence
  Synthetic
EVQLVESGGGLVQAGGSLTLSCAASG

SEQ ID NO: 8119 - protein, 26 aa, Artificial Sequence
  Synthetic
QVQLVESGGGSVQAGGSLRLSCSASG

SEQ ID NO: 8120 - protein, 26 aa, Artificial Sequence
  Synthetic
AVQLVESGGGSVQAGGSLKLSCAVSG

SEQ ID NO: 8121 - protein, 26 aa, Artificial Sequence
  Synthetic
DVQLVESGGDSVQAGGSLRLSCAASG

SEQ ID NO: 8122 - protein, 26 aa, Artificial Sequence
  Synthetic
QVQLVESGGGSVQAGGSLRLSCTASG

SEQ ID NO: 8123 - protein, 26 aa, Artificial Sequence
  Synthetic
QVQLVESGGGSVQPGGSLSLSCEVSG

SEQ ID NO: 8124 - protein, 26 aa, Artificial Sequence
  Synthetic
EVQLVESGGGSVQAGGSLRLSCVVSG

SEQ ID NO: 8125 - protein, 26 aa, Artificial Sequence
  Synthetic
QVKLEESGETSVMAGGSLRLSCSVSD

SEQ ID NO: 8126 - protein, 26 aa, Artificial Sequence
  Synthetic
QVQLVESVGDSVQAGGSLRLSCVASG

SEQ ID NO: 8127 - protein, 26 aa, Artificial Sequence
  Synthetic
QVKLEESGGGSVQAGGSLRLSCAASG

SEQ ID NO: 8128 - protein, 26 aa, Artificial Sequence
  Synthetic
AVQLVDSGGGSAQTGGSLRLSCVASG

SEQ ID NO: 8129 - protein, 26 aa, Artificial Sequence
  Synthetic
DVQLVESGGGSVQAGGSLRLSCAASG

SEQ ID NO: 8130 - protein, 26 aa, Artificial Sequence
  Synthetic
EVQLVESGGGSVQAGGSLRLSCAASG

SEQ ID NO: 8131 - protein, 26 aa, Artificial Sequence
  Synthetic
QVQLVESGGGSVQAGGSLRLSCAASG

SEQ ID NO: 8132 - protein, 26 aa, Artificial Sequence
  Synthetic
QVKLEESGGGSVQAGGSLRLSCETSE

SEQ ID NO: 8133 - protein, 26 aa, Artificial Sequence
  Synthetic
DVQLVESGGGSVQAGGSLRLSCVASV

SEQ ID NO: 8134 - protein, 26 aa, Artificial Sequence
  Synthetic
QVQLVESGGGSVQAGGSLRLSCTVSG

SEQ ID NO: 8135 - protein, 26 aa, Artificial Sequence
  Synthetic
QVQLVESGGGSVQTGGSLRLSCTTSG

SEQ ID NO: 8136 - protein, 26 aa, Artificial Sequence
  Synthetic
QVQLVESGGGSVQAGGSLRLACEVSG

SEQ ID NO: 8137 - protein, 26 aa, Artificial Sequence
  Synthetic
QVQLQESGGDSVQAGGSLRLACAASA

SEQ ID NO: 8138 - protein, 26 aa, Artificial Sequence
  Synthetic
QVQLQESGGGSVQAGGSLRLSCAASG

SEQ ID NO: 8139 - protein, 26 aa, Artificial Sequence
  Synthetic
QVQLQESGGGSVQAGGSLRLSCAASG

SEQ ID NO: 8140 - protein, 26 aa, Artificial Sequence
  Synthetic
QVQLRESGPGLVKPSQTISLTCTVSG

SEQ ID NO: 8141 - protein, 26 aa, Artificial Sequence
  Synthetic
QVQPVESGGGSVQAGESLRLSCAASL

SEQ ID NO: 8142 - protein, 19 aa, Artificial Sequence
  Synthetic
GGGSVQAGGSLRLSCAASG

SEQ ID NO: 8143 - protein, 19 aa, Artificial Sequence
  Synthetic
GGGSVQAGGSLRLSCTASG

SEQ ID NO: 8144 - protein, 19 aa, Artificial Sequence
  Synthetic
GGGSVQTGGSLRLSCAVSG

SEQ ID NO: 8145 - protein, 19 aa, Artificial Sequence
  Synthetic
GGGSVQGGGSLRLSCAISG

SEQ ID NO: 8146 - protein, 19 aa, Artificial Sequence
  Synthetic
GGGSVQAGGSLTLSCVYTN

SEQ ID NO: 8147 - protein, 19 aa, Artificial Sequence
  Synthetic
GGGSAQAGGSLRLSCAAHG

SEQ ID NO: 8148 - protein, 19 aa, Artificial Sequence
  Synthetic
GGGSVQPGGSLTLSCTVSG

SEQ ID NO: 8149 - protein, 19 aa, Artificial Sequence
  Synthetic
GGGSVQAGGSLRLSCTGSG

SEQ ID NO: 8150 - protein, 19 aa, Artificial Sequence
  Synthetic
GGGSVQAGGSLRLSCAASD

SEQ ID NO: 8151 - protein, 19 aa, Artificial Sequence
  Synthetic
GGGSVQVGGSLRLSCVAST

SEQ ID NO: 8152 - protein, 19 aa, Artificial Sequence
  Synthetic
GGGSVQVGGSLKLSCKISG

SEQ ID NO: 8153 - protein, 19 aa, Artificial Sequence
  Synthetic
GGGSVQAGGSLRLSCNVSG

SEQ ID NO: 8154 - protein, 19 aa, Artificial Sequence
  Synthetic
GGGSVQAGGSLRLSCASSS

SEQ ID NO: 8155 - protein, 26 aa, Artificial Sequence
  Synthetic
QVQLVESGGGSVQAGGSLRLSCAYSG

SEQ ID NO: 8156 - protein, 26 aa, Artificial Sequence
  Synthetic
QVQLVESGGGSVQAGGSLRLSCAASG

SEQ ID NO: 8157 - protein, 26 aa, Artificial Sequence
  Synthetic
QVQLVASGGGSVQAGGSLRLSCAASG

SEQ ID NO: 8158 - protein, 26 aa, Artificial Sequence
  Synthetic
QVQLVESGGGSVQAGGSLRLSCAASG

SEQ ID NO: 8159 - protein, 26 aa, Artificial Sequence
  Synthetic
QVQLVESGGGTVPAGGSLRLSCAASG

SEQ ID NO: 8160 - protein, 26 aa, Artificial Sequence
  Synthetic
QVQLVESGGGSVQAGGSLSLSCAAST

SEQ ID NO: 8161 - protein, 26 aa, Artificial Sequence
  Synthetic
QVQLVESGGGSVQTGGSLRLSCAASG

SEQ ID NO: 8162 - protein, 26 aa, Artificial Sequence
  Synthetic
QVQLVESGGGSVQAGGSLRLSCAASG

SEQ ID NO: 8163 - protein, 26 aa, Artificial Sequence
  Synthetic
QVQLVESGGGLVQAGGSLRLSCVTSG

SEQ ID NO: 8164 - protein, 26 aa, Artificial Sequence
  Synthetic
DVQLVESGGGSVQAGGSLRLSCAASG

SEQ ID NO: 8165 - protein, 26 aa, Artificial Sequence
  Synthetic
QVQLVESGGGLVQAGGSLRLSCAASG

SEQ ID NO: 8166 - protein, 26 aa, Artificial Sequence
  Synthetic
QVQLVESGGGSVQAGGSLRLSCAASG

SEQ ID NO: 8167 - protein, 26 aa, Artificial Sequence
  Synthetic
QVQLVESGGGSVQAGGSLRLSCSASG

SEQ ID NO: 8168 - protein, 26 aa, Artificial Sequence
  Synthetic
DVQLVESGGGSVQAGGSLRLSCAVSG

SEQ ID NO: 8169 - protein, 26 aa, Artificial Sequence
  Synthetic
QVQLVESGGGSVQAGGSLRLSCTASG

SEQ ID NO: 8170 - protein, 26 aa, Artificial Sequence
  Synthetic
DVQLVESGGGSVQAGESLRLSCAASG

SEQ ID NO: 8171 - protein, 26 aa, Artificial Sequence
  Synthetic
DVQLVESGGGSVQAGGSLRLSCAASG

SEQ ID NO: 8172 - protein, 26 aa, Artificial Sequence
  Synthetic
QVQLVESGGGLVQAGGSLRLSCAASG

SEQ ID NO: 8173 - protein, 26 aa, Artificial Sequence
  Synthetic
QVQLVESGGGLVQPGGSLRLSCAASG

SEQ ID NO: 8174 - protein, 26 aa, Artificial Sequence
  Synthetic
DVQLQESGGGSVQAGGSLRLSCAASG

SEQ ID NO: 8175 - protein, 26 aa, Artificial Sequence
  Synthetic
QVQLQESGGGSVQTGGSLRLSCAASE

SEQ ID NO: 8176 - protein, 26 aa, Artificial Sequence
  Synthetic
QVQLQESGGGSAQTGGSLRLSCAASG

SEQ ID NO: 8177 - protein, 26 aa, Artificial Sequence
  Synthetic
QVQLQESGGGSVQAGGSLRLSCAASG

SEQ ID NO: 8178 - protein, 26 aa, Artificial Sequence
  Synthetic
QVQLQESGGGSVQAGGSLRLSCAASE

SEQ ID NO: 8179 - protein, 26 aa, Artificial Sequence
  Synthetic
QVQLVESGGALVQPGGSLRLSCAASG

SEQ ID NO: 8180 - protein, 26 aa, Artificial Sequence
  Synthetic
QVQLVESGGGLVQAGGSLRLSCAASG

SEQ ID NO: 8181 - protein, 26 aa, Artificial Sequence
  Synthetic
QVQLQESGGGLVQPGGSLRLSCVVSG

SEQ ID NO: 8182 - protein, 26 aa, Artificial Sequence
  Synthetic
QVQLVESGGGSVQAGGSLRLSCTASG

SEQ ID NO: 8183 - protein, 26 aa, Artificial Sequence
  Synthetic
DVQFVESGGGSVHAGGSLRLNCATSG

SEQ ID NO: 8184 - protein, 26 aa, Artificial Sequence
  Synthetic
QVQLQESGGGSVQTGGSLTLSCAASG

SEQ ID NO: 8185 - protein, 26 aa, Artificial Sequence
  Synthetic
QVQLQESGGGSVQAGGSLRLSCAVSE

SEQ ID NO: 8186 - protein, 26 aa, Artificial Sequence
  Synthetic
QVQLQESGGGSVQAGGSLKLTCAASG

SEQ ID NO: 8187 - protein, 26 aa, Artificial Sequence
  Synthetic
DVQLVESGGGSVQAGGSLRLSCAASG

SEQ ID NO: 8188 - protein, 26 aa, Artificial Sequence
  Synthetic
EVQLVESGGGSVQPGGSLRLSCAARG

SEQ ID NO: 8189 - protein, 26 aa, Artificial Sequence
  Synthetic
EVQLVESGGGSVQAGGSLRLSCVASG

SEQ ID NO: 8190 - protein, 26 aa, Artificial Sequence
  Synthetic
EVQLVESGGGSVQAGGSLKLSCGLSG

SEQ ID NO: 8191 - protein, 26 aa, Artificial Sequence
  Synthetic
AVQLVESGGGVVHAGGSLTLSCATSG

SEQ ID NO: 8192 - protein, 26 aa, Artificial Sequence
  Synthetic
AVQLVESGGGSVQTGGSLRLSCVASG

SEQ ID NO: 8193 - protein, 26 aa, Artificial Sequence
  Synthetic
QVQLVESGGGSVQAGGSLRLSCAASG

SEQ ID NO: 8194 - protein, 26 aa, Artificial Sequence
  Synthetic
EVQLVESGGGSVQTGGSLRLSCAASG

SEQ ID NO: 8195 - protein, 26 aa, Artificial Sequence
  Synthetic
DVQLVESGGGSEQAGGSLRLSCAAPN

SEQ ID NO: 8196 - protein, 26 aa, Artificial Sequence
  Synthetic
EVQLVESGGGSVQAGDSLRLSCTTSG

SEQ ID NO: 8197 - protein, 26 aa, Artificial Sequence
  Synthetic
AVQLVESGGGSVQAGGFLRLSCVASV

SEQ ID NO: 8198 - protein, 26 aa, Artificial Sequence
  Synthetic
EVQLVESGGGSVQAGGSLRLSCAAPG

SEQ ID NO: 8199 - protein, 26 aa, Artificial Sequence
  Synthetic
EVQLVESGGDSVQAGGSLRLSCVASS

SEQ ID NO: 8200 - protein, 26 aa, Artificial Sequence
  Synthetic
EVQLVESGGGSVQAGGSLRLSCAASG

SEQ ID NO: 8201 - protein, 26 aa, Artificial Sequence
  Synthetic
QVQLQESGGGSVQAGGSLRLSCAATR

SEQ ID NO: 8202 - protein, 26 aa, Artificial Sequence
  Synthetic
QVQLQESGGGSVQAGGSLRLSCAASG

SEQ ID NO: 8203 - protein, 26 aa, Artificial Sequence
  Synthetic
EVQLVESGGGSVQAGGSLRLSCAASA

SEQ ID NO: 8204 - protein, 26 aa, Artificial Sequence
  Synthetic
EVQLVESGGGSVQAGGSLRLSCAASG

SEQ ID NO: 8205 - protein, 26 aa, Artificial Sequence
  Synthetic
EVQLVESGGGLVQPGESLRLSCAASG

SEQ ID NO: 8206 - protein, 26 aa, Artificial Sequence
  Synthetic
QVQLVQSGGGSVQAGGSLRLSCTASG

SEQ ID NO: 8207 - protein, 26 aa, Artificial Sequence
  Synthetic
EVQLVESGGGSVQAGGSLRLSCAGSG

SEQ ID NO: 8208 - protein, 26 aa, Artificial Sequence
  Synthetic
QVQLVQSGGGSVQAGGSLRLSCAASG

SEQ ID NO: 8209 - protein, 26 aa, Artificial Sequence
  Synthetic
QVQLQESGGGSVQAGGSLRLSCAASG

SEQ ID NO: 8210 - protein, 26 aa, Artificial Sequence
  Synthetic
QVQLVQSGGGSVQAGGSLRLSCAASG

SEQ ID NO: 8211 - protein, 26 aa, Artificial Sequence
  Synthetic
EVQLEESGGGSVQAGGSLSLSCAASG

SEQ ID NO: 8212 - protein, 26 aa, Artificial Sequence
  Synthetic
QVQLVQSGGGSVQAGGSLRLSCAASG

SEQ ID NO: 8213 - protein, 26 aa, Artificial Sequence
  Synthetic
QVQLVQSGGGSVQAGGSLRLACAASG

SEQ ID NO: 8214 - protein, 26 aa, Artificial Sequence
  Synthetic
QVQLQESGGGSVQAGGSLRLSCVASG

SEQ ID NO: 8215 - protein, 26 aa, Artificial Sequence
  Synthetic
QVQLQESGGGSVQAGGSLRLSCVASR

SEQ ID NO: 8216 - protein, 26 aa, Artificial Sequence
  Synthetic
QVQLQESGGGSCRLEGLLKLSCTASM

SEQ ID NO: 8217 - protein, 26 aa, Artificial Sequence
  Synthetic
QVQLVQSEGGSVQAGGSLRLSCAASG

SEQ ID NO: 8218 - protein, 26 aa, Artificial Sequence
  Synthetic
EVQLVESGGGSVQAGGSLRLSCAASK

SEQ ID NO: 8219 - protein, 26 aa, Artificial Sequence
  Synthetic
QVKLEESGGGSVQAGGSLKLSCAASG

SEQ ID NO: 8220 - protein, 26 aa, Artificial Sequence
  Synthetic
QVQLVESGGGSVQAGGSLKLSCVGSG

SEQ ID NO: 8221 - protein, 26 aa, Artificial Sequence
  Synthetic
QVQLVESGGGSVQAGGSLRLSCTASG

SEQ ID NO: 8222 - protein, 26 aa, Artificial Sequence
  Synthetic
QVQLVESGGGSVQAGGSLRLSCTASG

SEQ ID NO: 8223 - protein, 26 aa, Artificial Sequence
  Synthetic
QVQLVESGGGSVQAGGSLRLSCVASG

SEQ ID NO: 8224 - protein, 26 aa, Artificial Sequence
  Synthetic
DCQLVESGGGSVQAGGSLRLSCAASG

SEQ ID NO: 8225 - protein, 26 aa, Artificial Sequence
  Synthetic
EVQLVESGGGSVQAGGSLRLSCTASG

SEQ ID NO: 8226 - protein, 26 aa, Artificial Sequence
  Synthetic
DVQLVESGGGSVQAGGSLRLSCAASG

SEQ ID NO: 8227 - protein, 26 aa, Artificial Sequence
  Synthetic
QVKLEESGGGSVQAGGSLRLSCTASG

SEQ ID NO: 8228 - protein, 26 aa, Artificial Sequence
  Synthetic
DVQLVESGGGSVQAGGSLRLSCTISG

SEQ ID NO: 8229 - protein, 26 aa, Artificial Sequence
  Synthetic
EVQLVESGGGSGQAGDSLRLSCATSG

SEQ ID NO: 8230 - protein, 26 aa, Artificial Sequence
  Synthetic
DVQLVESGGGSVQAGGSLRLSCAASG

SEQ ID NO: 8231 - protein, 26 aa, Artificial Sequence
  Synthetic
EVQLVESGGGSVQAGGSLRLSCAASG

SEQ ID NO: 8232 - protein, 26 aa, Artificial Sequence
  Synthetic
QVQLVESGGGSVQAGGSLRLSCTASG

SEQ ID NO: 8233 - protein, 26 aa, Artificial Sequence
  Synthetic
AVQLVDSGGGSVQAGGSLRLSCAASG

SEQ ID NO: 8234 - protein, 26 aa, Artificial Sequence
  Synthetic
DVQLVESGGGSVQAGGSLRLSCVVSG

SEQ ID NO: 8235 - protein, 26 aa, Artificial Sequence
  Synthetic
QVQLVESGGGSVESGESLTLSCTADA

SEQ ID NO: 8236 - protein, 26 aa, Artificial Sequence
  Synthetic
EVQLVVSGGGSVQAGGSLRLSCAASG

SEQ ID NO: 8237 - protein, 26 aa, Artificial Sequence
  Synthetic
QVQLVESGGGSVQAGGSLKLSCAASG

SEQ ID NO: 8238 - protein, 26 aa, Artificial Sequence
  Synthetic
QVQLVESGGESVEAGGSLRLSCVSSG

SEQ ID NO: 8239 - protein, 26 aa, Artificial Sequence
  Synthetic
EVQLVESGGGSVEAGGSLRLSCAAAT

SEQ ID NO: 8240 - protein, 26 aa, Artificial Sequence
  Synthetic
DVQLVESGGGSVEAGGSLRLSCVASF

SEQ ID NO: 8241 - protein, 26 aa, Artificial Sequence
  Synthetic
QVKLEESGGGSVEAGGSLTLSCTAPE

SEQ ID NO: 8242 - protein, 26 aa, Artificial Sequence
  Synthetic
QVQLVESGGGSVQAGGSLTLSCKNTV

SEQ ID NO: 8243 - protein, 26 aa, Artificial Sequence
  Synthetic
AVQLVESGGGSVQAGGSLSLSCAAFG

SEQ ID NO: 8244 - protein, 26 aa, Artificial Sequence
  Synthetic
AVQLVESGGGSVQSGQSLRLSCTVFR

SEQ ID NO: 8245 - protein, 26 aa, Artificial Sequence
  Synthetic
QVKLEESGGGSVQAGGSLRLSCKRSG

SEQ ID NO: 8246 - protein, 26 aa, Artificial Sequence
  Synthetic
AVQLVESGGGSVQAGESLKLSCTASL

SEQ ID NO: 8247 - protein, 26 aa, Artificial Sequence
  Synthetic
EVQLVESGGGSVQIGGSLRLSCAASG

SEQ ID NO: 8248 - protein, 26 aa, Artificial Sequence
  Synthetic
AVQLVESGGGSVQAGGSLRLSCTASG

SEQ ID NO: 8249 - protein, 26 aa, Artificial Sequence
  Synthetic
EVQLVESGGGSVQAGGSLRLSCAASG

SEQ ID NO: 8250 - protein, 26 aa, Artificial Sequence
  Synthetic
QVKLEESGGGSVQAGGSLRLSCAASG

SEQ ID NO: 8251 - protein, 26 aa, Artificial Sequence
  Synthetic
AVQLVESGGASVETGGSLRLSCAVSG

SEQ ID NO: 8252 - protein, 26 aa, Artificial Sequence
  Synthetic
AVQLVESGGGSVQAGGSLRLSCVASP

SEQ ID NO: 8253 - protein, 26 aa, Artificial Sequence
  Synthetic
QVKLEESGGGSVQTGGSLRLSCVASE

SEQ ID NO: 8254 - protein, 26 aa, Artificial Sequence
  Synthetic
AVQLVESGGGSVQPGESLRLSCLVSG

SEQ ID NO: 8255 - protein, 26 aa, Artificial Sequence
  Synthetic
QVQLVESGGGSVQAGGSLRLSCIASG

SEQ ID NO: 8256 - protein, 26 aa, Artificial Sequence
  Synthetic
EVQLVESGGGSVQAGGSLRLSCAVSG

SEQ ID NO: 8257 - protein, 26 aa, Artificial Sequence
  Synthetic
EVQLVESGGGSVQAGGSLRLSCVASE

SEQ ID NO: 8258 - protein, 26 aa, Artificial Sequence
  Synthetic
QVQLVESGGGSVQAGGSLRLSCAASG

SEQ ID NO: 8259 - protein, 26 aa, Artificial Sequence
  Synthetic
QVQLVESGGGSVQAGGSLRLSCAASG

SEQ ID NO: 8260 - protein, 26 aa, Artificial Sequence
  Synthetic
EVQLVESGGGSVQAGGSLRLSCAASG

SEQ ID NO: 8261 - protein, 26 aa, Artificial Sequence
  Synthetic
AVQLVESGGGSVQAGGSLRLSCAASG

SEQ ID NO: 8262 - protein, 26 aa, Artificial Sequence
  Synthetic
QVKLEESGGGSVQAGGSLRLSCAASG

SEQ ID NO: 8263 - protein, 26 aa, Artificial Sequence
  Synthetic
QVQLVESGGGSVQAGGSLRLSCVASG

SEQ ID NO: 8264 - protein, 26 aa, Artificial Sequence
  Synthetic
QVQLVESGGGSVQAGGSLRLSCTAPG

SEQ ID NO: 8265 - protein, 26 aa, Artificial Sequence
  Synthetic
QVQLVESGGGSVQAGGSLRLSCAVSG

SEQ ID NO: 8266 - protein, 26 aa, Artificial Sequence
  Synthetic
EVQLVESGGGSVQAGGSLRLSCETLE

SEQ ID NO: 8267 - protein, 26 aa, Artificial Sequence
  Synthetic
EVQLVESGGGSVHAGGSLRLSCTTSG

SEQ ID NO: 8268 - protein, 26 aa, Artificial Sequence
  Synthetic
DVQLVESGGGSVHAGGSLRLSCAVSG

SEQ ID NO: 8269 - protein, 26 aa, Artificial Sequence
  Synthetic
EVQLVESGGGSVQAGGSLRLSCTTSN

SEQ ID NO: 8270 - protein, 26 aa, Artificial Sequence
  Synthetic
DVQLVESGGGSVQAGGSLRLSCAASG

SEQ ID NO: 8271 - protein, 26 aa, Artificial Sequence
  Synthetic
AVQLVESGGGSVQAGGSLRLSCVTAG

SEQ ID NO: 8272 - protein, 26 aa, Artificial Sequence
  Synthetic
DVQLVESGGGSVQAGGSLRLSCAASG

SEQ ID NO: 8273 - protein, 26 aa, Artificial Sequence
  Synthetic
QVQLVESGGGSVQAGGSLRLSCSVSG

SEQ ID NO: 8274 - protein, 26 aa, Artificial Sequence
  Synthetic
QVQLVESGGDSVQAGGSLRLSCAASG

SEQ ID NO: 8275 - protein, 26 aa, Artificial Sequence
  Synthetic
EVQLVESGGGSVQAGGSLRLSCVVSG

SEQ ID NO: 8276 - protein, 26 aa, Artificial Sequence
  Synthetic
AVQLVESGGGSVQDGGSLRLSCVVSG

SEQ ID NO: 8277 - protein, 26 aa, Artificial Sequence
  Synthetic
QVKLEESGGGSVQAGGSLRLSCAASG

SEQ ID NO: 8278 - protein, 26 aa, Artificial Sequence
  Synthetic
AVQLVESGGGSVQAGGSLRLSCVASG

SEQ ID NO: 8279 - protein, 26 aa, Artificial Sequence
  Synthetic
QVQLVESGGGSVQAGGSLRLSCVASG

SEQ ID NO: 8280 - protein, 26 aa, Artificial Sequence
  Synthetic
QVQLVESGGGSVQAGGSLRLSCVASG

SEQ ID NO: 8281 - protein, 26 aa, Artificial Sequence
  Synthetic
QVQLVESGGGSVQAGGSLRLSCVASA

SEQ ID NO: 8282 - protein, 26 aa, Artificial Sequence
  Synthetic
QVQLVESGGGSVQAGGSLRLSCVVSG

SEQ ID NO: 8283 - protein, 26 aa, Artificial Sequence
  Synthetic
QVQLVESGGGSVQAGGSLRLSCLRSG

SEQ ID NO: 8284 - protein, 26 aa, Artificial Sequence
  Synthetic
EVQLVESGGGSVVAGGNLRLSCVASG

SEQ ID NO: 8285 - protein, 26 aa, Artificial Sequence
  Synthetic
EVQLVESGGGSVQAGGSLRLSCVASG

SEQ ID NO: 8286 - protein, 26 aa, Artificial Sequence
  Synthetic
AVQLVESGGGSVQAGGSLRLSCVLSG

SEQ ID NO: 8287 - protein, 26 aa, Artificial Sequence
  Synthetic
AVQLVDSGGDSVQAGGSLRLSCVASG

SEQ ID NO: 8288 - protein, 26 aa, Artificial Sequence
  Synthetic
AVQLVESGGGSVPAGGSLRLSCAASG

SEQ ID NO: 8289 - protein, 26 aa, Artificial Sequence
  Synthetic
EVQLVESGGGSVQAGGSLRLSCVASE

SEQ ID NO: 8290 - protein, 26 aa, Artificial Sequence
  Synthetic
EVPLVESGGGLVQAGGSLRLSCVASG

SEQ ID NO: 8291 - protein, 26 aa, Artificial Sequence
  Synthetic
AVQLVESGGGSVQGGGSLTLSCVASG

SEQ ID NO: 8292 - protein, 26 aa, Artificial Sequence
  Synthetic
AVQLVDSGGGSVQAGGSLRLTCAVSG

SEQ ID NO: 8293 - protein, 26 aa, Artificial Sequence
  Synthetic
EVQLVESGGDSVQTGGSLRLSCVNSA

SEQ ID NO: 8294 - protein, 26 aa, Artificial Sequence
  Synthetic
DVQLVESGGGSVQAGGSLRLSCTAST

SEQ ID NO: 8295 - protein, 26 aa, Artificial Sequence
  Synthetic
QVQLVESGGGSVQAGGSLRLSCVNSV

SEQ ID NO: 8296 - protein, 26 aa, Artificial Sequence
  Synthetic
QVKLEESGGGSVQAGGSLRLSCATSG

SEQ ID NO: 8297 - protein, 26 aa, Artificial Sequence
  Synthetic
AVQLVESGGGPVQAGGSLTLSCAASG

SEQ ID NO: 8298 - protein, 26 aa, Artificial Sequence
  Synthetic
AVQLVESGGGSVQAGGSLRLSCEASG

SEQ ID NO: 8299 - protein, 26 aa, Artificial Sequence
  Synthetic
AVQLVESGGGSVQAGGSLRLSCAASG

SEQ ID NO: 8300 - protein, 26 aa, Artificial Sequence
  Synthetic
DVQLVESGGGLVQPGGSLRLSCAASG

SEQ ID NO: 8301 - protein, 26 aa, Artificial Sequence
  Synthetic
EVQLVESGGGSVQAGESLRLSCAASG

SEQ ID NO: 8302 - protein, 26 aa, Artificial Sequence
  Synthetic
EVQLVESGGGSVQAGGSLRLSCAASG

SEQ ID NO: 8303 - protein, 26 aa, Artificial Sequence
  Synthetic
AVQLVDSGGGLVQPGGSLRLTCLASG

SEQ ID NO: 8304 - protein, 26 aa, Artificial Sequence
  Synthetic
QVQLVESGGDLVPPGGSLRLSCAASG

SEQ ID NO: 8305 - protein, 26 aa, Artificial Sequence
  Synthetic
DVQLQASGGGLVQAGGSLRLSCTASG

SEQ ID NO: 8306 - protein, 26 aa, Artificial Sequence
  Synthetic
DVQLQASGGGLVQAGESLRLSCGGFG

SEQ ID NO: 8307 - protein, 26 aa, Artificial Sequence
  Synthetic
DVQLQASGGGLVQAGDSLRLSCTASG

SEQ ID NO: 8308 - protein, 26 aa, Artificial Sequence
  Synthetic
DVQLQASGGGVVQPGGSLRLSCAASG

SEQ ID NO: 8309 - protein, 26 aa, Artificial Sequence
  Synthetic
DVQLQASGGGLVQAGASLRLSCAASG

SEQ ID NO: 8310 - protein, 26 aa, Artificial Sequence
  Synthetic
DVQLQASGGGLVAVGDSLRLTCMASG

SEQ ID NO: 8311 - protein, 26 aa, Artificial Sequence
  Synthetic
DVQLQASGGGKVQAGDSLRLSCAASE

SEQ ID NO: 8312 - protein, 26 aa, Artificial Sequence
  Synthetic
DVQLQASGGGTVQPGASLKLACKVSG

SEQ ID NO: 8313 - protein, 26 aa, Artificial Sequence
  Synthetic
EVQLQASGGGLVQPGGSLRLSCAASG

SEQ ID NO: 8314 - protein, 26 aa, Artificial Sequence
  Synthetic
DAQLQASGGGLVHAGGSLRLSCAASG

SEQ ID NO: 8315 - protein, 26 aa, Artificial Sequence
  Synthetic
DVQLQASGGGSVQAGDSLTLSCAASG

SEQ ID NO: 8316 - protein, 26 aa, Artificial Sequence
  Synthetic
DVQLQASGGGLVQAGASLRLSCAASG

SEQ ID NO: 8317 - protein, 26 aa, Artificial Sequence
  Synthetic
QVKLQESGGGLVQAGASLRLSCVDSG

SEQ ID NO: 8318 - protein, 26 aa, Artificial Sequence
  Synthetic
QVKLHSSGGGSVQPGGSLTLTCSASG

SEQ ID NO: 8319 - protein, 26 aa, Artificial Sequence
  Synthetic
QVQLQESGGGMVQLGGSLKLSCVASG

SEQ ID NO: 8320 - protein, 26 aa, Artificial Sequence
  Synthetic
DVQLQASGGGLVQPGGSLSLSCAASG

SEQ ID NO: 8321 - protein, 26 aa, Artificial Sequence
  Synthetic
QVKLQQSGGGLVQAGGSLRLSCAASG

SEQ ID NO: 8322 - protein, 26 aa, Artificial Sequence
  Synthetic
QVKLQESGGRLVQAGGSLRLSCAASG

SEQ ID NO: 8323 - protein, 19 aa, Artificial Sequence
  Synthetic
GGGLVQAGGSLRLSCAASG

SEQ ID NO: 8324 - protein, 26 aa, Artificial Sequence
  Synthetic
EVQLVESGGGLVQPGGSLRLSCSFPG

SEQ ID NO: 8325 - protein, 26 aa, Artificial Sequence
  Synthetic
EVQLVESGGELVQAGGSLRLSCAASG

SEQ ID NO: 8326 - protein, 26 aa, Artificial Sequence
  Synthetic
EVQLVESGGGLVQPGESLTLSCVVAG

SEQ ID NO: 8327 - protein, 26 aa, Artificial Sequence
  Synthetic
EVQLVESGGGLVQPGGSLTLSCVAAG

SEQ ID NO: 8328 - protein, 26 aa, Artificial Sequence
  Synthetic
EVQLVESGGGLVQAGGSLRLSCTSST

SEQ ID NO: 8329 - protein, 26 aa, Artificial Sequence
  Synthetic
EVQLVESGGGFVQAGESLTLSCTSST

SEQ ID NO: 8330 - protein, 26 aa, Artificial Sequence
  Synthetic
EVQLVESGGGLVQAGDSLTLTCTSPT

SEQ ID NO: 8331 - protein, 26 aa, Artificial Sequence
  Synthetic
EVQLVESGGGLVQAGGSLTLSCTSST

SEQ ID NO: 8332 - protein, 26 aa, Artificial Sequence
  Synthetic
EVQLVESGGGLVQPGGSLRLSCQFSG

SEQ ID NO: 8333 - protein, 26 aa, Artificial Sequence
  Synthetic
QVKLEESGGGLVQAGDSLRVSCAASG

SEQ ID NO: 8334 - protein, 26 aa, Artificial Sequence
  Synthetic
QVQLVESGGGLVQAGDSLRLSCVDSG

SEQ ID NO: 8335 - protein, 26 aa, Artificial Sequence
  Synthetic
QVQLVESGGGLVQAGGSLTLSCAASG

SEQ ID NO: 8336 - protein, 26 aa, Artificial Sequence
  Synthetic
QVQLVESGGGLVQPGGSLRLPCAASG

SEQ ID NO: 8337 - protein, 26 aa, Artificial Sequence
  Synthetic
QVKLEESGGGLVQPGGSLRLSCAASV

SEQ ID NO: 8338 - protein, 26 aa, Artificial Sequence
  Synthetic
QVKLEESGGGLVQVGGSLRLSCAHSG

SEQ ID NO: 8339 - protein, 26 aa, Artificial Sequence
  Synthetic
QVQLEESGGGLVQAGGSLRLSCAASG

SEQ ID NO: 8340 - protein, 26 aa, Artificial Sequence
  Synthetic
EVQLQASGGGLVQAGDSLRLSCEAAR

SEQ ID NO: 8341 - protein, 26 aa, Artificial Sequence
  Synthetic
EVQLQASGGGLVQAGGSLRLSCAASG

SEQ ID NO: 8342 - protein, 26 aa, Artificial Sequence
  Synthetic
EVQLQASGGGLVQAGDSLRLSCEAAR

SEQ ID NO: 8343 - protein, 26 aa, Artificial Sequence
  Synthetic
DVQLQASGGGLVQPGGSLKLSCAASG

SEQ ID NO: 8344 - protein, 25 aa, Artificial Sequence
  Synthetic
EVQQASGGGLVQAGGSLRLSCAASG

SEQ ID NO: 8345 - protein, 26 aa, Artificial Sequence
  Synthetic
EVQLQASGGGLVQAGDSLRLSCEAAR

SEQ ID NO: 8346 - protein, 19 aa, Artificial Sequence
  Synthetic
GGGLVQAGGSLRLSCVASG

SEQ ID NO: 8347 - protein, 26 aa, Artificial Sequence
  Synthetic
QVQLQDSGGGLVQAGGSLRLSCEASG

SEQ ID NO: 8348 - protein, 26 aa, Artificial Sequence
  Synthetic
QVQLVQSGGGLVQAGGSLRLSCAASG

SEQ ID NO: 8349 - protein, 26 aa, Artificial Sequence
  Synthetic
QVQLVQSGGGLVQPGGSLRLSCTASG

SEQ ID NO: 8350 - protein, 26 aa, Artificial Sequence
  Synthetic
EVQLQASGGGLVQAGGSLRLSCAASG

SEQ ID NO: 8351 - protein, 26 aa, Artificial Sequence
  Synthetic
EVQLQASGGGLVQPGGSLRLSCAASG

SEQ ID NO: 8352 - protein, 26 aa, Artificial Sequence
  Synthetic
DVQLQASGGGLVQPGGSLRLSCAASG

SEQ ID NO: 8353 - protein, 26 aa, Artificial Sequence
  Synthetic
EVQLQASGGGLVQAGGSLRLSCAASG

SEQ ID NO: 8354 - protein, 26 aa, Artificial Sequence
  Synthetic
DVQLQASGGGLVQAGGSLRLSCAASG

SEQ ID NO: 8355 - protein, 26 aa, Artificial Sequence
  Synthetic
EVQLQASGGGLVQAGGSLRLSCAASG

SEQ ID NO: 8356 - protein, 26 aa, Artificial Sequence
  Synthetic
EVQLQASGGGLVQAGGSLRLSCAASG

SEQ ID NO: 8357 - protein, 26 aa, Artificial Sequence
  Synthetic
DVQLQASGGGLVQAGGSLRLSCAASG

SEQ ID NO: 8358 - protein, 26 aa, Artificial Sequence
  Synthetic
EVQLQASGGGLVQAGGSLRLSCAASG

SEQ ID NO: 8359 - protein, 26 aa, Artificial Sequence
  Synthetic
QVQLQESGGGLVQAGGSLRLSCEASG

SEQ ID NO: 8360 - protein, 26 aa, Artificial Sequence
  Synthetic
QVQLQESGGGLVQPGGSLRLSCTASG

SEQ ID NO: 8361 - protein, 26 aa, Artificial Sequence
  Synthetic
QVQLQESGGGLVQAGGSLRLSCAASG

SEQ ID NO: 8362 - protein, 26 aa, Artificial Sequence
  Synthetic
QVQLQESGGGLVQAGGSLRLSCAASG

SEQ ID NO: 8363 - protein, 26 aa, Artificial Sequence
  Synthetic
EVQLVESGGGLVQPGGSLRLSCAASR

SEQ ID NO: 8364 - protein, 26 aa, Artificial Sequence
  Synthetic
EVQLVESGGGLVQAGGSLRLSCAASG

SEQ ID NO: 8365 - protein, 26 aa, Artificial Sequence
  Synthetic
QVQLQESGGGLVQPGGSLKLSCAASG

SEQ ID NO: 8366 - protein, 26 aa, Artificial Sequence
  Synthetic
EVQLQASGGGLVQAGGSLRLSCAASG

SEQ ID NO: 8367 - protein, 26 aa, Artificial Sequence
  Synthetic
EVQLQASGGGLVQAGGSLRLSCAASG

SEQ ID NO: 8368 - protein, 26 aa, Artificial Sequence
  Synthetic
EVHLQASGGGLVQEGGSLRLSCAASG

SEQ ID NO: 8369 - protein, 26 aa, Artificial Sequence
  Synthetic
QVKLEESGGGLVQAGGSRRLSCATSG

SEQ ID NO: 8370 - protein, 26 aa, Artificial Sequence
  Synthetic
QVKLEESGGGLVQAGGSLRVSCTASV

SEQ ID NO: 8371 - protein, 26 aa, Artificial Sequence
  Synthetic
QVQLVESGGGLVQAGGSLRLSCAASG

SEQ ID NO: 8372 - protein, 26 aa, Artificial Sequence
  Synthetic
QVQLVESGGGLVQPGASLRLSCAASR

SEQ ID NO: 8373 - protein, 26 aa, Artificial Sequence
  Synthetic
QVQLVESGGGLVQPGGSLRLSCAASR

SEQ ID NO: 8374 - protein, 26 aa, Artificial Sequence
  Synthetic
EVQLVESGGGLVQAGGSLRLSCAASG

SEQ ID NO: 8375 - protein, 26 aa, Artificial Sequence
  Synthetic
EVQLVESGGGLVQPGGSLRLSCAASG

SEQ ID NO: 8376 - protein, 26 aa, Artificial Sequence
  Synthetic
EVQLVESGGGLVQPGGSLRLSCAASG

SEQ ID NO: 8377 - protein, 26 aa, Artificial Sequence
  Synthetic
EVQLVESGGGLVQAGGSLRLSCAASS

SEQ ID NO: 8378 - protein, 26 aa, Artificial Sequence
  Synthetic
EVQLVESGGGTVKAGGSLRLSCAAPR

SEQ ID NO: 8379 - protein, 26 aa, Artificial Sequence
  Synthetic
EVQLVESGGGLVQPGGSLRLSCAASG

SEQ ID NO: 8380 - protein, 26 aa, Artificial Sequence
  Synthetic
QVKLQESGGGSVQEGGSLRLSCAASG

SEQ ID NO: 8381 - protein, 26 aa, Artificial Sequence
  Synthetic
EVQLVESGGGLVQAGGSLRLSCAPSE

SEQ ID NO: 8382 - protein, 26 aa, Artificial Sequence
  Synthetic
EVQLVESGGGLVQTGGSLRLSCARSG

SEQ ID NO: 8383 - protein, 26 aa, Artificial Sequence
  Synthetic
EVQLVESGGGLVQAGGSLRLSCAASG

SEQ ID NO: 8384 - protein, 26 aa, Artificial Sequence
  Synthetic
EVQLVESGGGLVQAGGSLRLSCAASG

SEQ ID NO: 8385 - protein, 26 aa, Artificial Sequence
  Synthetic
EVQLVESGGGLVQAGGSLRLSCAASG

SEQ ID NO: 8386 - protein, 26 aa, Artificial Sequence
  Synthetic
EVQLVKSGGGLVQVGGSLRLSCAASG

SEQ ID NO: 8387 - protein, 26 aa, Artificial Sequence
  Synthetic
EVQLVESGGGLVQAGGSLRLSCATSG

SEQ ID NO: 8388 - protein, 26 aa, Artificial Sequence
  Synthetic
EVQLVESGGGLVQPGGSLRLSCAASG

SEQ ID NO: 8389 - protein, 26 aa, Artificial Sequence
  Synthetic
EVQLVESGGALVQAGDSLRVSCVASG

SEQ ID NO: 8390 - protein, 26 aa, Artificial Sequence
  Synthetic
EVQLVKSGGGLVQAGGSLRLSCAASG

SEQ ID NO: 8391 - protein, 26 aa, Artificial Sequence
  Synthetic
EVQLVESRGGTVQAGGSLRLSCAASG

SEQ ID NO: 8392 - protein, 26 aa, Artificial Sequence
  Synthetic
EVQLVESGGGFVQAGGSLRLSCAASV

SEQ ID NO: 8393 - protein, 26 aa, Artificial Sequence
  Synthetic
EVQLVESGGGLVQAGGSLRLACAASG

SEQ ID NO: 8394 - protein, 26 aa, Artificial Sequence
  Synthetic
EVQLVESGGGLVQTGGSLRLSCAASG

SEQ ID NO: 8395 - protein, 26 aa, Artificial Sequence
  Synthetic
EVQLVESGGGLVQAGGSLRLSCAASG

SEQ ID NO: 8396 - protein, 26 aa, Artificial Sequence
  Synthetic
EVQLVESGGGLVQPGGSLRLSCAASG

SEQ ID NO: 8397 - protein, 26 aa, Artificial Sequence
  Synthetic
EVQLVESGGGLVQAGGSLRLSCEASG

SEQ ID NO: 8398 - protein, 26 aa, Artificial Sequence
  Synthetic
EVQLVESGGGLVQAGGSLRLSCAASG

SEQ ID NO: 8399 - protein, 26 aa, Artificial Sequence
  Synthetic
EVQLVESGGGLVQAGGSLRLSCAASG

SEQ ID NO: 8400 - protein, 26 aa, Artificial Sequence
  Synthetic
EVQLVESGGGLVQAGGSLRLSCVVSG

SEQ ID NO: 8401 - protein, 26 aa, Artificial Sequence
  Synthetic
EVQLVESGGGSVQAGGSLRLSCAASG

SEQ ID NO: 8402 - protein, 26 aa, Artificial Sequence
  Synthetic
EVQLVESGGGLVQPGGSLRLSCAASG

SEQ ID NO: 8403 - protein, 26 aa, Artificial Sequence
  Synthetic
EVQLVESGGGLVQAGGSLRLSCAASG

SEQ ID NO: 8404 - protein, 26 aa, Artificial Sequence
  Synthetic
EVQLVESGGGSVQAGGSLRLSCAASG

SEQ ID NO: 8405 - protein, 26 aa, Artificial Sequence
  Synthetic
KVKLQESGGGAVEIGGSLRLSCVASG

SEQ ID NO: 8406 - protein, 26 aa, Artificial Sequence
  Synthetic
EVQLVESGGGLVQAGGSLRLTCAASG

SEQ ID NO: 8407 - protein, 26 aa, Artificial Sequence
  Synthetic
EVQLVESGGGLVQAGGSLRLSCAASG

SEQ ID NO: 8408 - protein, 26 aa, Artificial Sequence
  Synthetic
EVQLVESGGGLVQAGGSLRLSCAASG

SEQ ID NO: 8409 - protein, 26 aa, Artificial Sequence
  Synthetic
EVQLVESGGGLVQAGGSLRLSCVASG

SEQ ID NO: 8410 - protein, 26 aa, Artificial Sequence
  Synthetic
EVQLVESGGGLVQAGDSLRLSCAASG

SEQ ID NO: 8411 - protein, 26 aa, Artificial Sequence
  Synthetic
EVQLVESGGGLVQAGGSLRLSCAASG

SEQ ID NO: 8412 - protein, 26 aa, Artificial Sequence
  Synthetic
EVQLVESGGGLVQAGGSLRLSCAASG

SEQ ID NO: 8413 - protein, 26 aa, Artificial Sequence
  Synthetic
EVQLVESGGGVVQTGGSLRLSCAASG

SEQ ID NO: 8414 - protein, 26 aa, Artificial Sequence
  Synthetic
EVQLVESGGGLVQAGDSLRLSCAASG

SEQ ID NO: 8415 - protein, 26 aa, Artificial Sequence
  Synthetic
EVQLVESGGGLVQTGGSLRLSCAASG

SEQ ID NO: 8416 - protein, 26 aa, Artificial Sequence
  Synthetic
EVQLVESGGGVVQAGGSLRLSCAASG

SEQ ID NO: 8417 - protein, 26 aa, Artificial Sequence
  Synthetic
EVQLVESGGGLVQAGGSLRLSCAASG

SEQ ID NO: 8418 - protein, 26 aa, Artificial Sequence
  Synthetic
EVQLVESGGALVQAGDSLRVSCVASG

SEQ ID NO: 8419 - protein, 26 aa, Artificial Sequence
  Synthetic
EVQLVESGGGLVQAGDSLRLSCAASG

SEQ ID NO: 8420 - protein, 26 aa, Artificial Sequence
  Synthetic
EVQLVESGGGLVQSGDSLRLSCAASG

SEQ ID NO: 8421 - protein, 26 aa, Artificial Sequence
  Synthetic
EVQLVESGGGLVQVGASLRLSCRASG

SEQ ID NO: 8422 - protein, 26 aa, Artificial Sequence
  Synthetic
QVQLQESGGGLVQPGGSLRLSCAASG

SEQ ID NO: 8423 - protein, 26 aa, Artificial Sequence
  Synthetic
QVKLQQSGGGSVQEGGSLRLSCASSG

SEQ ID NO: 8424 - protein, 26 aa, Artificial Sequence
  Synthetic
KVKLQESGGGLVRAGESLTLACAASG

SEQ ID NO: 8425 - protein, 26 aa, Artificial Sequence
  Synthetic
QVKLQESGGGLVQAGGSLRLSCAASG

SEQ ID NO: 8426 - protein, 26 aa, Artificial Sequence
  Synthetic
EVKLQESGGGSVQAGGSLRLSCTASG

SEQ ID NO: 8427 - protein, 26 aa, Artificial Sequence
  Synthetic
KVQLQESGGGLVQAGGSLRLSCAASG

SEQ ID NO: 8428 - protein, 26 aa, Artificial Sequence
  Synthetic
KVQLQQSGGGSVTPGGSLRLSCAASG

SEQ ID NO: 8429 - protein, 26 aa, Artificial Sequence
  Synthetic
KVQLQESGGGLVQSGGSLTLSCAATG

SEQ ID NO: 8430 - protein, 26 aa, Artificial Sequence
  Synthetic
KVQLQESGGGLVQAGGSLRLSCAASG

SEQ ID NO: 8431 - protein, 26 aa, Artificial Sequence
  Synthetic
KVQLQESGGGLVQVGGSLRLSCKASG

SEQ ID NO: 8432 - protein, 26 aa, Artificial Sequence
  Synthetic
QVQLQESGGGLVQPGGSLRLSCTASG

SEQ ID NO: 8433 - protein, 23 aa, Artificial Sequence
  Synthetic
LQESGGRLVEAGGSLRLSCAVSG

SEQ ID NO: 8434 - protein, 23 aa, Artificial Sequence
  Synthetic
LQESGGRLVEAGGSLRLSCLVSG

SEQ ID NO: 8435 - protein, 23 aa, Artificial Sequence
  Synthetic
LQESGGRLVEAGGSLRLSCLVSG

SEQ ID NO: 8436 - protein, 23 aa, Artificial Sequence
  Synthetic
LQESGGGLVQPGGSLRLSCVASG

SEQ ID NO: 8437 - protein, 23 aa, Artificial Sequence
  Synthetic
LQESGGGLVQAGGSLRLSCTTSG

SEQ ID NO: 8438 - protein, 23 aa, Artificial Sequence
  Synthetic
LQESGGGLVPPGGSLRLSCAASE

SEQ ID NO: 8439 - protein, 23 aa, Artificial Sequence
  Synthetic
LQESGGGLVQAGGSLRLSCAASG

SEQ ID NO: 8440 - protein, 23 aa, Artificial Sequence
  Synthetic
LQESGGGLVQPGGSLRLSCAASG

SEQ ID NO: 8441 - protein, 23 aa, Artificial Sequence
  Synthetic
LQESGGGLVQAGDSLRLSCAASG

SEQ ID NO: 8442 - protein, 23 aa, Artificial Sequence
  Synthetic
LQESGGGLVQAGGSLRLSCVASG

SEQ ID NO: 8443 - protein, 23 aa, Artificial Sequence
  Synthetic
LQESGGGLVQAGGSLGLSCAASG

SEQ ID NO: 8444 - protein, 23 aa, Artificial Sequence
  Synthetic
LQESGGGLVQAGGSLRLSCAASG

SEQ ID NO: 8445 - protein, 23 aa, Artificial Sequence
  Synthetic
LQESGGGLVQPGGSLRLSCVASG

SEQ ID NO: 8446 - protein, 23 aa, Artificial Sequence
  Synthetic
LQESGGSLVQPGGSLRLSCVASG

SEQ ID NO: 8447 - protein, 23 aa, Artificial Sequence
  Synthetic
LQESGGGLVQAGDALTLSCAASG

SEQ ID NO: 8448 - protein, 23 aa, Artificial Sequence
  Synthetic
LQESGGGLVQAGDSLRLSCQASG

SEQ ID NO: 8449 - protein, 23 aa, Artificial Sequence
  Synthetic
LQQSGGGLVQAGGSLRLSCAASG

SEQ ID NO: 8450 - protein, 23 aa, Artificial Sequence
  Synthetic
LQESGGGLVQAGGSLRLSCAASG

SEQ ID NO: 8451 - protein, 23 aa, Artificial Sequence
  Synthetic
LQESGGGLVQAGGSLRLSCAASG

SEQ ID NO: 8452 - protein, 23 aa, Artificial Sequence
  Synthetic
LQESGGGLVQAGGSLSISCATSG

SEQ ID NO: 8453 - protein, 23 aa, Artificial Sequence
  Synthetic
LQESGGGLVQAGDSLSISCATSG

SEQ ID NO: 8454 - protein, 23 aa, Artificial Sequence
  Synthetic
LQESGGGLVQAGGSLRLSCAASG

SEQ ID NO: 8455 - protein, 23 aa, Artificial Sequence
  Synthetic
LQESGGRLVQAGGSLSLSCAASG

SEQ ID NO: 8456 - protein, 23 aa, Artificial Sequence
  Synthetic
LQQSGGGLVQAGGSLSLSCATSG

SEQ ID NO: 8457 - protein, 23 aa, Artificial Sequence
  Synthetic
LQESGGGLVQAGGSLRLSCAASG

SEQ ID NO: 8458 - protein, 23 aa, Artificial Sequence
  Synthetic
LQQSGGGSVQAGGSLRLSCAASA

SEQ ID NO: 8459 - protein, 23 aa, Artificial Sequence
  Synthetic
LQESGGGLVQAGGSLRLSCAASG

SEQ ID NO: 8460 - protein, 23 aa, Artificial Sequence
  Synthetic
LQESGGDLVQPGGSLRLSCAASG

SEQ ID NO: 8461 - protein, 23 aa, Artificial Sequence
  Synthetic
LQESGGGLVQPGGSLRLSCAASG

SEQ ID NO: 8462 - protein, 23 aa, Artificial Sequence
  Synthetic
LQQSGGGLVQAGNSLTLSCAASG

SEQ ID NO: 8463 - protein, 23 aa, Artificial Sequence
  Synthetic
LQESGGGLVQAGGSLRLSCAASG

SEQ ID NO: 8464 - protein, 23 aa, Artificial Sequence
  Synthetic
LQESGGGLVQPGGSLRLSCVASG

SEQ ID NO: 8465 - protein, 23 aa, Artificial Sequence
  Synthetic
LQQSGGGLVQAGGSLRLSCTAAG

SEQ ID NO: 8466 - protein, 23 aa, Artificial Sequence
  Synthetic
LQESGGGLVQPGGSLRLSCASSR

SEQ ID NO: 8467 - protein, 23 aa, Artificial Sequence
  Synthetic
LQESGGGLVQAGDSLRLSCVASG

SEQ ID NO: 8468 - protein, 23 aa, Artificial Sequence
  Synthetic
LQESGGGLVQAGGSLRLSCAASA

SEQ ID NO: 8469 - protein, 23 aa, Artificial Sequence
  Synthetic
LQESGGGLVQAGGSLRLACAASG

SEQ ID NO: 8470 - protein, 23 aa, Artificial Sequence
  Synthetic
LQESGGGLVQPGGSLRLSCAASG

SEQ ID NO: 8471 - protein, 24 aa, Artificial Sequence
  Synthetic
QLQASGGGLVQAGGSLRLSCAASG

SEQ ID NO: 8472 - protein, 24 aa, Artificial Sequence
  Synthetic
QLQASGGGLVQAGGSLRLSCAASG

SEQ ID NO: 8473 - protein, 23 aa, Artificial Sequence
  Synthetic
LQQSGGGLVQAGGSLRLSCAASG

SEQ ID NO: 8474 - protein, 23 aa, Artificial Sequence
  Synthetic
LQESGGGLVQAGGSLRLSCAASR

SEQ ID NO: 8475 - protein, 23 aa, Artificial Sequence
  Synthetic
LQESGGGLVQAGGSLRLSCAASG

SEQ ID NO: 8476 - protein, 23 aa, Artificial Sequence
  Synthetic
LQQSGGGMVQAGGSLRLSCAASQ

SEQ ID NO: 8477 - protein, 23 aa, Artificial Sequence
  Synthetic
LQESGGGLVQAGGSLRLSCAASG

SEQ ID NO: 8478 - protein, 23 aa, Artificial Sequence
  Synthetic
LQQSGGGLVQAGGSLRLSCAASG

SEQ ID NO: 8479 - protein, 23 aa, Artificial Sequence
  Synthetic
LQQSGGGLVQAGGSLRLSCQASR

SEQ ID NO: 8480 - protein, 23 aa, Artificial Sequence
  Synthetic
LQESGGGLVQAGGSLRLSCAASG

SEQ ID NO: 8481 - protein, 23 aa, Artificial Sequence
  Synthetic
LQESGGGLVQAGGSLRLSCAASG

SEQ ID NO: 8482 - protein, 23 aa, Artificial Sequence
  Synthetic
LQQSGGGLVQAGASLRLSCTAPG

SEQ ID NO: 8483 - protein, 23 aa, Artificial Sequence
  Synthetic
LQESGGGLVQAGGGLRLSCAASG

SEQ ID NO: 8484 - protein, 23 aa, Artificial Sequence
  Synthetic
LQQSGGGLVQAGGSLRLTCAASG

SEQ ID NO: 8485 - protein, 23 aa, Artificial Sequence
  Synthetic
LQESGGGLVQAGGSLRLSCAASG

SEQ ID NO: 8486 - protein, 23 aa, Artificial Sequence
  Synthetic
LQQSGGGLVQAGDPLTLSCAASG

SEQ ID NO: 8487 - protein, 23 aa, Artificial Sequence
  Synthetic
LQESGGGLVQPGGSLRLSCAASG

SEQ ID NO: 8488 - protein, 23 aa, Artificial Sequence
  Synthetic
LQQSGGGLVQAGGSLRLSCTASG

SEQ ID NO: 8489 - protein, 23 aa, Artificial Sequence
  Synthetic
LQESGGGLVQAGGSLRLSCAASG

SEQ ID NO: 8490 - protein, 23 aa, Artificial Sequence
  Synthetic
LQQSGGGLTQAGGSLRLSCAASG

SEQ ID NO: 8491 - protein, 23 aa, Artificial Sequence
  Synthetic
LQESGGGLVQAGVSLRLSCAASG

SEQ ID NO: 8492 - protein, 23 aa, Artificial Sequence
  Synthetic
LQQSGGGLVQAGDSLRLSCAASG

SEQ ID NO: 8493 - protein, 23 aa, Artificial Sequence
  Synthetic
LQESGGGLVQPGGSLRLSCAASG

SEQ ID NO: 8494 - protein, 23 aa, Artificial Sequence
  Synthetic
LQESGGGLVQAGGSLRLSCAASG

SEQ ID NO: 8495 - protein, 23 aa, Artificial Sequence
  Synthetic
LQESGGGLVQAGGSLRLSCAASG

SEQ ID NO: 8496 - protein, 23 aa, Artificial Sequence
  Synthetic
LQESGGGLVQAGGSLRLSCAASG

SEQ ID NO: 8497 - protein, 23 aa, Artificial Sequence
  Synthetic
LQESGGGLVQAGGSLRLSCAASG

SEQ ID NO: 8498 - protein, 23 aa, Artificial Sequence
  Synthetic
LQESGGGLVQAGDSLRLSCAASG

SEQ ID NO: 8499 - protein, 23 aa, Artificial Sequence
  Synthetic
LQQSGGGLVQAGGSLRLSCATSG

SEQ ID NO: 8500 - protein, 23 aa, Artificial Sequence
  Synthetic
LQESGGGLVQAGGSLRLSCAASG

SEQ ID NO: 8501 - protein, 23 aa, Artificial Sequence
  Synthetic
LQESGGGLVQAGGSLRLSCATSG

SEQ ID NO: 8502 - protein, 23 aa, Artificial Sequence
  Synthetic
LQQSGGGLVQAGGSLRLSCAASG

SEQ ID NO: 8503 - protein, 26 aa, Artificial Sequence
  Synthetic
QVQLQESGGGLVQAGGSLRLSCAASR

SEQ ID NO: 8504 - protein, 26 aa, Artificial Sequence
  Synthetic
QVQLVESGGGLVQAGGSLRLSCAASR

SEQ ID NO: 8505 - protein, 23 aa, Artificial Sequence
  Synthetic
LQQSGGGSVQAGGSLRLSCAVSG

SEQ ID NO: 8506 - protein, 23 aa, Artificial Sequence
  Synthetic
LQESGGGLVQPGGSLRLSCAASG

SEQ ID NO: 8507 - protein, 23 aa, Artificial Sequence
  Synthetic
LQESGGGLVQAGGSLRLSCAASG

SEQ ID NO: 8508 - protein, 23 aa, Artificial Sequence
  Synthetic
LQESGGGLVQVGGSLRLSCAASG

SEQ ID NO: 8509 - protein, 23 aa, Artificial Sequence
  Synthetic
LQESGGGSVQAGGSLRLSCAVSG

SEQ ID NO: 8510 - protein, 23 aa, Artificial Sequence
  Synthetic
LQESGGGLVQAGGSLRLSCASSA

SEQ ID NO: 8511 - protein, 23 aa, Artificial Sequence
  Synthetic
LQESGGGSVQAGGSLRLSCAVSG

SEQ ID NO: 8512 - protein, 23 aa, Artificial Sequence
  Synthetic
LQESGGGSVQAGGSLRLSCAVSG

SEQ ID NO: 8513 - protein, 23 aa, Artificial Sequence
  Synthetic
LQESGGGLVQAGGSLRLSCAASG

SEQ ID NO: 8514 - protein, 23 aa, Artificial Sequence
  Synthetic
LQQSGGGLVQPGGSLRLSCAASG

SEQ ID NO: 8515 - protein, 23 aa, Artificial Sequence
  Synthetic
LQQSGGGLVQAGGSLSLSCAFSG

SEQ ID NO: 8516 - protein, 23 aa, Artificial Sequence
  Synthetic
LQESGGGLVQTGGSLRLSCALSD

SEQ ID NO: 8517 - protein, 23 aa, Artificial Sequence
  Synthetic
LQQSGGGLVQAGGSLRLSCAASG

SEQ ID NO: 8518 - protein, 23 aa, Artificial Sequence
  Synthetic
LQQSGGGLVQAGASLRLSCATSE

SEQ ID NO: 8519 - protein, 23 aa, Artificial Sequence
  Synthetic
LQESGGGLVQAGGSLRLSCAASG

SEQ ID NO: 8520 - protein, 18 aa, Artificial Sequence
  Synthetic
GGLVQSGGSLTLSCEASG

SEQ ID NO: 8521 - protein, 18 aa, Artificial Sequence
  Synthetic
GGDVQTGGSLRLSCSVPR

SEQ ID NO: 8522 - protein, 18 aa, Artificial Sequence
  Synthetic
GGLVQTGGSLRLSCAASK

SEQ ID NO: 8523 - protein, 18 aa, Artificial Sequence
  Synthetic
GGLVQAGDSLSPSCRPSM

SEQ ID NO: 8524 - protein, 18 aa, Artificial Sequence
  Synthetic
GGSVQTGGSLRVSCAASG

SEQ ID NO: 8525 - protein, 18 aa, Artificial Sequence
  Synthetic
GGSVQAGESLRLSCVASG

SEQ ID NO: 8526 - protein, 18 aa, Artificial Sequence
  Synthetic
GGSVQAGGSLRLSCAASG

SEQ ID NO: 8527 - protein, 18 aa, Artificial Sequence
  Synthetic
GGSVKAGGSLTLSCKVSA

SEQ ID NO: 8528 - protein, 18 aa, Artificial Sequence
  Synthetic
GGSVQAGGSLKLSCLGSG

SEQ ID NO: 8529 - protein, 18 aa, Artificial Sequence
  Synthetic
GGSVEAGGSLNISCVVSE

SEQ ID NO: 8530 - protein, 18 aa, Artificial Sequence
  Synthetic
GGSGQAGGSLRLSCHVSG

SEQ ID NO: 8531 - protein, 18 aa, Artificial Sequence
  Synthetic
GGSVQAGGSLSLSCAASG

SEQ ID NO: 8532 - protein, 18 aa, Artificial Sequence
  Synthetic
GGSVQAGGSLRLACAASG

SEQ ID NO: 8533 - protein, 18 aa, Artificial Sequence
  Synthetic
GGSVQAGGTLRLSCVGSG

SEQ ID NO: 8534 - protein, 18 aa, Artificial Sequence
  Synthetic
GGSVQAGGSLRLSCVHSG

SEQ ID NO: 8535 - protein, 18 aa, Artificial Sequence
  Synthetic
GGSVQAGGSLRLSCTTTS

SEQ ID NO: 8536 - protein, 18 aa, Artificial Sequence
  Synthetic
GGSVQAGGSLRLSCSAST

SEQ ID NO: 8537 - protein, 18 aa, Artificial Sequence
  Synthetic
GGSVQAGGSLTLSCTASG

SEQ ID NO: 8538 - protein, 26 aa, Artificial Sequence
  Synthetic
QMQLVESGGGLVQPGGSLRLSCAAPE

SEQ ID NO: 8539 - protein, 26 aa, Artificial Sequence
  Synthetic
EVQLVESGGGLVQAGDSLRLSCTASG

SEQ ID NO: 8540 - protein, 26 aa, Artificial Sequence
  Synthetic
QVQLVESGGGLVQAGGSLRLSCAASQ

SEQ ID NO: 8541 - protein, 26 aa, Artificial Sequence
  Synthetic
QVQLQQSGGGLVQAGGSLRLSCAASG

SEQ ID NO: 8542 - protein, 26 aa, Artificial Sequence
  Synthetic
EVQLVESGGGLVQTGDSLRLSCAASG

SEQ ID NO: 8543 - protein, 26 aa, Artificial Sequence
  Synthetic
QVKLQQSGGGMVQTGDSLRLSCVGSR

SEQ ID NO: 8544 - protein, 26 aa, Artificial Sequence
  Synthetic
QVQLVESGGGLVQAGGSLRLSCAASG

SEQ ID NO: 8545 - protein, 26 aa, Artificial Sequence
  Synthetic
QVQLVESGGGLVRPGGSLRLSCVDSE

SEQ ID NO: 8546 - protein, 25 aa, Artificial Sequence
  Synthetic
VQLVESGGGLVQAGDSLRLSCAASG

SEQ ID NO: 8547 - protein, 26 aa, Artificial Sequence
  Synthetic
EVQLVESGGGLVQPGGSLRLSCAVSI

SEQ ID NO: 8548 - protein, 26 aa, Artificial Sequence
  Synthetic
QVQLVETGGGLVQAGGSLRLSCAASG

SEQ ID NO: 8549 - protein, 26 aa, Artificial Sequence
  Synthetic
QVQLVESGGGLVQAGGSLKLSCTTSG

SEQ ID NO: 8550 - protein, 26 aa, Artificial Sequence
  Synthetic
DVQLVESGGGLVQAGGSLRVSCAASG

SEQ ID NO: 8551 - protein, 26 aa, Artificial Sequence
  Synthetic
QVQLVQSGGGLVQAGGSLRLSCAFSG

SEQ ID NO: 8552 - protein, 26 aa, Artificial Sequence
  Synthetic
QVQLVESGGGVVQAGGSLRLSCAASG

SEQ ID NO: 8553 - protein, 26 aa, Artificial Sequence
  Synthetic
QVKLEESGGGLVQAGGSLRLSCSPSD

SEQ ID NO: 8554 - protein, 26 aa, Artificial Sequence
  Synthetic
QVQLVESGGGLVQAGGSLRLSCAASG

SEQ ID NO: 8555 - protein, 26 aa, Artificial Sequence
  Synthetic
EVQLVESGGGLVQAGGSLKLSCAASG

SEQ ID NO: 8556 - protein, 26 aa, Artificial Sequence
  Synthetic
QVQLVESGGGLVQAGDSLRLACAASG

SEQ ID NO: 8557 - protein, 26 aa, Artificial Sequence
  Synthetic
QVQLQESGGGLVQAGGSLRLSCAGSG

SEQ ID NO: 8558 - protein, 26 aa, Artificial Sequence
  Synthetic
QVQLVESGGGLVQAGDSLRLSCAASG

SEQ ID NO: 8559 - protein, 25 aa, Artificial Sequence
  Synthetic
VQLQESGGCLVQAGGSLRLSCAASG

SEQ ID NO: 8560 - protein, 26 aa, Artificial Sequence
  Synthetic
EVQLQESGGGLVQAGGSLRLSCAASG

SEQ ID NO: 8561 - protein, 26 aa, Artificial Sequence
  Synthetic
QVQLQESGGGLVQAGGSLRLSCAASG

SEQ ID NO: 8562 - protein, 26 aa, Artificial Sequence
  Synthetic
QVQLQESGGGLVQAGGSLRLSCAASG

SEQ ID NO: 8563 - protein, 26 aa, Artificial Sequence
  Synthetic
QVQLQESGGGLVQAGGSLRLSCAASG

SEQ ID NO: 8564 - protein, 26 aa, Artificial Sequence
  Synthetic
QVQLVESGGGLVQAGGSLRLSCAASG

SEQ ID NO: 8565 - protein, 26 aa, Artificial Sequence
  Synthetic
QVQLVESGGGLVQAGGSLRLSCAASG

SEQ ID NO: 8566 - protein, 26 aa, Artificial Sequence
  Synthetic
QVQLQESGGGLVQPGGSLRLSCAASG

SEQ ID NO: 8567 - protein, 26 aa, Artificial Sequence
  Synthetic
QVQLQESGGGLVQPGGSLRLSCAVSG

SEQ ID NO: 8568 - protein, 26 aa, Artificial Sequence
  Synthetic
QVQLQESGGGLVQPGGSLRLSCVVSG

SEQ ID NO: 8569 - protein, 26 aa, Artificial Sequence
  Synthetic
QVQLQESGGGTVQAGDSLRLSCAASA

SEQ ID NO: 8570 - protein, 26 aa, Artificial Sequence
  Synthetic
QVQLQESGGGLVQAGGSLRLSCTASR

SEQ ID NO: 8571 - protein, 26 aa, Artificial Sequence
  Synthetic
QVQLQESGGGLVQAGGSLRLSCTASR

SEQ ID NO: 8572 - protein, 26 aa, Artificial Sequence
  Synthetic
DVQLQASGGGLVQAGGSLRLSCTASG

SEQ ID NO: 8573 - protein, 26 aa, Artificial Sequence
  Synthetic
EVQLQASGGGLVQAGGSLRVSCAASG

SEQ ID NO: 8574 - protein, 26 aa, Artificial Sequence
  Synthetic
EVQLQASGGGLVQPGGSLRLSCVASR

SEQ ID NO: 8575 - protein, 26 aa, Artificial Sequence
  Synthetic
DVQLQASGGGLVQAEDSLRLSCALSG

SEQ ID NO: 8576 - protein, 26 aa, Artificial Sequence
  Synthetic
EVQLQASGGGLVQAGGSLRLSCAASG

SEQ ID NO: 8577 - protein, 26 aa, Artificial Sequence
  Synthetic
DVQLQASGGGLVQAGGSLRVSCAASG

SEQ ID NO: 8578 - protein, 26 aa, Artificial Sequence
  Synthetic
DVQLQASGGGLAQAGRSLTLSCDVSG

SEQ ID NO: 8579 - protein, 26 aa, Artificial Sequence
  Synthetic
DVQLQASGGGLVQSGGSLRLICEASG

SEQ ID NO: 8580 - protein, 26 aa, Artificial Sequence
  Synthetic
DVQLQASGGGLVQAGGSLRLSCAASG

SEQ ID NO: 8581 - protein, 26 aa, Artificial Sequence
  Synthetic
DVQLQASGGGLVQAGGSLRLSCAASG

SEQ ID NO: 8582 - protein, 26 aa, Artificial Sequence
  Synthetic
EVQLQASGGGLVQAGGSLRLSCAASG

SEQ ID NO: 8583 - protein, 26 aa, Artificial Sequence
  Synthetic
EVQLQASGGGLVQPGGSLRLSCATSG

SEQ ID NO: 8584 - protein, 26 aa, Artificial Sequence
  Synthetic
DVQLQASGGGLVQAGGSLRLSCAASG

SEQ ID NO: 8585 - protein, 26 aa, Artificial Sequence
  Synthetic
EVQLQASGGGSVQTGASLRISCLASG

SEQ ID NO: 8586 - protein, 26 aa, Artificial Sequence
  Synthetic
EVQLQASGGGLVQAGGSLRLSCVASG

SEQ ID NO: 8587 - protein, 26 aa, Artificial Sequence
  Synthetic
EVQLQASGGGLVQAGGSLRLSCAVSG

SEQ ID NO: 8588 - protein, 26 aa, Artificial Sequence
  Synthetic
EVQLQASGGGLAQAGGSLRLSCAASG

SEQ ID NO: 8589 - protein, 26 aa, Artificial Sequence
  Synthetic
DVQLQASGGGLVQAGGSLRLSCAASG

SEQ ID NO: 8590 - protein, 26 aa, Artificial Sequence
  Synthetic
DVQLQASGGGSVQAGGSLRLSCAASG

SEQ ID NO: 8591 - protein, 26 aa, Artificial Sequence
  Synthetic
DVQLQASGGGSVQDGGSLRLSCAASG

SEQ ID NO: 8592 - protein, 26 aa, Artificial Sequence
  Synthetic
EVQLQASGGGLVQTGGSLRLSCAVSG

SEQ ID NO: 8593 - protein, 26 aa, Artificial Sequence
  Synthetic
EVQLQASGGGLVQPGGSLRLSCEASG

SEQ ID NO: 8594 - protein, 26 aa, Artificial Sequence
  Synthetic
DVQLQASGGGLVQAGGSLRLSCAASV

SEQ ID NO: 8595 - protein, 26 aa, Artificial Sequence
  Synthetic
EVQLQASGGGLVQAGGSLKLSCTASG

SEQ ID NO: 8596 - protein, 26 aa, Artificial Sequence
  Synthetic
EVQLQASGGGLVQVGDSLKLSCAASG

SEQ ID NO: 8597 - protein, 26 aa, Artificial Sequence
  Synthetic
EVQLQASGGGLVQAGGSLRLSCVASG

SEQ ID NO: 8598 - protein, 26 aa, Artificial Sequence
  Synthetic
DVQLQASGGGLVQAGGSLRLSCVASG

SEQ ID NO: 8599 - protein, 26 aa, Artificial Sequence
  Synthetic
EVQLQASGGGLVQAGGSLRLSCVASG

SEQ ID NO: 8600 - protein, 26 aa, Artificial Sequence
  Synthetic
EVQLQASGGGLVQAGDSLRLSCAASG

SEQ ID NO: 8601 - protein, 26 aa, Artificial Sequence
  Synthetic
EVQLQASGGGLVQAGGSLRLSCAASG

SEQ ID NO: 8602 - protein, 26 aa, Artificial Sequence
  Synthetic
EVQLQASGGGLVQAGGSLRLSCSASV

SEQ ID NO: 8603 - protein, 23 aa, Artificial Sequence
  Synthetic
LQASGGGLVQAGGSLRLSCAEAS

SEQ ID NO: 8604 - protein, 26 aa, Artificial Sequence
  Synthetic
QVQLQESGGGLVQAGGSLTLSCAASG

SEQ ID NO: 8605 - protein, 26 aa, Artificial Sequence
  Synthetic
QVQLQESGGRSVQSGGSLRLSCAASG

SEQ ID NO: 8606 - protein, 26 aa, Artificial Sequence
  Synthetic
QVQLQESGGGLVQAGDSLRLSCAASG

SEQ ID NO: 8607 - protein, 26 aa, Artificial Sequence
  Synthetic
QVQLQESGGGLVQAGGSLRLSCAASG

SEQ ID NO: 8608 - protein, 26 aa, Artificial Sequence
  Synthetic
QVQLQESGGGLVQPGGSLRLSCAASG

SEQ ID NO: 8609 - protein, 26 aa, Artificial Sequence
  Synthetic
QVQLQQSGGGLVQAGGSLRLSCVASG

SEQ ID NO: 8610 - protein, 26 aa, Artificial Sequence
  Synthetic
QVQLQESGGGLVQAGESLKLSCAASG

SEQ ID NO: 8611 - protein, 26 aa, Artificial Sequence
  Synthetic
QVQLQESGGGLVQAGGSLRLSCAASG

SEQ ID NO: 8612 - protein, 23 aa, Artificial Sequence
  Synthetic
LQESGGGLVQAGGSLRLSCAASA

SEQ ID NO: 8613 - protein, 23 aa, Artificial Sequence
  Synthetic
LQESGGGLVQPGGSLKLSCAVFG

SEQ ID NO: 8614 - protein, 23 aa, Artificial Sequence
  Synthetic
LQESGGGLVQPGGSLRLSCAASG

SEQ ID NO: 8615 - protein, 23 aa, Artificial Sequence
  Synthetic
LQESGGGLVQPGGSLRLSCAASG

SEQ ID NO: 8616 - protein, 23 aa, Artificial Sequence
  Synthetic
LQESGGGWVQPGGSLRLSCAASE

SEQ ID NO: 8617 - protein, 23 aa, Artificial Sequence
  Synthetic
LQESGGGLVQPGGSLRLSCAATG

SEQ ID NO: 8618 - protein, 23 aa, Artificial Sequence
  Synthetic
LQESGGGSVQAGGSLRLSCVASG

SEQ ID NO: 8619 - protein, 23 aa, Artificial Sequence
  Synthetic
LQESGGGLVQAGGSLRLSCAASG

SEQ ID NO: 8620 - protein, 23 aa, Artificial Sequence
  Synthetic
LQESGGGLVQPGGSLRLSCAASG

SEQ ID NO: 8621 - protein, 23 aa, Artificial Sequence
  Synthetic
LQESGGGLVQTGGSLTLSCTASG

SEQ ID NO: 8622 - protein, 23 aa, Artificial Sequence
  Synthetic
LQESGGGLVQPGGSLRLSCAASE

SEQ ID NO: 8623 - protein, 23 aa, Artificial Sequence
  Synthetic
LQESGGGLVQAGGSLRLSCAASG

SEQ ID NO: 8624 - protein, 23 aa, Artificial Sequence
  Synthetic
LQESGGGLVQAGGSLRLSCGASG

SEQ ID NO: 8625 - protein, 23 aa, Artificial Sequence
  Synthetic
LQESGGGLVQAGGSLRLSCVAQG

SEQ ID NO: 8626 - protein, 23 aa, Artificial Sequence
  Synthetic
LQQSGGGFVQPGGSLRLSCTASG

SEQ ID NO: 8627 - protein, 23 aa, Artificial Sequence
  Synthetic
LQESGGGLVRPGESLRLSCVVSG

SEQ ID NO: 8628 - protein, 23 aa, Artificial Sequence
  Synthetic
LQESGGGLVQAGGSLRLSCVASG

SEQ ID NO: 8629 - protein, 23 aa, Artificial Sequence
  Synthetic
LQESGGGLVQAGGSLRLSCVASG

SEQ ID NO: 8630 - protein, 23 aa, Artificial Sequence
  Synthetic
LQESGGGLVQPGGSLRLSCAASG

SEQ ID NO: 8631 - protein, 23 aa, Artificial Sequence
  Synthetic
LQESGGGSVQPGGSLRLSCSTSG

SEQ ID NO: 8632 - protein, 23 aa, Artificial Sequence
  Synthetic
LQQSGGRSVQAGGSLRLACTASG

SEQ ID NO: 8633 - protein, 23 aa, Artificial Sequence
  Synthetic
LQESGGGLVQAGGSLRLSCAASG

SEQ ID NO: 8634 - protein, 23 aa, Artificial Sequence
  Synthetic
LQESGGGLVQPGGSLRLSCAATG

SEQ ID NO: 8635 - protein, 23 aa, Artificial Sequence
  Synthetic
LQESGGGLVQAGNSLRLSCAASG

SEQ ID NO: 8636 - protein, 23 aa, Artificial Sequence
  Synthetic
LQESGGGLVQAGGSLKLSCAAPE

SEQ ID NO: 8637 - protein, 23 aa, Artificial Sequence
  Synthetic
LQESGGGLVQTGGSLRLSCTASG

SEQ ID NO: 8638 - protein, 23 aa, Artificial Sequence
  Synthetic
LQQSGGGLVQPGGSLRLSCAASG

SEQ ID NO: 8639 - protein, 23 aa, Artificial Sequence
  Synthetic
LQESGGGLVQPGGSLRLSCAASG

SEQ ID NO: 8640 - protein, 23 aa, Artificial Sequence
  Synthetic
LQESGGGLVQAGGSLRLSCAASG

SEQ ID NO: 8641 - protein, 23 aa, Artificial Sequence
  Synthetic
LQQSGGGLVQAGGSLRLSCAASG

SEQ ID NO: 8642 - protein, 23 aa, Artificial Sequence
  Synthetic
LQESGGGLVQAGGSLRLSCAASG

SEQ ID NO: 8643 - protein, 23 aa, Artificial Sequence
  Synthetic
LQESGGGLVQPGGSLRLSCAASG

SEQ ID NO: 8644 - protein, 23 aa, Artificial Sequence
  Synthetic
LQESGGGLVQTGASLRLSCVASG

SEQ ID NO: 8645 - protein, 23 aa, Artificial Sequence
  Synthetic
LQESGGGLVPTGGSLTLSCEVSG

SEQ ID NO: 8646 - protein, 23 aa, Artificial Sequence
  Synthetic
LQESGGGVVQPGESLTLSCVASG

SEQ ID NO: 8647 - protein, 23 aa, Artificial Sequence
  Synthetic
LQESGGNFMQAGGSVRLSCAASG

SEQ ID NO: 8648 - protein, 23 aa, Artificial Sequence
  Synthetic
LQESGGGLVQAGGSLKLSCETSG

SEQ ID NO: 8649 - protein, 23 aa, Artificial Sequence
  Synthetic
LQESGGGLVQAGGSLRLSCAASG

SEQ ID NO: 8650 - protein, 23 aa, Artificial Sequence
  Synthetic
LQESGGGLVQAGGSLRLSCAASG

SEQ ID NO: 8651 - protein, 23 aa, Artificial Sequence
  Synthetic
LQESGGGLVQPGGSLRLSCAASG

SEQ ID NO: 8652 - protein, 23 aa, Artificial Sequence
  Synthetic
LQESGGGLVQTGGSLRLSCATSG

SEQ ID NO: 8653 - protein, 23 aa, Artificial Sequence
  Synthetic
LQESGGGTVEAGGSLRLSCAASV

SEQ ID NO: 8654 - protein, 23 aa, Artificial Sequence
  Synthetic
LQQSGGGLVQAGDSLRLSCTYSG

SEQ ID NO: 8655 - protein, 23 aa, Artificial Sequence
  Synthetic
LQQSGGGLVQAGGSLRLSCVASG

SEQ ID NO: 8656 - protein, 23 aa, Artificial Sequence
  Synthetic
LQESGGGLVQPGGSLRLSCAASG

SEQ ID NO: 8657 - protein, 23 aa, Artificial Sequence
  Synthetic
LQESGGGLVQPGGSLRLSCTESG

SEQ ID NO: 8658 - protein, 23 aa, Artificial Sequence
  Synthetic
LQESGGGLVQAGGSLRLSCAASG

SEQ ID NO: 8659 - protein, 23 aa, Artificial Sequence
  Synthetic
LQESGGGLVQLGGSLRLSCAASG

SEQ ID NO: 8660 - protein, 23 aa, Artificial Sequence
  Synthetic
LQESGGGLVQAGGSLNLSCTAVG

SEQ ID NO: 8661 - protein, 23 aa, Artificial Sequence
  Synthetic
LQQSGGGLVQPGGSLRLSCATSG

SEQ ID NO: 8662 - protein, 23 aa, Artificial Sequence
  Synthetic
LQESGGGLVQAGGSLRLACAASV

SEQ ID NO: 8663 - protein, 23 aa, Artificial Sequence
  Synthetic
LQESGGGLVQAGGSLTLSCEISG

SEQ ID NO: 8664 - protein, 23 aa, Artificial Sequence
  Synthetic
LQESGGGWVQPGGSLTLSCDASG

SEQ ID NO: 8665 - protein, 23 aa, Artificial Sequence
  Synthetic
LQESGGGLVQAGGSLRLSCAASG

SEQ ID NO: 8666 - protein, 23 aa, Artificial Sequence
  Synthetic
LQESGGGLVQAGGSLRLSCVASG

SEQ ID NO: 8667 - protein, 23 aa, Artificial Sequence
  Synthetic
LQESGGGLVQAGGSLRLSCAASG

SEQ ID NO: 8668 - protein, 23 aa, Artificial Sequence
  Synthetic
LQQSGGGLVQAGGSLRLSCAASG

SEQ ID NO: 8669 - protein, 23 aa, Artificial Sequence
  Synthetic
LQESGGDLVQPGGSLRLSCVAPG

SEQ ID NO: 8670 - protein, 23 aa, Artificial Sequence
  Synthetic
LQESGGGLVQAGDSLKLSCVASG

SEQ ID NO: 8671 - protein, 23 aa, Artificial Sequence
  Synthetic
LQESGGGLVQAGESLRLSCAASG

SEQ ID NO: 8672 - protein, 23 aa, Artificial Sequence
  Synthetic
LQESGGGLVQAGDSLRLACAASG

SEQ ID NO: 8673 - protein, 23 aa, Artificial Sequence
  Synthetic
LQESGGGLVQAGGSLRISCAASG

SEQ ID NO: 8674 - protein, 23 aa, Artificial Sequence
  Synthetic
LQESGGGLVQAGGSLRLSCVASG

SEQ ID NO: 8675 - protein, 23 aa, Artificial Sequence
  Synthetic
LQESGGGLVQAGGSLKLSCTASG

SEQ ID NO: 8676 - protein, 23 aa, Artificial Sequence
  Synthetic
LQESGGGLAQPGGSLRLSCVASG

SEQ ID NO: 8677 - protein, 23 aa, Artificial Sequence
  Synthetic
LQESGGGLVQAGGSLTLSCAVSG

SEQ ID NO: 8678 - protein, 23 aa, Artificial Sequence
  Synthetic
LQESGGGLVQTGGSLRLSCAAPG

SEQ ID NO: 8679 - protein, 23 aa, Artificial Sequence
  Synthetic
LQESGGDLVQAGGSLRLSCAASG

SEQ ID NO: 8680 - protein, 23 aa, Artificial Sequence
  Synthetic
LQQSGGGSVQPGGSLRLSCAASG

SEQ ID NO: 8681 - protein, 23 aa, Artificial Sequence
  Synthetic
LQESGGGSVQAGGSLRLSCTASG

SEQ ID NO: 8682 - protein, 23 aa, Artificial Sequence
  Synthetic
LQESGGGLVQAGGSLRLSCAASE

SEQ ID NO: 8683 - protein, 23 aa, Artificial Sequence
  Synthetic
LQESGGGSVQAGGSLRLSCAASG

SEQ ID NO: 8684 - protein, 23 aa, Artificial Sequence
  Synthetic
LQESGGGLVQPGGSLRLSCVASG

SEQ ID NO: 8685 - protein, 23 aa, Artificial Sequence
  Synthetic
LQESGGGLVQAGGSLRLSCTASG

SEQ ID NO: 8686 - protein, 23 aa, Artificial Sequence
  Synthetic
LQASGGGSVQAGGSLRLSCSVSG

SEQ ID NO: 8687 - protein, 23 aa, Artificial Sequence
  Synthetic
LQASGGGLVQAGGSLRLSCAASG

SEQ ID NO: 8688 - protein, 23 aa, Artificial Sequence
  Synthetic
LQASGGGSVQAGGSLTLSCAASE

SEQ ID NO: 8689 - protein, 23 aa, Artificial Sequence
  Synthetic
LQASGGGLVQPGGSLRLSCAASR

SEQ ID NO: 8690 - protein, 23 aa, Artificial Sequence
  Synthetic
LQASGGGLVQPGGSLRLSCTSGV

SEQ ID NO: 8691 - protein, 23 aa, Artificial Sequence
  Synthetic
LQASGGGLVQAGGSLRLSCAYSG

SEQ ID NO: 8692 - protein, 23 aa, Artificial Sequence
  Synthetic
LQASGGGLVQAGGSLRLSCAASG

SEQ ID NO: 8693 - protein, 23 aa, Artificial Sequence
  Synthetic
LQASGGGLVQAGGSLTLSCAAST

SEQ ID NO: 8694 - protein, 23 aa, Artificial Sequence
  Synthetic
LQASGGGLVQAGDSLRLSCTEAS

SEQ ID NO: 8695 - protein, 23 aa, Artificial Sequence
  Synthetic
LQASGGGLVQAGGSLRLSCVASG

SEQ ID NO: 8696 - protein, 23 aa, Artificial Sequence
  Synthetic
LQASGGGLVQAGGSLRLSCAASG

SEQ ID NO: 8697 - protein, 23 aa, Artificial Sequence
  Synthetic
LQASGGGLVQIGGSLRLSCAASG

SEQ ID NO: 8698 - protein, 23 aa, Artificial Sequence
  Synthetic
LQASGGGLVQAGGSLRLSCAASG

SEQ ID NO: 8699 - protein, 23 aa, Artificial Sequence
  Synthetic
LQASGGGLVQAGGSVRLTCAASG

SEQ ID NO: 8700 - protein, 23 aa, Artificial Sequence
  Synthetic
LQASGGGLVQAGGSLRLSCAAST

SEQ ID NO: 8701 - protein, 23 aa, Artificial Sequence
  Synthetic
LQESGGGLVQAGGSLKLSCTASR

SEQ ID NO: 8702 - protein, 23 aa, Artificial Sequence
  Synthetic
LQESGGGLVQAGGSLRLSCAASG

SEQ ID NO: 8703 - protein, 23 aa, Artificial Sequence
  Synthetic
LQESGGGVVLAGGSLRLSCTVSG

SEQ ID NO: 8704 - protein, 23 aa, Artificial Sequence
  Synthetic
LQESGGGSVQPGGSLRLSCAAAG

SEQ ID NO: 8705 - protein, 23 aa, Artificial Sequence
  Synthetic
LQESGGGLVQAGGSLRLSCAASG

SEQ ID NO: 8706 - protein, 23 aa, Artificial Sequence
  Synthetic
LQESGGGLVQAGGSLALSCAASG

SEQ ID NO: 8707 - protein, 23 aa, Artificial Sequence
  Synthetic
LQESGGGLVQPGGSLRLSCEASG

SEQ ID NO: 8708 - protein, 23 aa, Artificial Sequence
  Synthetic
LQESGGGLVQPGGSLTLSCSASG

SEQ ID NO: 8709 - protein, 23 aa, Artificial Sequence
  Synthetic
LQESGGGLVQPGGSLKLSCAATG

SEQ ID NO: 8710 - protein, 23 aa, Artificial Sequence
  Synthetic
LQESGGGLVQAGDSLRLSCAASG

SEQ ID NO: 8711 - protein, 23 aa, Artificial Sequence
  Synthetic
LQESGGGLVQAGGSLRLSCAASG

SEQ ID NO: 8712 - protein, 23 aa, Artificial Sequence
  Synthetic
LQESGGGLVQAGGSLTLSCASSR

SEQ ID NO: 8713 - protein, 26 aa, Artificial Sequence
  Synthetic
QVQLQESGGGLVQPGGSLRLSCAASG

SEQ ID NO: 8714 - protein, 26 aa, Artificial Sequence
  Synthetic
QVQLQESGGGLVQAGESLRLSCVASG

SEQ ID NO: 8715 - protein, 26 aa, Artificial Sequence
  Synthetic
QVQLVESGGGSVQAGGSLRLSCAASG

SEQ ID NO: 8716 - protein, 23 aa, Artificial Sequence
  Synthetic
LQESGGGLVQAGGSLRLSCAASG

SEQ ID NO: 8717 - protein, 23 aa, Artificial Sequence
  Synthetic
LQESGGGLVQAGGSLRLSCAASE

SEQ ID NO: 8718 - protein, 23 aa, Artificial Sequence
  Synthetic
LQESGGGLVQAGGSLTLSCAASG

SEQ ID NO: 8719 - protein, 23 aa, Artificial Sequence
  Synthetic
LQESGGGLVQAGGSLRLSCAASV

SEQ ID NO: 8720 - protein, 23 aa, Artificial Sequence
  Synthetic
LQESGGGLVQAGGSLRLSCAASG

SEQ ID NO: 8721 - protein, 23 aa, Artificial Sequence
  Synthetic
LQESGGGLVQPGGSLRLSCQAST

SEQ ID NO: 8722 - protein, 23 aa, Artificial Sequence
  Synthetic
LQQSGGGLVQPGGSLKLSCAASG

SEQ ID NO: 8723 - protein, 23 aa, Artificial Sequence
  Synthetic
LQQSGGGLVQAGGSLRLSCVASG

SEQ ID NO: 8724 - protein, 23 aa, Artificial Sequence
  Synthetic
LQESGGGLVQAGGSLRLSCAPST

SEQ ID NO: 8725 - protein, 23 aa, Artificial Sequence
  Synthetic
LQESGGGLVQAGGSLRLSCVVSG

SEQ ID NO: 8726 - protein, 23 aa, Artificial Sequence
  Synthetic
LQQSGGGLVQAGGSLRLSCAASG

SEQ ID NO: 8727 - protein, 23 aa, Artificial Sequence
  Synthetic
LQESGGGLVQTGGSLRLSCAASG

SEQ ID NO: 8728 - protein, 23 aa, Artificial Sequence
  Synthetic
LQESGGGLVQAGGSLRLSCAASG

SEQ ID NO: 8729 - protein, 23 aa, Artificial Sequence
  Synthetic
LQESGGGLVQTGGSLRLSCAASG

SEQ ID NO: 8730 - protein, 23 aa, Artificial Sequence
  Synthetic
LQQSGGGLVQAGGSLRLSCTASG

SEQ ID NO: 8731 - protein, 23 aa, Artificial Sequence
  Synthetic
LQESGGGLVQAGGSLRLSCAASG

SEQ ID NO: 8732 - protein, 23 aa, Artificial Sequence
  Synthetic
LQESGGGLVQAGDSLRLSCVASG

SEQ ID NO: 8733 - protein, 23 aa, Artificial Sequence
  Synthetic
LQQSGGGLVQAGGSLRLSCAASG

SEQ ID NO: 8734 - protein, 26 aa, Artificial Sequence
  Synthetic
DVQLQASGGGVVQPGGSLRLSCAAHD

SEQ ID NO: 8735 - protein, 23 aa, Artificial Sequence
  Synthetic
LQESGGGLVQAGGSLRLSCAASG

SEQ ID NO: 8736 - protein, 23 aa, Artificial Sequence
  Synthetic
LQESGGGSVQAGGSLRLSCAASG

SEQ ID NO: 8737 - protein, 23 aa, Artificial Sequence
  Synthetic
LQQSGGGLVQTGGSLRLSCAASG

SEQ ID NO: 8738 - protein, 23 aa, Artificial Sequence
  Synthetic
LQQSGGGSVQAGGSLRLSCAASG

SEQ ID NO: 8739 - protein, 23 aa, Artificial Sequence
  Synthetic
LQQSGGGLVQNGDSLRLSCAASG

SEQ ID NO: 8740 - protein, 23 aa, Artificial Sequence
  Synthetic
LQESGGGLVQPGGSLRLSCAASG

SEQ ID NO: 8741 - protein, 23 aa, Artificial Sequence
  Synthetic
LQESGGGLVQPGGSLRLSCAASG

SEQ ID NO: 8742 - protein, 23 aa, Artificial Sequence
  Synthetic
LQESGGGLVQAGGSLRLSCAASG

SEQ ID NO: 8743 - protein, 23 aa, Artificial Sequence
  Synthetic
LQESGGGLVQAGGSLRLSCAASR

SEQ ID NO: 8744 - protein, 23 aa, Artificial Sequence
  Synthetic
LQESGGGLVQAGGSLRLSCAASG

SEQ ID NO: 8745 - protein, 23 aa, Artificial Sequence
  Synthetic
LQQSGGGSVQAGGSLRLSCAASG

SEQ ID NO: 8746 - protein, 23 aa, Artificial Sequence
  Synthetic
LQQSGGGLVQPGGSLRLSCAASG

SEQ ID NO: 8747 - protein, 23 aa, Artificial Sequence
  Synthetic
LQESGGGLVQPGGSLRLSCTASG

SEQ ID NO: 8748 - protein, 23 aa, Artificial Sequence
  Synthetic
LQQSGGGSVQPGGSLRLSCAASG

SEQ ID NO: 8749 - protein, 23 aa, Artificial Sequence
  Synthetic
LQESGGGLVQPGGSLRLSCVASG

SEQ ID NO: 8750 - protein, 23 aa, Artificial Sequence
  Synthetic
LQESGGGLVQAGGSLRLSCEASG

SEQ ID NO: 8751 - protein, 23 aa, Artificial Sequence
  Synthetic
LQESGGRLVEAGGSLRLSCAVSG

SEQ ID NO: 8752 - protein, 23 aa, Artificial Sequence
  Synthetic
LQESGGRLVEAGGSLRLSCAASG

SEQ ID NO: 8753 - protein, 26 aa, Artificial Sequence
  Synthetic
DVQLQESGGGLVQAGGSLRLSCAASG

SEQ ID NO: 8754 - protein, 26 aa, Artificial Sequence
  Synthetic
QVQLQESGGGLVQAGGSLRLSCAASG

SEQ ID NO: 8755 - protein, 26 aa, Artificial Sequence
  Synthetic
DVQLQESGGGLVQAGGSLRLSCAASG

SEQ ID NO: 8756 - protein, 26 aa, Artificial Sequence
  Synthetic
QVQLQESGGGLVQAGGSLRLSCQASG

SEQ ID NO: 8757 - protein, 26 aa, Artificial Sequence
  Synthetic
EVQLQESGGGLVQAGGSLRLSCAASG

SEQ ID NO: 8758 - protein, 26 aa, Artificial Sequence
  Synthetic
QVQLQESGGGLVQAGGSLRLSCAAAG

SEQ ID NO: 8759 - protein, 26 aa, Artificial Sequence
  Synthetic
QVQLQESGGGLVQAGGSLRLSCAASG

SEQ ID NO: 8760 - protein, 26 aa, Artificial Sequence
  Synthetic
QVQLQESGGGLVQPGGSLRLSCAASG

SEQ ID NO: 8761 - protein, 26 aa, Artificial Sequence
  Synthetic
AVQLQESGGGLVQAGGSLRLSCTVSA

SEQ ID NO: 8762 - protein, 26 aa, Artificial Sequence
  Synthetic
QVQLQESGGGLVQAGGSLRLSCAASG

SEQ ID NO: 8763 - protein, 26 aa, Artificial Sequence
  Synthetic
QVQLQESGGGLVQAGGSLTLSCAASG

SEQ ID NO: 8764 - protein, 26 aa, Artificial Sequence
  Synthetic
QVQLQESGGGLVQAGDSLRLSCVASG

SEQ ID NO: 8765 - protein, 26 aa, Artificial Sequence
  Synthetic
EVQPQESGGGLAQAGGSLRLSCVVSG

SEQ ID NO: 8766 - protein, 26 aa, Artificial Sequence
  Synthetic
AVQLQESGGGLVQAGGSLRLSCTASG

SEQ ID NO: 8767 - protein, 26 aa, Artificial Sequence
  Synthetic
QVQLQESGGGLVQAGGSLRLSCAASG

SEQ ID NO: 8768 - protein, 26 aa, Artificial Sequence
  Synthetic
QVQLQESGGGLVQAGGSLRLSCAASG

SEQ ID NO: 8769 - protein, 26 aa, Artificial Sequence
  Synthetic
QVQLQESGGGSVQAGGSLRLSCGASE

SEQ ID NO: 8770 - protein, 26 aa, Artificial Sequence
  Synthetic
QVQLQESGGGLVQAGGSLRLSCAASG

SEQ ID NO: 8771 - protein, 26 aa, Artificial Sequence
  Synthetic
QVQLQESGGGLVQAGGSLRLSCAASG

SEQ ID NO: 8772 - protein, 26 aa, Artificial Sequence
  Synthetic
QVQLQESGGGLVQAGGSLRLSCKASG

SEQ ID NO: 8773 - protein, 26 aa, Artificial Sequence
  Synthetic
QVQLQESGGGLVQAGGSLRLSCTASG

SEQ ID NO: 8774 - protein, 26 aa, Artificial Sequence
  Synthetic
QVQLQESGGGLVQAGGSLRLSCEASG

SEQ ID NO: 8775 - protein, 26 aa, Artificial Sequence
  Synthetic
EVQLQESGGGTVQPGGSLKLSCSAAP

SEQ ID NO: 8776 - protein, 26 aa, Artificial Sequence
  Synthetic
EVQLVESGGGLVQPGGSLRLSCAASG

SEQ ID NO: 8777 - protein, 26 aa, Artificial Sequence
  Synthetic
EVQLVESGGGLVQAGGSLRLSCAASG

SEQ ID NO: 8778 - protein, 26 aa, Artificial Sequence
  Synthetic
QVQLVESGGGLVQAGGSLRLSCAASE

SEQ ID NO: 8779 - protein, 26 aa, Artificial Sequence
  Synthetic
QVQLQESGGGLVQAGASLRLSCAASE

SEQ ID NO: 8780 - protein, 26 aa, Artificial Sequence
  Synthetic
QVQLQESGGGLVQAGASLRLSCAASE

SEQ ID NO: 8781 - protein, 26 aa, Artificial Sequence
  Synthetic
KVQLQQSGGGAVQTGGSLKLTCLASG

SEQ ID NO: 8782 - protein, 26 aa, Artificial Sequence
  Synthetic
AAQLQESGGGLVQPGGSLRLSCAASG

SEQ ID NO: 8783 - protein, 26 aa, Artificial Sequence
  Synthetic
QVKLEESGGGSVQTGGSLRLTCAASG

SEQ ID NO: 8784 - protein, 26 aa, Artificial Sequence
  Synthetic
QVQLQESGGGLVQPGGSLRLSCAASG

SEQ ID NO: 8785 - protein, 26 aa, Artificial Sequence
  Synthetic
EVQLVESGGGLVQAGGSLRLSCAASG

SEQ ID NO: 8786 - protein, 26 aa, Artificial Sequence
  Synthetic
EVQLVESGGGLVQPGGSLRLSCAASG

SEQ ID NO: 8787 - protein, 26 aa, Artificial Sequence
  Synthetic
QVQLQESGGGLVQPGGSLRLSCAASG

SEQ ID NO: 8788 - protein, 26 aa, Artificial Sequence
  Synthetic
QVQLQESGGGLVQAGASLKLSCAASG

SEQ ID NO: 8789 - protein, 26 aa, Artificial Sequence
  Synthetic
QVQLVESGGGLAQAGGSLRLSCAASG

SEQ ID NO: 8790 - protein, 26 aa, Artificial Sequence
  Synthetic
QVKLEESGGGLVQAGGSLRLSCAASE

SEQ ID NO: 8791 - protein, 26 aa, Artificial Sequence
  Synthetic
QVQLVESGGGLVQAGGSLRLSCAASG

SEQ ID NO: 8792 - protein, 26 aa, Artificial Sequence
  Synthetic
QVQLQESGGGLVPAGGSLRLSCVDSG

SEQ ID NO: 8793 - protein, 26 aa, Artificial Sequence
  Synthetic
EVQLVESGGGLVQAGGSLRLFCAASG

SEQ ID NO: 8794 - protein, 26 aa, Artificial Sequence
  Synthetic
QVQLQESGGGLVQAGGSLRLSCAVSG

SEQ ID NO: 8795 - protein, 26 aa, Artificial Sequence
  Synthetic
DVQLVESGGGLVQPGGSLRLSCAYSG

SEQ ID NO: 8796 - protein, 26 aa, Artificial Sequence
  Synthetic
QVQLVESGGGLVQAGGSLRLSCAASG

SEQ ID NO: 8797 - protein, 26 aa, Artificial Sequence
  Synthetic
DVQLVESGGGLVHPGGSLRLSCAASG

SEQ ID NO: 8798 - protein, 26 aa, Artificial Sequence
  Synthetic
QVQLQESGGGLVQAGGSLRLSCAASE

SEQ ID NO: 8799 - protein, 26 aa, Artificial Sequence
  Synthetic
EVQLVESGGGLVQAGDSLRLSATASG

SEQ ID NO: 8800 - protein, 26 aa, Artificial Sequence
  Synthetic
QVQLQESGGGSVQAGGSLRLSCAASG

SEQ ID NO: 8801 - protein, 26 aa, Artificial Sequence
  Synthetic
QVQLQESGGGSVQAGGSLRLSCAASG

SEQ ID NO: 8802 - protein, 26 aa, Artificial Sequence
  Synthetic
QVQLQESGGGLVQAGGSLRLSCAASR

SEQ ID NO: 8803 - protein, 26 aa, Artificial Sequence
  Synthetic
QVQLQESGGGLVQPGGSLRLSCAASG

SEQ ID NO: 8804 - protein, 26 aa, Artificial Sequence
  Synthetic
QVQLQESGGGLVQAGGSLRLSCAASG

SEQ ID NO: 8805 - protein, 26 aa, Artificial Sequence
  Synthetic
QVQLQESGGGLVQAGGSLRLSCAASG

SEQ ID NO: 8806 - protein, 26 aa, Artificial Sequence
  Synthetic
QVQLQESGGGLVQAGGSLRLSCAASG

SEQ ID NO: 8807 - protein, 26 aa, Artificial Sequence
  Synthetic
QVQLQESGGGLVQPGGSLRLSCAPSG

SEQ ID NO: 8808 - protein, 26 aa, Artificial Sequence
  Synthetic
DVQLQESGGGLVQAGGSLRLSCTGSG

SEQ ID NO: 8809 - protein, 26 aa, Artificial Sequence
  Synthetic
DVQLQESGGGLVQAGHSLRLSCVGSG

SEQ ID NO: 8810 - protein, 26 aa, Artificial Sequence
  Synthetic
QVQLQESGGGLVQPGGSLRLSCAASG

SEQ ID NO: 8811 - protein, 26 aa, Artificial Sequence
  Synthetic
QVQLQESGGGLVQPGGSLRLSCAASG

SEQ ID NO: 8812 - protein, 26 aa, Artificial Sequence
  Synthetic
QVQLQESGGGLVQPGGSLRLSCAASG

SEQ ID NO: 8813 - protein, 26 aa, Artificial Sequence
  Synthetic
DVQLQESGGGLVQPGGSLRLSCAASG

SEQ ID NO: 8814 - protein, 26 aa, Artificial Sequence
  Synthetic
QVQLQESGGGLVQAGGSLRLSCTASV

SEQ ID NO: 8815 - protein, 26 aa, Artificial Sequence
  Synthetic
QVQLQESGGGLVQPGGSLRLSCAASG

SEQ ID NO: 8816 - protein, 26 aa, Artificial Sequence
  Synthetic
QVQLQESGGGLVQPGGSLRLSCAASG

SEQ ID NO: 8817 - protein, 26 aa, Artificial Sequence
  Synthetic
QVQLQESGGGLVQAGGSLRLSCAASG

SEQ ID NO: 8818 - protein, 26 aa, Artificial Sequence
  Synthetic
QVQLQESGGGLVQAGGSLRLSCAASG

SEQ ID NO: 8819 - protein, 25 aa, Artificial Sequence
  Synthetic
VQLVESGGGLVQAGGSLSLSCSASG

SEQ ID NO: 8820 - protein, 26 aa, Artificial Sequence
  Synthetic
QVQLQESGGGLVQPGGSLRLSCAASG

SEQ ID NO: 8821 - protein, 26 aa, Artificial Sequence
  Synthetic
QVQLVESGGGLVQAGGTLKLSCAASG

SEQ ID NO: 8822 - protein, 26 aa, Artificial Sequence
  Synthetic
QVQLVESGGGSVQAGGSLRLSCAASG

SEQ ID NO: 8823 - protein, 26 aa, Artificial Sequence
  Synthetic
QVQLVESGGGLVQPGGSLRLSCAASG

SEQ ID NO: 8824 - protein, 26 aa, Artificial Sequence
  Synthetic
QVQLQESGGGLVQPGGSLRLSCAASG

SEQ ID NO: 8825 - protein, 26 aa, Artificial Sequence
  Synthetic
DVQLQESGGGLVQAGGSLRLSCAASG

SEQ ID NO: 8826 - protein, 26 aa, Artificial Sequence
  Synthetic
QVQLQESGGGLVQAGGSLRLSCAASG

SEQ ID NO: 8827 - protein, 26 aa, Artificial Sequence
  Synthetic
QVQLQESGGGLVQAGDSLRLSCAASG

SEQ ID NO: 8828 - protein, 26 aa, Artificial Sequence
  Synthetic
QVQLVESGGGLVQAGGSLRLSCAASG

SEQ ID NO: 8829 - protein, 26 aa, Artificial Sequence
  Synthetic
QVQLVETGGGLVQPGGSLTLSCAGSG

SEQ ID NO: 8830 - protein, 26 aa, Artificial Sequence
  Synthetic
QVQLVESGGGLVQPGGSLRLHCAASG

SEQ ID NO: 8831 - protein, 26 aa, Artificial Sequence
  Synthetic
QVQLVESGGGLVQAGGSLSLSCAASG

SEQ ID NO: 8832 - protein, 26 aa, Artificial Sequence
  Synthetic
QVQLVESGGGLVQAGGSLRLSCAASG

SEQ ID NO: 8833 - protein, 25 aa, Artificial Sequence
  Synthetic
VQLVETGGGTVQTGGSLRLSCSASG

SEQ ID NO: 8834 - protein, 26 aa, Artificial Sequence
  Synthetic
QVQLVESGGGLVQAGGSLRLSCAASG

SEQ ID NO: 8835 - protein, 26 aa, Artificial Sequence
  Synthetic
DVQLVESGGGLVQPGGSLRLSCAASE

SEQ ID NO: 8836 - protein, 26 aa, Artificial Sequence
  Synthetic
QVQLVESGGGLVRPGGSLRLSCAASG

SEQ ID NO: 8837 - protein, 26 aa, Artificial Sequence
  Synthetic
QVQLVESGGGLVQAGGSLRLSCAASG

SEQ ID NO: 8838 - protein, 26 aa, Artificial Sequence
  Synthetic
QVQLAETGGGLVQAGGSLRLSCAASG

SEQ ID NO: 8839 - protein, 26 aa, Artificial Sequence
  Synthetic
QVQLVESGGRLVQAGDSLRLSCAASG

SEQ ID NO: 8840 - protein, 26 aa, Artificial Sequence
  Synthetic
QVQLQESGGGLVQAGGSLRLSCAASG

SEQ ID NO: 8841 - protein, 26 aa, Artificial Sequence
  Synthetic
QVQLQESGGGLVQPGGSLRLSCAASG

SEQ ID NO: 8842 - protein, 26 aa, Artificial Sequence
  Synthetic
QVQLVETGGGLVQAGGSLRLSCAASG

SEQ ID NO: 8843 - protein, 26 aa, Artificial Sequence
  Synthetic
QVQLVESGGGLVQPGGSLRLSCVASE

SEQ ID NO: 8844 - protein, 26 aa, Artificial Sequence
  Synthetic
QVQLAETGGGLVEPGGSLRLSCAAPE

SEQ ID NO: 8845 - protein, 26 aa, Artificial Sequence
  Synthetic
QVQLQESGGGLVQAGGSLRLSCAASG

SEQ ID NO: 8846 - protein, 26 aa, Artificial Sequence
  Synthetic
QVQLVESGGGSVQAGDSLRLSCTASG

SEQ ID NO: 8847 - protein, 26 aa, Artificial Sequence
  Synthetic
QVQLQESGGGLVQPGGSLRLFCAASG

SEQ ID NO: 8848 - protein, 26 aa, Artificial Sequence
  Synthetic
QVQLQESGGGLVQPGGSLRLSCTAPR

SEQ ID NO: 8849 - protein, 26 aa, Artificial Sequence
  Synthetic
QVQLQESGGGLVQPGGSLRLSCAASG

SEQ ID NO: 8850 - protein, 26 aa, Artificial Sequence
  Synthetic
QVQLQESGGGLVQPGGSLRLSCAASE

SEQ ID NO: 8851 - protein, 26 aa, Artificial Sequence
  Synthetic
QGQLVESGGGLVQAGGSLRLSCAASG

SEQ ID NO: 8852 - protein, 26 aa, Artificial Sequence
  Synthetic
QVQLQESLVGLVQSGGSLRLSCAASR

SEQ ID NO: 8853 - protein, 26 aa, Artificial Sequence
  Synthetic
QVQLQESGGGLVQPGGSLRLSCAASG

SEQ ID NO: 8854 - protein, 26 aa, Artificial Sequence
  Synthetic
QVQLVESGGGLVHPGGSLRLSCAASG

SEQ ID NO: 8855 - protein, 26 aa, Artificial Sequence
  Synthetic
QLQLVESGGGLVQAGGSLRLTCALSE

SEQ ID NO: 8856 - protein, 26 aa, Artificial Sequence
  Synthetic
QLQLVESGGGLVQAGGSLTLSCVASG

SEQ ID NO: 8857 - protein, 26 aa, Artificial Sequence
  Synthetic
QVQLAETGGGLAQPGGSLRLSCAASG

SEQ ID NO: 8858 - protein, 26 aa, Artificial Sequence
  Synthetic
QVQLAESGGGLVQPGGSLRLSCSASG

SEQ ID NO: 8859 - protein, 26 aa, Artificial Sequence
  Synthetic
QVQLAESGGGLVQAGGSLKLSCAASG

SEQ ID NO: 8860 - protein, 26 aa, Artificial Sequence
  Synthetic
QVQLQESGGGLVQAGGSLRLSCAVSG

SEQ ID NO: 8861 - protein, 26 aa, Artificial Sequence
  Synthetic
QVQLQESGGGLVMTGGSLRLSCAVSG

SEQ ID NO: 8862 - protein, 26 aa, Artificial Sequence
  Synthetic
QVQLQESGGGLVQAGGSLRLSCAASG

SEQ ID NO: 8863 - protein, 26 aa, Artificial Sequence
  Synthetic
QLQLVESGGGLVQAGGSLRLSCAASG

SEQ ID NO: 8864 - protein, 26 aa, Artificial Sequence
  Synthetic
QLQLVESGGGLVQPGGSLQLACEASG

SEQ ID NO: 8865 - protein, 26 aa, Artificial Sequence
  Synthetic
EVQLVESGGGSVQAGGYLRLSCAVSG

SEQ ID NO: 8866 - protein, 26 aa, Artificial Sequence
  Synthetic
EVRLEESGGGLVQAGGSLRLVCVAYG

SEQ ID NO: 8867 - protein, 26 aa, Artificial Sequence
  Synthetic
QEQFVETGGGLVQPGGSLTLSCSVYG

SEQ ID NO: 8868 - protein, 26 aa, Artificial Sequence
  Synthetic
QEQLVESGGGLVQPGGSLRLSCAASG

SEQ ID NO: 8869 - protein, 26 aa, Artificial Sequence
  Synthetic
QVQLVESGGGFVQAGGSLNLSCTASG

SEQ ID NO: 8870 - protein, 26 aa, Artificial Sequence
  Synthetic
QLHFVESGGGSVQPGGSLRLTCAAST

SEQ ID NO: 8871 - protein, 26 aa, Artificial Sequence
  Synthetic
QVRPVESGGGSVQPGEALRLSCTQPK

SEQ ID NO: 8872 - protein, 26 aa, Artificial Sequence
  Synthetic
QLQFVESGGDSVQPGGSLRLSCVASG

SEQ ID NO: 8873 - protein, 26 aa, Artificial Sequence
  Synthetic
QVKLVESGGGFVDAGGSLTLSCASSG

SEQ ID NO: 8874 - protein, 26 aa, Artificial Sequence
  Synthetic
QPQVAESGGGLVQPGGSLTLSCVVTG

SEQ ID NO: 8875 - protein, 26 aa, Artificial Sequence
  Synthetic
QLHVVESGGGLVQPGGSLRLSCAASG

SEQ ID NO: 8876 - protein, 26 aa, Artificial Sequence
  Synthetic
QLHVVESGGGLVQPGGSLRLSCKVSG

SEQ ID NO: 8877 - protein, 26 aa, Artificial Sequence
  Synthetic
QLQLVESGGGLVQPGGSLRLSCAASG

SEQ ID NO: 8878 - protein, 26 aa, Artificial Sequence
  Synthetic
QLQLVESGGGLVQPGGSLRLSCAASG

SEQ ID NO: 8879 - protein, 26 aa, Artificial Sequence
  Synthetic
RLHLVESGGGSVQPGGSLRLSCVASG

SEQ ID NO: 8880 - protein, 26 aa, Artificial Sequence
  Synthetic
QVEPVESGGGLVQPGGSLRLSCTSHI

SEQ ID NO: 8881 - protein, 26 aa, Artificial Sequence
  Synthetic
QLQPARAGGNLVQPGGSLRLFCGVSE

SEQ ID NO: 8882 - protein, 26 aa, Artificial Sequence
  Synthetic
QLQLVESGGGLVQPGGSLRLSCVASG

SEQ ID NO: 8883 - protein, 26 aa, Artificial Sequence
  Synthetic
HVQLQQSGGGLVQPGGSLRLSCAASG

SEQ ID NO: 8884 - protein, 26 aa, Artificial Sequence
  Synthetic
QVQLVESGGGSVQPGGSLRLSCAAIG

SEQ ID NO: 8885 - protein, 26 aa, Artificial Sequence
  Synthetic
QVQLVESGGGLVQPGGSLRLSCATSG

SEQ ID NO: 8886 - protein, 26 aa, Artificial Sequence
  Synthetic
DVQLVESGGGLVQAGGSLRLSCAASG

SEQ ID NO: 8887 - protein, 26 aa, Artificial Sequence
  Synthetic
QLQLVESGGGLVQPGGSLRLSCAASA

SEQ ID NO: 8888 - protein, 26 aa, Artificial Sequence
  Synthetic
QVQLVESGGGLVHPGGSLRLSCAPSA

SEQ ID NO: 8889 - protein, 26 aa, Artificial Sequence
  Synthetic
QVQLVESGGGLVQPGGSLRLSCQVSG

SEQ ID NO: 8890 - protein, 26 aa, Artificial Sequence
  Synthetic
QVQLVESGGGLVQVGGSLRLSCVVSG

SEQ ID NO: 8891 - protein, 26 aa, Artificial Sequence
  Synthetic
QVQLVETGGGLVQPGGALRLSCAASV

SEQ ID NO: 8892 - protein, 26 aa, Artificial Sequence
  Synthetic
QVQLVETGGGLVQAGGSLRLSCTASG

SEQ ID NO: 8893 - protein, 26 aa, Artificial Sequence
  Synthetic
QVQLVETGGGLVQAGGSLRLSCAGSG

SEQ ID NO: 8894 - protein, 26 aa, Artificial Sequence
  Synthetic
QVQLQESGGGLVQPGGSLRLSCAASG

SEQ ID NO: 8895 - protein, 26 aa, Artificial Sequence
  Synthetic
QVQLQDSGGGLVQAGGSLRLSCAVSG

SEQ ID NO: 8896 - protein, 26 aa, Artificial Sequence
  Synthetic
QVQLQDSGGGLVQPGGSLRLSCATSG

SEQ ID NO: 8897 - protein, 26 aa, Artificial Sequence
  Synthetic
QVQLQDSGGGLVQAGGSLRLSCTASG

SEQ ID NO: 8898 - protein, 26 aa, Artificial Sequence
  Synthetic
QVQLQESGGGLVQPGGSLRLSCAASG

SEQ ID NO: 8899 - protein, 26 aa, Artificial Sequence
  Synthetic
QVQLVETGGGLAQAGDSLRLSCVEPG

SEQ ID NO: 8900 - protein, 26 aa, Artificial Sequence
  Synthetic
QVQLVESGGGLVQAGGSLRLSCAASG

SEQ ID NO: 8901 - protein, 26 aa, Artificial Sequence
  Synthetic
QVQLVESGGGLVQPGGSLKLSCAASG

SEQ ID NO: 8902 - protein, 25 aa, Artificial Sequence
  Synthetic
QVQLVETGGLVQAGGSLRLSCAASG

SEQ ID NO: 8903 - protein, 26 aa, Artificial Sequence
  Synthetic
QVQLVESGGGLVQPGGSLRLSCAASG

SEQ ID NO: 8904 - protein, 26 aa, Artificial Sequence
  Synthetic
QVQLVESGGGLVQAGGSLRLSCAASG

SEQ ID NO: 8905 - protein, 25 aa, Artificial Sequence
  Synthetic
QVQLVESGGLVQAGGSLRLSCAASG

SEQ ID NO: 8906 - protein, 26 aa, Artificial Sequence
  Synthetic
QVQLVESGGGLVQPGGSLKLSCRASG

SEQ ID NO: 8907 - protein, 26 aa, Artificial Sequence
  Synthetic
QVQLVETGGALVHTGGSLRLSCEVSG

SEQ ID NO: 8908 - protein, 19 aa, Artificial Sequence
  Synthetic
QVQLVETGGSLRLTCVTSG

SEQ ID NO: 8909 - protein, 26 aa, Artificial Sequence
  Synthetic
QVQLVESGGGLVQAGGSLRLSCAASG

SEQ ID NO: 8910 - protein, 26 aa, Artificial Sequence
  Synthetic
QVQLVETGGGLVQAGGSLRLSCVVSS

SEQ ID NO: 8911 - protein, 26 aa, Artificial Sequence
  Synthetic
QLQLVESGGGLVQAGGSLRLSCAASG

SEQ ID NO: 8912 - protein, 26 aa, Artificial Sequence
  Synthetic
QVQLVESGGGLVQAGGSLRLSCAASG

SEQ ID NO: 8913 - protein, 26 aa, Artificial Sequence
  Synthetic
QVQLVESGGGLVQPGGSLRLSCAASG

SEQ ID NO: 8914 - protein, 26 aa, Artificial Sequence
  Synthetic
QVQLVESGGGLVQPGGSLRLSCAASG

SEQ ID NO: 8915 - protein, 26 aa, Artificial Sequence
  Synthetic
QVQLVESGGGLVQPGGSLRLSCAASG

SEQ ID NO: 8916 - protein, 26 aa, Artificial Sequence
  Synthetic
QVQLVESGGGLVQPGGSLSVSCAASG

SEQ ID NO: 8917 - protein, 25 aa, Artificial Sequence
  Synthetic
QVQLVETGGLVQPGGSLRLSCAASG

SEQ ID NO: 8918 - protein, 25 aa, Artificial Sequence
  Synthetic
QVQLVETGGLVQPGGSLRLSCAASR

SEQ ID NO: 8919 - protein, 26 aa, Artificial Sequence
  Synthetic
QVQLVESGGGLVQPGGSLRLSCAAPE

SEQ ID NO: 8920 - protein, 26 aa, Artificial Sequence
  Synthetic
QVQLVESGGGLVQPGGSLGLSCVVAS

SEQ ID NO: 8921 - protein, 26 aa, Artificial Sequence
  Synthetic
QVQLVETGGGLVQPGGSLRLSCAASG

SEQ ID NO: 8922 - protein, 26 aa, Artificial Sequence
  Synthetic
QVQLVESGGGLVQAGNSLRLSCTASG

SEQ ID NO: 8923 - protein, 26 aa, Artificial Sequence
  Synthetic
QVQLVETGGGLVQAGGSLRLSCAASG

SEQ ID NO: 8924 - protein, 26 aa, Artificial Sequence
  Synthetic
QVQLAETGGGLVQAGGSLRLSCSASG

SEQ ID NO: 8925 - protein, 26 aa, Artificial Sequence
  Synthetic
QVQLVESGGGGLVQAGGSLRLSCAAS

SEQ ID NO: 8926 - protein, 26 aa, Artificial Sequence
  Synthetic
QVQLVETGGGLVQAGGTLRLSCAASG

SEQ ID NO: 8927 - protein, 26 aa, Artificial Sequence
  Synthetic
QLQLAESGGGLVQPGGSLRLSCTASG

SEQ ID NO: 8928 - protein, 26 aa, Artificial Sequence
  Synthetic
QVQLAETGGGLVQAGGSLRLSCLASR

SEQ ID NO: 8929 - protein, 26 aa, Artificial Sequence
  Synthetic
QVQLAESGGGLVQAGGSLRLSCAASG

SEQ ID NO: 8930 - protein, 26 aa, Artificial Sequence
  Synthetic
QLQLVESGGGLVQAGGSLRLSCAASG

SEQ ID NO: 8931 - protein, 26 aa, Artificial Sequence
  Synthetic
QVQLVETGGGLVQPGGSLRLSCAASG

SEQ ID NO: 8932 - protein, 26 aa, Artificial Sequence
  Synthetic
QLQLVESGGGLVQRGGSLRLSCAASG

SEQ ID NO: 8933 - protein, 26 aa, Artificial Sequence
  Synthetic
QVQLVESGGGLVQAGGSLRLSCATAG

SEQ ID NO: 8934 - protein, 26 aa, Artificial Sequence
  Synthetic
QLQLVESGGDLVQAGGSLRLSCAASG

SEQ ID NO: 8935 - protein, 26 aa, Artificial Sequence
  Synthetic
QVQLVETGGGLVQAGGSLRLSCAASG

SEQ ID NO: 8936 - protein, 26 aa, Artificial Sequence
  Synthetic
QVQLVETGGGLVQAGGSLRLSCVGSG

SEQ ID NO: 8937 - protein, 26 aa, Artificial Sequence
  Synthetic
QVQLAESGGGLVQAGGSLRLSCAASG

SEQ ID NO: 8938 - protein, 26 aa, Artificial Sequence
  Synthetic
QVQLAETGGGLVQPGGSLRLSCAASG

SEQ ID NO: 8939 - protein, 26 aa, Artificial Sequence
  Synthetic
QVQLAETGGGLVQAGGSLRLSCGASG

SEQ ID NO: 8940 - protein, 26 aa, Artificial Sequence
  Synthetic
QVQLVETGGGTVQIGGSLRLLCSGHG

SEQ ID NO: 8941 - protein, 25 aa, Artificial Sequence
  Synthetic
QVQLAESGGSVQAGGSLRLSCVVSG

SEQ ID NO: 8942 - protein, 26 aa, Artificial Sequence
  Synthetic
QVQLVESGGGLVQPGGSLRLSCAASG

SEQ ID NO: 8943 - protein, 26 aa, Artificial Sequence
  Synthetic
QVQLAESGGGLVQAGGSLRLSCAASG

SEQ ID NO: 8944 - protein, 26 aa, Artificial Sequence
  Synthetic
QLQLVETGGDLVQAGGSLRLSCAAPR

SEQ ID NO: 8945 - protein, 26 aa, Artificial Sequence
  Synthetic
QVQLAQTGGGLVQTGESLKLSCTTSG

SEQ ID NO: 8946 - protein, 26 aa, Artificial Sequence
  Synthetic
QLQLVETGGGLVQTGGSLRLSCAASG

SEQ ID NO: 8947 - protein, 26 aa, Artificial Sequence
  Synthetic
QLQLVETGGGLVQPGGSMRLSCAASG

SEQ ID NO: 8948 - protein, 26 aa, Artificial Sequence
  Synthetic
QVQLVESGGGLVQAGGSLRLSCEASG

SEQ ID NO: 8949 - protein, 26 aa, Artificial Sequence
  Synthetic
QVQLAETGGGLVQPGGARTLSCAASE

SEQ ID NO: 8950 - protein, 26 aa, Artificial Sequence
  Synthetic
QVQLVESGGGLVQPGGSLRLSCVASG

SEQ ID NO: 8951 - protein, 26 aa, Artificial Sequence
  Synthetic
QVQLAESGGGLVQPGGSLRLSCAASG

SEQ ID NO: 8952 - protein, 26 aa, Artificial Sequence
  Synthetic
QVQLVETGGGVVQAGGSLRLSCVASG

SEQ ID NO: 8953 - protein, 26 aa, Artificial Sequence
  Synthetic
QVQLVESGGGLVQPGGSLRLSCAASG

SEQ ID NO: 8954 - protein, 26 aa, Artificial Sequence
  Synthetic
QLQLAETGGGFVQAGGSLRLSCVASG

SEQ ID NO: 8955 - protein, 19 aa, Artificial Sequence
  Synthetic
QLQLVESGGSLKLSCAASG

SEQ ID NO: 8956 - protein, 26 aa, Artificial Sequence
  Synthetic
QLQLAETGGGLVQAGGSLRLSCAASG

SEQ ID NO: 8957 - protein, 26 aa, Artificial Sequence
  Synthetic
QVQLVESGGGLVQAGGSLRLSCAASE

SEQ ID NO: 8958 - protein, 26 aa, Artificial Sequence
  Synthetic
QLQLAETGGGLVQPGGSLRLSCAASG

SEQ ID NO: 8959 - protein, 26 aa, Artificial Sequence
  Synthetic
QVQLVETGGGLVQAGGSLRLSCVASG

SEQ ID NO: 8960 - protein, 26 aa, Artificial Sequence
  Synthetic
QVQLAETGGGLVQPGGSLRLSCAASG

SEQ ID NO: 8961 - protein, 26 aa, Artificial Sequence
  Synthetic
QVQLAETGGGSVQPGGSLGLSCAASG

SEQ ID NO: 8962 - protein, 26 aa, Artificial Sequence
  Synthetic
QVQLAETGGGLVQAGDSLRLSCTASG

SEQ ID NO: 8963 - protein, 26 aa, Artificial Sequence
  Synthetic
QLQLAETGGGLVQAGGSLRLSCAASG

SEQ ID NO: 8964 - protein, 26 aa, Artificial Sequence
  Synthetic
QVQLVETGGGLVQAGGSLRLSCAASG

SEQ ID NO: 8965 - protein, 26 aa, Artificial Sequence
  Synthetic
QVQLAESGGGLVQAGGSLRLSCATSG

SEQ ID NO: 8966 - protein, 26 aa, Artificial Sequence
  Synthetic
QVQLAESGGGLAQSGGSLRLSCVASG

SEQ ID NO: 8967 - protein, 26 aa, Artificial Sequence
  Synthetic
EVQLQASGGGSVQPGGSLRLSCAASG

SEQ ID NO: 8968 - protein, 26 aa, Artificial Sequence
  Synthetic
QVQLMESGGGLVQPGGSLRLSCAASG

SEQ ID NO: 8969 - protein, 26 aa, Artificial Sequence
  Synthetic
QLQLVESGGGLVQPGGSLRLSCAASG

SEQ ID NO: 8970 - protein, 26 aa, Artificial Sequence
  Synthetic
QLQLVESGGGLVRAGGSLRLSCAASG

SEQ ID NO: 8971 - protein, 26 aa, Artificial Sequence
  Synthetic
QVQLVESGGGLVQAGGSLRLSCAASG

SEQ ID NO: 8972 - protein, 26 aa, Artificial Sequence
  Synthetic
QVQLMESGGGLVQAGGSLRLSCAASG

SEQ ID NO: 8973 - protein, 26 aa, Artificial Sequence
  Synthetic
QVQLMESGGGLVQAGGSLRLSCAASG

SEQ ID NO: 8974 - protein, 26 aa, Artificial Sequence
  Synthetic
QLQLVESGGGLVQPGGSLRLSCAASG

SEQ ID NO: 8975 - protein, 7 aa, Artificial Sequence
  Synthetic
YTFSHRY

SEQ ID NO: 8976 - protein, 7 aa, Artificial Sequence
  Synthetic
YTFSQEF

SEQ ID NO: 8977 - protein, 7 aa, Artificial Sequence
  Synthetic
YTDSRYC

SEQ ID NO: 8978 - protein, 7 aa, Artificial Sequence
  Synthetic
FTFSMHA

SEQ ID NO: 8979 - protein, 7 aa, Artificial Sequence
  Synthetic
STISSVA

SEQ ID NO: 8980 - protein, 7 aa, Artificial Sequence
  Synthetic
RTFSSYG

SEQ ID NO: 8981 - protein, 7 aa, Artificial Sequence
  Synthetic
KMSSRRC

SEQ ID NO: 8982 - protein, 7 aa, Artificial Sequence
  Synthetic
RTGTIYS

SEQ ID NO: 8983 - protein, 7 aa, Artificial Sequence
  Synthetic
HTYSTYC

SEQ ID NO: 8984 - protein, 7 aa, Artificial Sequence
  Synthetic
RTYSTYA

SEQ ID NO: 8985 - protein, 7 aa, Artificial Sequence
  Synthetic
STFSIYT

SEQ ID NO: 8986 - protein, 8 aa, Artificial Sequence
  Synthetic
RSSFSRYF

SEQ ID NO: 8987 - protein, 7 aa, Artificial Sequence
  Synthetic
STFRINR

SEQ ID NO: 8988 - protein, 7 aa, Artificial Sequence
  Synthetic
STFSINV

SEQ ID NO: 8989 - protein, 7 aa, Artificial Sequence
  Synthetic
SIFSIDG

SEQ ID NO: 8990 - protein, 7 aa, Artificial Sequence
  Synthetic
IVFRVST

SEQ ID NO: 8991 - protein, 7 aa, Artificial Sequence
  Synthetic
RTFSNAR

SEQ ID NO: 8992 - protein, 7 aa, Artificial Sequence
  Synthetic
RTLSSYA

SEQ ID NO: 8993 - protein, 7 aa, Artificial Sequence
  Synthetic
SIFSNHA

SEQ ID NO: 8994 - protein, 7 aa, Artificial Sequence
  Synthetic
RTFSTYN

SEQ ID NO: 8995 - protein, 7 aa, Artificial Sequence
  Synthetic
YTYRSTC

SEQ ID NO: 8996 - protein, 7 aa, Artificial Sequence
  Synthetic
YTYENRY

SEQ ID NO: 8997 - protein, 7 aa, Artificial Sequence
  Synthetic
YSVSIGC

SEQ ID NO: 8998 - protein, 7 aa, Artificial Sequence
  Synthetic
ITYRMYC

SEQ ID NO: 8999 - protein, 7 aa, Artificial Sequence
  Synthetic
STYSPCT

SEQ ID NO: 9000 - protein, 7 aa, Artificial Sequence
  Synthetic
STYRRVF

SEQ ID NO: 9001 - protein, 7 aa, Artificial Sequence
  Synthetic
RPFSSFA

SEQ ID NO: 9002 - protein, 7 aa, Artificial Sequence
  Synthetic
YDNDNYC

SEQ ID NO: 9003 - protein, 11 aa, Artificial Sequence
  Synthetic
DTAAYTDDGYC

SEQ ID NO: 9004 - protein, 7 aa, Artificial Sequence
  Synthetic
LTDSTCG

SEQ ID NO: 9005 - protein, 7 aa, Artificial Sequence
  Synthetic
NIYRRNY

SEQ ID NO: 9006 - protein, 7 aa, Artificial Sequence
  Synthetic
HTLRSHY

SEQ ID NO: 9007 - protein, 7 aa, Artificial Sequence
  Synthetic
FTLDEAD

SEQ ID NO: 9008 - protein, 7 aa, Artificial Sequence
  Synthetic
VASERCA

SEQ ID NO: 9009 - protein, 7 aa, Artificial Sequence
  Synthetic
YTISTDC

SEQ ID NO: 9010 - protein, 7 aa, Artificial Sequence
  Synthetic
LIYMSNC

SEQ ID NO: 9011 - protein, 7 aa, Artificial Sequence
  Synthetic
DVYSRVC

SEQ ID NO: 9012 - protein, 7 aa, Artificial Sequence
  Synthetic
ITHSPVC

SEQ ID NO: 9013 - protein, 7 aa, Artificial Sequence
  Synthetic
YKDDFNC

SEQ ID NO: 9014 - protein, 7 aa, Artificial Sequence
  Synthetic
SISSRNA

SEQ ID NO: 9015 - protein, 7 aa, Artificial Sequence
  Synthetic
DSGVNYC

SEQ ID NO: 9016 - protein, 7 aa, Artificial Sequence
  Synthetic
YTVSSHC

SEQ ID NO: 9017 - protein, 7 aa, Artificial Sequence
  Synthetic
FTSSRRC

SEQ ID NO: 9018 - protein, 6 aa, Artificial Sequence
  Synthetic
NTIDNC

SEQ ID NO: 9019 - protein, 7 aa, Artificial Sequence
  Synthetic
YTYASAC

SEQ ID NO: 9020 - protein, 7 aa, Artificial Sequence
  Synthetic
YVNSPNC

SEQ ID NO: 9021 - protein, 7 aa, Artificial Sequence
  Synthetic
DTYSRRC

SEQ ID NO: 9022 - protein, 9 aa, Artificial Sequence
  Synthetic
SDITYSTDC

SEQ ID NO: 9023 - protein, 7 aa, Artificial Sequence
  Synthetic
YIYSTYC

SEQ ID NO: 9024 - protein, 7 aa, Artificial Sequence
  Synthetic
YTYSSAC

SEQ ID NO: 9025 - protein, 7 aa, Artificial Sequence
  Synthetic
YTFTNCA

SEQ ID NO: 9026 - protein, 7 aa, Artificial Sequence
  Synthetic
YTFLQLL

SEQ ID NO: 9027 - protein, 9 aa, Artificial Sequence
  Synthetic
SGYTESVKW

SEQ ID NO: 9028 - protein, 7 aa, Artificial Sequence
  Synthetic
YTYSSNC

SEQ ID NO: 9029 - protein, 7 aa, Artificial Sequence
  Synthetic
YTYSSDS

SEQ ID NO: 9030 - protein, 7 aa, Artificial Sequence
  Synthetic
YTYSSAC

SEQ ID NO: 9031 - protein, 7 aa, Artificial Sequence
  Synthetic
YAYVSNC

SEQ ID NO: 9032 - protein, 7 aa, Artificial Sequence
  Synthetic
DGYMRNC

SEQ ID NO: 9033 - protein, 7 aa, Artificial Sequence
  Synthetic
YTYSSNY

SEQ ID NO: 9034 - protein, 7 aa, Artificial Sequence
  Synthetic
HISSTCG

SEQ ID NO: 9035 - protein, 7 aa, Artificial Sequence
  Synthetic
YTYSRYY

SEQ ID NO: 9036 - protein, 7 aa, Artificial Sequence
  Synthetic
YTYGSNF

SEQ ID NO: 9037 - protein, 7 aa, Artificial Sequence
  Synthetic
YVYISYC

SEQ ID NO: 9038 - protein, 7 aa, Artificial Sequence
  Synthetic
YTYSSNC

SEQ ID NO: 9039 - protein, 7 aa, Artificial Sequence
  Synthetic
YRTSNYC

SEQ ID NO: 9040 - protein, 7 aa, Artificial Sequence
  Synthetic
YTYSSYC

SEQ ID NO: 9041 - protein, 8 aa, Artificial Sequence
  Synthetic
YTYSSSNC

SEQ ID NO: 9042 - protein, 7 aa, Artificial Sequence
  Synthetic
YTYSRMC

SEQ ID NO: 9043 - protein, 7 aa, Artificial Sequence
  Synthetic
YTYSSYC

SEQ ID NO: 9044 - protein, 7 aa, Artificial Sequence
  Synthetic
FTFDDSD

SEQ ID NO: 9045 - protein, 7 aa, Artificial Sequence
  Synthetic
YTYSSNC

SEQ ID NO: 9046 - protein, 7 aa, Artificial Sequence
  Synthetic
YTYSSYC

SEQ ID NO: 9047 - protein, 7 aa, Artificial Sequence
  Synthetic
HTFSVLS

SEQ ID NO: 9048 - protein, 7 aa, Artificial Sequence
  Synthetic
YIFSSCG

SEQ ID NO: 9049 - protein, 7 aa, Artificial Sequence
  Synthetic
FTFDDYT

SEQ ID NO: 9050 - protein, 7 aa, Artificial Sequence
  Synthetic
FTFDDCT

SEQ ID NO: 9051 - protein, 7 aa, Artificial Sequence
  Synthetic
YMYSSKA

SEQ ID NO: 9052 - protein, 7 aa, Artificial Sequence
  Synthetic
GAYRNAC

SEQ ID NO: 9053 - protein, 7 aa, Artificial Sequence
  Synthetic
PTYSSYF

SEQ ID NO: 9054 - protein, 7 aa, Artificial Sequence
  Synthetic
YTFSDYC

SEQ ID NO: 9055 - protein, 7 aa, Artificial Sequence
  Synthetic
YTFSDYC

SEQ ID NO: 9056 - protein, 7 aa, Artificial Sequence
  Synthetic
MTFSVYN

SEQ ID NO: 9057 - protein, 7 aa, Artificial Sequence
  Synthetic
DTRRINN

SEQ ID NO: 9058 - protein, 7 aa, Artificial Sequence
  Synthetic
NHDSFQT

SEQ ID NO: 9059 - protein, 7 aa, Artificial Sequence
  Synthetic
YTRNGCV

SEQ ID NO: 9060 - protein, 7 aa, Artificial Sequence
  Synthetic
STVTIGS

SEQ ID NO: 9061 - protein, 7 aa, Artificial Sequence
  Synthetic
DTYSSAC

SEQ ID NO: 9062 - protein, 7 aa, Artificial Sequence
  Synthetic
YAYDTYY

SEQ ID NO: 9063 - protein, 7 aa, Artificial Sequence
  Synthetic
YTYCSYG

SEQ ID NO: 9064 - protein, 7 aa, Artificial Sequence
  Synthetic
YTCYTDD

SEQ ID NO: 9065 - protein, 10 aa, Artificial Sequence
  Synthetic
YIASGCGMGG

SEQ ID NO: 9066 - protein, 7 aa, Artificial Sequence
  Synthetic
YIFSTCG

SEQ ID NO: 9067 - protein, 7 aa, Artificial Sequence
  Synthetic
YTDRNYC

SEQ ID NO: 9068 - protein, 7 aa, Artificial Sequence
  Synthetic
YRLNLNC

SEQ ID NO: 9069 - protein, 7 aa, Artificial Sequence
  Synthetic
FSFADSD

SEQ ID NO: 9070 - protein, 7 aa, Artificial Sequence
  Synthetic
DTFSGYL

SEQ ID NO: 9071 - protein, 10 aa, Artificial Sequence
  Synthetic
YTYNTYRRFC

SEQ ID NO: 9072 - protein, 7 aa, Artificial Sequence
  Synthetic
LTISNYC

SEQ ID NO: 9073 - protein, 10 aa, Artificial Sequence
  Synthetic
FTTTSYSSTC

SEQ ID NO: 9074 - protein, 7 aa, Artificial Sequence
  Synthetic
YTSSKYC

SEQ ID NO: 9075 - protein, 7 aa, Artificial Sequence
  Synthetic
VTSTRPC

SEQ ID NO: 9076 - protein, 7 aa, Artificial Sequence
  Synthetic
YTHRRYC

SEQ ID NO: 9077 - protein, 7 aa, Artificial Sequence
  Synthetic
YTSNRNV

SEQ ID NO: 9078 - protein, 7 aa, Artificial Sequence
  Synthetic
YTHGSYC

SEQ ID NO: 9079 - protein, 7 aa, Artificial Sequence
  Synthetic
FTFGAYY

SEQ ID NO: 9080 - protein, 7 aa, Artificial Sequence
  Synthetic
FSFSSNV

SEQ ID NO: 9081 - protein, 7 aa, Artificial Sequence
  Synthetic
YTDCKYD

SEQ ID NO: 9082 - protein, 7 aa, Artificial Sequence
  Synthetic
YAANRYT

SEQ ID NO: 9083 - protein, 7 aa, Artificial Sequence
  Synthetic
YLFSRHA

SEQ ID NO: 9084 - protein, 7 aa, Artificial Sequence
  Synthetic
FVFDDSD

SEQ ID NO: 9085 - protein, 8 aa, Artificial Sequence
  Synthetic
HRTGTTCS

SEQ ID NO: 9086 - protein, 7 aa, Artificial Sequence
  Synthetic
IIASNLC

SEQ ID NO: 9087 - protein, 7 aa, Artificial Sequence
  Synthetic
FSFDDSE

SEQ ID NO: 9088 - protein, 6 aa, Artificial Sequence
  Synthetic
FGSEYC

SEQ ID NO: 9089 - protein, 7 aa, Artificial Sequence
  Synthetic
YSYSTYC

SEQ ID NO: 9090 - protein, 7 aa, Artificial Sequence
  Synthetic
YTDSVKW

SEQ ID NO: 9091 - protein, 7 aa, Artificial Sequence
  Synthetic
GPTCSHQ

SEQ ID NO: 9092 - protein, 7 aa, Artificial Sequence
  Synthetic
YTYMDYC

SEQ ID NO: 9093 - protein, 7 aa, Artificial Sequence
  Synthetic
DPGINLY

SEQ ID NO: 9094 - protein, 7 aa, Artificial Sequence
  Synthetic
LSNRQLC

SEQ ID NO: 9095 - protein, 7 aa, Artificial Sequence
  Synthetic
PLYSAYC

SEQ ID NO: 9096 - protein, 7 aa, Artificial Sequence
  Synthetic
DSDSSFC

SEQ ID NO: 9097 - protein, 7 aa, Artificial Sequence
  Synthetic
YTLASDL

SEQ ID NO: 9098 - protein, 7 aa, Artificial Sequence
  Synthetic
HTANKWC

SEQ ID NO: 9099 - protein, 9 aa, Artificial Sequence
  Synthetic
YTDSENYYC

SEQ ID NO: 9100 - protein, 7 aa, Artificial Sequence
  Synthetic
PTICITD

SEQ ID NO: 9101 - protein, 7 aa, Artificial Sequence
  Synthetic
FASTTNC

SEQ ID NO: 9102 - protein, 4 aa, Artificial Sequence
  Synthetic
YSYC

SEQ ID NO: 9103 - protein, 7 aa, Artificial Sequence
  Synthetic
NMGRFNS

SEQ ID NO: 9104 - protein, 8 aa, Artificial Sequence
  Synthetic
SGYVSSYY

SEQ ID NO: 9105 - protein, 7 aa, Artificial Sequence
  Synthetic
YIFTGCG

SEQ ID NO: 9106 - protein, 7 aa, Artificial Sequence
  Synthetic
YMYVSTS

SEQ ID NO: 9107 - protein, 8 aa, Artificial Sequence
  Synthetic
DTTNNYYC

SEQ ID NO: 9108 - protein, 7 aa, Artificial Sequence
  Synthetic
VPDEGNC

SEQ ID NO: 9109 - protein, 7 aa, Artificial Sequence
  Synthetic
NIYCDYD

SEQ ID NO: 9110 - protein, 7 aa, Artificial Sequence
  Synthetic
ITYPSCC

SEQ ID NO: 9111 - protein, 7 aa, Artificial Sequence
  Synthetic
YTYSTYY

SEQ ID NO: 9112 - protein, 10 aa, Artificial Sequence
  Synthetic
SRKNIASTDC

SEQ ID NO: 9113 - protein, 7 aa, Artificial Sequence
  Synthetic
FIFDASD

SEQ ID NO: 9114 - protein, 7 aa, Artificial Sequence
  Synthetic
FTVSDYS

SEQ ID NO: 9115 - protein, 7 aa, Artificial Sequence
  Synthetic
DTYTGNC

SEQ ID NO: 9116 - protein, 7 aa, Artificial Sequence
  Synthetic
YTYSSNC

SEQ ID NO: 9117 - protein, 7 aa, Artificial Sequence
  Synthetic
VTYSNRC

SEQ ID NO: 9118 - protein, 7 aa, Artificial Sequence
  Synthetic
YAYSSFC

SEQ ID NO: 9119 - protein, 7 aa, Artificial Sequence
  Synthetic
YTSSVYC

SEQ ID NO: 9120 - protein, 7 aa, Artificial Sequence
  Synthetic
YTFGIYP

SEQ ID NO: 9121 - protein, 7 aa, Artificial Sequence
  Synthetic
YTYSDYC

SEQ ID NO: 9122 - protein, 7 aa, Artificial Sequence
  Synthetic
FAYTSYC

SEQ ID NO: 9123 - protein, 7 aa, Artificial Sequence
  Synthetic
YTYSNFC

SEQ ID NO: 9124 - protein, 7 aa, Artificial Sequence
  Synthetic
YTRCRYD

SEQ ID NO: 9125 - protein, 7 aa, Artificial Sequence
  Synthetic
YTDRYCT

SEQ ID NO: 9126 - protein, 7 aa, Artificial Sequence
  Synthetic
FSFSRYC

SEQ ID NO: 9127 - protein, 7 aa, Artificial Sequence
  Synthetic
YTFSSNI

SEQ ID NO: 9128 - protein, 7 aa, Artificial Sequence
  Synthetic
YIDRRDC

SEQ ID NO: 9129 - protein, 7 aa, Artificial Sequence
  Synthetic
TTDIFAY

SEQ ID NO: 9130 - protein, 7 aa, Artificial Sequence
  Synthetic
STSRLFC

SEQ ID NO: 9131 - protein, 7 aa, Artificial Sequence
  Synthetic
DIDKMSC

SEQ ID NO: 9132 - protein, 8 aa, Artificial Sequence
  Synthetic
YVYTEYTC

SEQ ID NO: 9133 - protein, 9 aa, Artificial Sequence
  Synthetic
FTFTASKWA

SEQ ID NO: 9134 - protein, 7 aa, Artificial Sequence
  Synthetic
HRFIHNC

SEQ ID NO: 9135 - protein, 7 aa, Artificial Sequence
  Synthetic
ITYSNNC

SEQ ID NO: 9136 - protein, 7 aa, Artificial Sequence
  Synthetic
LTDSFYC

SEQ ID NO: 9137 - protein, 7 aa, Artificial Sequence
  Synthetic
LTYSLCT

SEQ ID NO: 9138 - protein, 9 aa, Artificial Sequence
  Synthetic
DTGTGGHYC

SEQ ID NO: 9139 - protein, 7 aa, Artificial Sequence
  Synthetic
DTGSLHY

SEQ ID NO: 9140 - protein, 10 aa, Artificial Sequence
  Synthetic
ATYNLYNGKC

SEQ ID NO: 9141 - protein, 7 aa, Artificial Sequence
  Synthetic
SIDNGYC

SEQ ID NO: 9142 - protein, 7 aa, Artificial Sequence
  Synthetic
YTSSRYC

SEQ ID NO: 9143 - protein, 7 aa, Artificial Sequence
  Synthetic
FDFADSD

SEQ ID NO: 9144 - protein, 7 aa, Artificial Sequence
  Synthetic
DTARNYY

SEQ ID NO: 9145 - protein, 7 aa, Artificial Sequence
  Synthetic
ATSRSSC

SEQ ID NO: 9146 - protein, 9 aa, Artificial Sequence
  Synthetic
SGISYIMCC

SEQ ID NO: 9147 - protein, 7 aa, Artificial Sequence
  Synthetic
ANYCSYD

SEQ ID NO: 9148 - protein, 7 aa, Artificial Sequence
  Synthetic
FTHSSYC

SEQ ID NO: 9149 - protein, 6 aa, Artificial Sequence
  Synthetic
FDGIHC

SEQ ID NO: 9150 - protein, 9 aa, Artificial Sequence
  Synthetic
YTYTSSSGC

SEQ ID NO: 9151 - protein, 6 aa, Artificial Sequence
  Synthetic
DTYNKR

SEQ ID NO: 9152 - protein, 7 aa, Artificial Sequence
  Synthetic
DTDNLYS

SEQ ID NO: 9153 - protein, 7 aa, Artificial Sequence
  Synthetic
TTNLNMC

SEQ ID NO: 9154 - protein, 7 aa, Artificial Sequence
  Synthetic
YRYSFCS

SEQ ID NO: 9155 - protein, 7 aa, Artificial Sequence
  Synthetic
LTFDNVH

SEQ ID NO: 9156 - protein, 7 aa, Artificial Sequence
  Synthetic
FTETTCV

SEQ ID NO: 9157 - protein, 7 aa, Artificial Sequence
  Synthetic
YTYDSNI

SEQ ID NO: 9158 - protein, 7 aa, Artificial Sequence
  Synthetic
YTDSSGC

SEQ ID NO: 9159 - protein, 7 aa, Artificial Sequence
  Synthetic
FTFSKCS

SEQ ID NO: 9160 - protein, 7 aa, Artificial Sequence
  Synthetic
FTNSDRC

SEQ ID NO: 9161 - protein, 8 aa, Artificial Sequence
  Synthetic
FTSNSDYC

SEQ ID NO: 9162 - protein, 7 aa, Artificial Sequence
  Synthetic
HLDSEYC

SEQ ID NO: 9163 - protein, 7 aa, Artificial Sequence
  Synthetic
YIYSSSC

SEQ ID NO: 9164 - protein, 7 aa, Artificial Sequence
  Synthetic
WISSRYC

SEQ ID NO: 9165 - protein, 7 aa, Artificial Sequence
  Synthetic
FTFDSSD

SEQ ID NO: 9166 - protein, 7 aa, Artificial Sequence
  Synthetic
TFDINAC

SEQ ID NO: 9167 - protein, 9 aa, Artificial Sequence
  Synthetic
SGYTESVKW

SEQ ID NO: 9168 - protein, 7 aa, Artificial Sequence
  Synthetic
YIYSNYC

SEQ ID NO: 9169 - protein, 7 aa, Artificial Sequence
  Synthetic
YTYRSYC

SEQ ID NO: 9170 - protein, 9 aa, Artificial Sequence
  Synthetic
DSITANYYD

SEQ ID NO: 9171 - protein, 7 aa, Artificial Sequence
  Synthetic
YGSCKYD

SEQ ID NO: 9172 - protein, 7 aa, Artificial Sequence
  Synthetic
YSNCPLT

SEQ ID NO: 9173 - protein, 7 aa, Artificial Sequence
  Synthetic
DSFSRFA

SEQ ID NO: 9174 - protein, 7 aa, Artificial Sequence
  Synthetic
FSFSTSC

SEQ ID NO: 9175 - protein, 7 aa, Artificial Sequence
  Synthetic
YTYGSFC

SEQ ID NO: 9176 - protein, 4 aa, Artificial Sequence
  Synthetic
DTGT

SEQ ID NO: 9177 - protein, 7 aa, Artificial Sequence
  Synthetic
IPLNGYY

SEQ ID NO: 9178 - protein, 7 aa, Artificial Sequence
  Synthetic
ATYSDYS

SEQ ID NO: 9179 - protein, 7 aa, Artificial Sequence
  Synthetic
FPYSTFC

SEQ ID NO: 9180 - protein, 7 aa, Artificial Sequence
  Synthetic
YTITDYC

SEQ ID NO: 9181 - protein, 7 aa, Artificial Sequence
  Synthetic
HTDSSTC

SEQ ID NO: 9182 - protein, 9 aa, Artificial Sequence
  Synthetic
GTPDRVPKS

SEQ ID NO: 9183 - protein, 7 aa, Artificial Sequence
  Synthetic
SPSSTYC

SEQ ID NO: 9184 - protein, 8 aa, Artificial Sequence
  Synthetic
KYMPCTYD

SEQ ID NO: 9185 - protein, 7 aa, Artificial Sequence
  Synthetic
AAFRSSR

SEQ ID NO: 9186 - protein, 7 aa, Artificial Sequence
  Synthetic
VNHCINV

SEQ ID NO: 9187 - protein, 7 aa, Artificial Sequence
  Synthetic
YTFSSYP

SEQ ID NO: 9188 - protein, 7 aa, Artificial Sequence
  Synthetic
YTYSSCT

SEQ ID NO: 9189 - protein, 7 aa, Artificial Sequence
  Synthetic
NTLCTYD

SEQ ID NO: 9190 - protein, 4 aa, Artificial Sequence
  Synthetic
YTDT

SEQ ID NO: 9191 - protein, 7 aa, Artificial Sequence
  Synthetic
YTYTRRC

SEQ ID NO: 9192 - protein, 7 aa, Artificial Sequence
  Synthetic
YTVSTYC

SEQ ID NO: 9193 - protein, 7 aa, Artificial Sequence
  Synthetic
ITFGSHC

SEQ ID NO: 9194 - protein, 7 aa, Artificial Sequence
  Synthetic
YTASTYC

SEQ ID NO: 9195 - protein, 7 aa, Artificial Sequence
  Synthetic
YPHPYLH

SEQ ID NO: 9196 - protein, 7 aa, Artificial Sequence
  Synthetic
FTYSRKY

SEQ ID NO: 9197 - protein, 4 aa, Artificial Sequence
  Synthetic
YTYI

SEQ ID NO: 9198 - protein, 7 aa, Artificial Sequence
  Synthetic
YKDRNYC

SEQ ID NO: 9199 - protein, 7 aa, Artificial Sequence
  Synthetic
YTIGPYC

SEQ ID NO: 9200 - protein, 7 aa, Artificial Sequence
  Synthetic
VTYKNYC

SEQ ID NO: 9201 - protein, 7 aa, Artificial Sequence
  Synthetic
STDSIEY

SEQ ID NO: 9202 - protein, 7 aa, Artificial Sequence
  Synthetic
YPWTYIY

SEQ ID NO: 9203 - protein, 10 aa, Artificial Sequence
  Synthetic
GSEYSYSTFS

SEQ ID NO: 9204 - protein, 7 aa, Artificial Sequence
  Synthetic
DTFSSYS

SEQ ID NO: 9205 - protein, 7 aa, Artificial Sequence
  Synthetic
YTQSSAC

SEQ ID NO: 9206 - protein, 7 aa, Artificial Sequence
  Synthetic
FTFSHGY

SEQ ID NO: 9207 - protein, 7 aa, Artificial Sequence
  Synthetic
YQYSLLC

SEQ ID NO: 9208 - protein, 6 aa, Artificial Sequence
  Synthetic
YIPSAN

SEQ ID NO: 9209 - protein, 7 aa, Artificial Sequence
  Synthetic
FPVNRYS

SEQ ID NO: 9210 - protein, 7 aa, Artificial Sequence
  Synthetic
YHHPYIY

SEQ ID NO: 9211 - protein, 4 aa, Artificial Sequence
  Synthetic
DYYA

SEQ ID NO: 9212 - protein, 7 aa, Artificial Sequence
  Synthetic
FTFDDSD

SEQ ID NO: 9213 - protein, 7 aa, Artificial Sequence
  Synthetic
YIYSTYC

SEQ ID NO: 9214 - protein, 7 aa, Artificial Sequence
  Synthetic
YAVSLYS

SEQ ID NO: 9215 - protein, 4 aa, Artificial Sequence
  Synthetic
NTGR

SEQ ID NO: 9216 - protein, 7 aa, Artificial Sequence
  Synthetic
YIFNSCG

SEQ ID NO: 9217 - protein, 7 aa, Artificial Sequence
  Synthetic
ATYCTYD

SEQ ID NO: 9218 - protein, 7 aa, Artificial Sequence
  Synthetic
YDFSANN

SEQ ID NO: 9219 - protein, 7 aa, Artificial Sequence
  Synthetic
YTFSSYS

SEQ ID NO: 9220 - protein, 7 aa, Artificial Sequence
  Synthetic
YTSSMNA

SEQ ID NO: 9221 - protein, 7 aa, Artificial Sequence
  Synthetic
FPFNGYC

SEQ ID NO: 9222 - protein, 7 aa, Artificial Sequence
  Synthetic
YTYSSAR

SEQ ID NO: 9223 - protein, 7 aa, Artificial Sequence
  Synthetic
YTISGIC

SEQ ID NO: 9224 - protein, 7 aa, Artificial Sequence
  Synthetic
YTISKNR

SEQ ID NO: 9225 - protein, 7 aa, Artificial Sequence
  Synthetic
ITYCTGD

SEQ ID NO: 9226 - protein, 7 aa, Artificial Sequence
  Synthetic
FTFANSV

SEQ ID NO: 9227 - protein, 7 aa, Artificial Sequence
  Synthetic
NTYSTNL

SEQ ID NO: 9228 - protein, 7 aa, Artificial Sequence
  Synthetic
STYSGNC

SEQ ID NO: 9229 - protein, 7 aa, Artificial Sequence
  Synthetic
YTSGRNY

SEQ ID NO: 9230 - protein, 7 aa, Artificial Sequence
  Synthetic
YTTCNSD

SEQ ID NO: 9231 - protein, 7 aa, Artificial Sequence
  Synthetic
YTHCNYG

SEQ ID NO: 9232 - protein, 7 aa, Artificial Sequence
  Synthetic
YTFCSYD

SEQ ID NO: 9233 - protein, 7 aa, Artificial Sequence
  Synthetic
YTYCSYD

SEQ ID NO: 9234 - protein, 7 aa, Artificial Sequence
  Synthetic
FTFSWAY

SEQ ID NO: 9235 - protein, 7 aa, Artificial Sequence
  Synthetic
FTFDDSD

SEQ ID NO: 9236 - protein, 7 aa, Artificial Sequence
  Synthetic
FTYSTNC

SEQ ID NO: 9237 - protein, 7 aa, Artificial Sequence
  Synthetic
HTYCSYD

SEQ ID NO: 9238 - protein, 7 aa, Artificial Sequence
  Synthetic
YTTSSCS

SEQ ID NO: 9239 - protein, 7 aa, Artificial Sequence
  Synthetic
YTYSSYC

SEQ ID NO: 9240 - protein, 7 aa, Artificial Sequence
  Synthetic
YTYCRYD

SEQ ID NO: 9241 - protein, 7 aa, Artificial Sequence
  Synthetic
YTACSYD

SEQ ID NO: 9242 - protein, 7 aa, Artificial Sequence
  Synthetic
FTARSYF

SEQ ID NO: 9243 - protein, 7 aa, Artificial Sequence
  Synthetic
YTYRSNY

SEQ ID NO: 9244 - protein, 7 aa, Artificial Sequence
  Synthetic
GTYSTNY

SEQ ID NO: 9245 - protein, 8 aa, Artificial Sequence
  Synthetic
YIYCGYSI

SEQ ID NO: 9246 - protein, 7 aa, Artificial Sequence
  Synthetic
KTYCNYD

SEQ ID NO: 9247 - protein, 7 aa, Artificial Sequence
  Synthetic
YRVCNSD

SEQ ID NO: 9248 - protein, 7 aa, Artificial Sequence
  Synthetic
YKFSICG

SEQ ID NO: 9249 - protein, 7 aa, Artificial Sequence
  Synthetic
YTYNTYC

SEQ ID NO: 9250 - protein, 7 aa, Artificial Sequence
  Synthetic
YTASYIY

SEQ ID NO: 9251 - protein, 8 aa, Artificial Sequence
  Synthetic
YIPFRDYD

SEQ ID NO: 9252 - protein, 7 aa, Artificial Sequence
  Synthetic
DTSGTYC

SEQ ID NO: 9253 - protein, 5 aa, Artificial Sequence
  Synthetic
YDTYC

SEQ ID NO: 9254 - protein, 7 aa, Artificial Sequence
  Synthetic
FTFDDSE

SEQ ID NO: 9255 - protein, 7 aa, Artificial Sequence
  Synthetic
VTYSSNY

SEQ ID NO: 9256 - protein, 7 aa, Artificial Sequence
  Synthetic
YSTNRCI

SEQ ID NO: 9257 - protein, 7 aa, Artificial Sequence
  Synthetic
STYCDID

SEQ ID NO: 9258 - protein, 7 aa, Artificial Sequence
  Synthetic
LPSDVVA

SEQ ID NO: 9259 - protein, 7 aa, Artificial Sequence
  Synthetic
LTISTAC

SEQ ID NO: 9260 - protein, 7 aa, Artificial Sequence
  Synthetic
YTYSSYC

SEQ ID NO: 9261 - protein, 7 aa, Artificial Sequence
  Synthetic
FTFDDSD

SEQ ID NO: 9262 - protein, 7 aa, Artificial Sequence
  Synthetic
YTSCPGN

SEQ ID NO: 9263 - protein, 7 aa, Artificial Sequence
  Synthetic
NVDSNNC

SEQ ID NO: 9264 - protein, 8 aa, Artificial Sequence
  Synthetic
DTIRSTSM

SEQ ID NO: 9265 - protein, 7 aa, Artificial Sequence
  Synthetic
YTGSWCS

SEQ ID NO: 9266 - protein, 7 aa, Artificial Sequence
  Synthetic
YTGTTCR

SEQ ID NO: 9267 - protein, 9 aa, Artificial Sequence
  Synthetic
DSRSGDILA

SEQ ID NO: 9268 - protein, 7 aa, Artificial Sequence
  Synthetic
YTSSYPC

SEQ ID NO: 9269 - protein, 4 aa, Artificial Sequence
  Synthetic
SPYC

SEQ ID NO: 9270 - protein, 7 aa, Artificial Sequence
  Synthetic
YTGILTC

SEQ ID NO: 9271 - protein, 4 aa, Artificial Sequence
  Synthetic
PINT

SEQ ID NO: 9272 - protein, 7 aa, Artificial Sequence
  Synthetic
FTYTAYT

SEQ ID NO: 9273 - protein, 7 aa, Artificial Sequence
  Synthetic
YTNDNYC

SEQ ID NO: 9274 - protein, 7 aa, Artificial Sequence
  Synthetic
NTLTVNC

SEQ ID NO: 9275 - protein, 4 aa, Artificial Sequence
  Synthetic
FTYC

SEQ ID NO: 9276 - protein, 7 aa, Artificial Sequence
  Synthetic
DDYRGFY

SEQ ID NO: 9277 - protein, 7 aa, Artificial Sequence
  Synthetic
VGFSFYT

SEQ ID NO: 9278 - protein, 7 aa, Artificial Sequence
  Synthetic
YSFSGYC

SEQ ID NO: 9279 - protein, 7 aa, Artificial Sequence
  Synthetic
YTYCRYD

SEQ ID NO: 9280 - protein, 7 aa, Artificial Sequence
  Synthetic
DWDSRKW

SEQ ID NO: 9281 - protein, 10 aa, Artificial Sequence
  Synthetic
AAEFRYCVYT

SEQ ID NO: 9282 - protein, 4 aa, Artificial Sequence
  Synthetic
LISC

SEQ ID NO: 9283 - protein, 4 aa, Artificial Sequence
  Synthetic
YAAT

SEQ ID NO: 9284 - protein, 7 aa, Artificial Sequence
  Synthetic
LSLTHFC

SEQ ID NO: 9285 - protein, 7 aa, Artificial Sequence
  Synthetic
YTHCDYD

SEQ ID NO: 9286 - protein, 7 aa, Artificial Sequence
  Synthetic
FPNNVNC

SEQ ID NO: 9287 - protein, 7 aa, Artificial Sequence
  Synthetic
YGYCAYD

SEQ ID NO: 9288 - protein, 7 aa, Artificial Sequence
  Synthetic
YGYSTDC

SEQ ID NO: 9289 - protein, 7 aa, Artificial Sequence
  Synthetic
YTFSSGT

SEQ ID NO: 9290 - protein, 7 aa, Artificial Sequence
  Synthetic
YDHCTYD

SEQ ID NO: 9291 - protein, 7 aa, Artificial Sequence
  Synthetic
DTYSSHC

SEQ ID NO: 9292 - protein, 6 aa, Artificial Sequence
  Synthetic
CTYCRC

SEQ ID NO: 9293 - protein, 7 aa, Artificial Sequence
  Synthetic
FTFNRCG

SEQ ID NO: 9294 - protein, 6 aa, Artificial Sequence
  Synthetic
TYTTDS

SEQ ID NO: 9295 - protein, 6 aa, Artificial Sequence
  Synthetic
SYNMHC

SEQ ID NO: 9296 - protein, 7 aa, Artificial Sequence
  Synthetic
FTFDLAD

SEQ ID NO: 9297 - protein, 8 aa, Artificial Sequence
  Synthetic
YTGSTGYC

SEQ ID NO: 9298 - protein, 7 aa, Artificial Sequence
  Synthetic
YALGDVC

SEQ ID NO: 9299 - protein, 7 aa, Artificial Sequence
  Synthetic
FTIGHSV

SEQ ID NO: 9300 - protein, 7 aa, Artificial Sequence
  Synthetic
DIDRIRC

SEQ ID NO: 9301 - protein, 7 aa, Artificial Sequence
  Synthetic
YTFCKYA

SEQ ID NO: 9302 - protein, 8 aa, Artificial Sequence
  Synthetic
FTTACRYD

SEQ ID NO: 9303 - protein, 7 aa, Artificial Sequence
  Synthetic
YTIRPYC

SEQ ID NO: 9304 - protein, 7 aa, Artificial Sequence
  Synthetic
VTNSRYS

SEQ ID NO: 9305 - protein, 4 aa, Artificial Sequence
  Synthetic
STYS

SEQ ID NO: 9306 - protein, 7 aa, Artificial Sequence
  Synthetic
LMYREYY

SEQ ID NO: 9307 - protein, 4 aa, Artificial Sequence
  Synthetic
NIYS

SEQ ID NO: 9308 - protein, 7 aa, Artificial Sequence
  Synthetic
YTYRRIY

SEQ ID NO: 9309 - protein, 4 aa, Artificial Sequence
  Synthetic
RVYS

SEQ ID NO: 9310 - protein, 5 aa, Artificial Sequence
  Synthetic
NTWYS

SEQ ID NO: 9311 - protein, 7 aa, Artificial Sequence
  Synthetic
LNYKGYY

SEQ ID NO: 9312 - protein, 7 aa, Artificial Sequence
  Synthetic
RPECSYD

SEQ ID NO: 9313 - protein, 4 aa, Artificial Sequence
  Synthetic
YVYS

SEQ ID NO: 9314 - protein, 4 aa, Artificial Sequence
  Synthetic
SVYS

SEQ ID NO: 9315 - protein, 7 aa, Artificial Sequence
  Synthetic
NMNSWYS

SEQ ID NO: 9316 - protein, 7 aa, Artificial Sequence
  Synthetic
YTGNSYC

SEQ ID NO: 9317 - protein, 4 aa, Artificial Sequence
  Synthetic
RTYS

SEQ ID NO: 9318 - protein, 4 aa, Artificial Sequence
  Synthetic
GTYS

SEQ ID NO: 9319 - protein, 7 aa, Artificial Sequence
  Synthetic
FSISSCC

SEQ ID NO: 9320 - protein, 4 aa, Artificial Sequence
  Synthetic
KTYC

SEQ ID NO: 9321 - protein, 7 aa, Artificial Sequence
  Synthetic
YSSVTFC

SEQ ID NO: 9322 - protein, 4 aa, Artificial Sequence
  Synthetic
NSYS

SEQ ID NO: 9323 - protein, 6 aa, Artificial Sequence
  Synthetic
SEYIYS

SEQ ID NO: 9324 - protein, 4 aa, Artificial Sequence
  Synthetic
KAYS

SEQ ID NO: 9325 - protein, 7 aa, Artificial Sequence
  Synthetic
YIFSNKN

SEQ ID NO: 9326 - protein, 5 aa, Artificial Sequence
  Synthetic
YIYSN

SEQ ID NO: 9327 - protein, 4 aa, Artificial Sequence
  Synthetic
YTYS

SEQ ID NO: 9328 - protein, 7 aa, Artificial Sequence
  Synthetic
FTYSDSS

SEQ ID NO: 9329 - protein, 7 aa, Artificial Sequence
  Synthetic
FTVSDCW

SEQ ID NO: 9330 - protein, 7 aa, Artificial Sequence
  Synthetic
NTFCSLD

SEQ ID NO: 9331 - protein, 7 aa, Artificial Sequence
  Synthetic
YIGSFQC

SEQ ID NO: 9332 - protein, 7 aa, Artificial Sequence
  Synthetic
FTFSGTL

SEQ ID NO: 9333 - protein, 7 aa, Artificial Sequence
  Synthetic
FTFSSYD

SEQ ID NO: 9334 - protein, 7 aa, Artificial Sequence
  Synthetic
DLFSIVA

SEQ ID NO: 9335 - protein, 7 aa, Artificial Sequence
  Synthetic
SFSRFNV

SEQ ID NO: 9336 - protein, 7 aa, Artificial Sequence
  Synthetic
RSISTYG

SEQ ID NO: 9337 - protein, 7 aa, Artificial Sequence
  Synthetic
RMYTIND

SEQ ID NO: 9338 - protein, 7 aa, Artificial Sequence
  Synthetic
RTFSMYA

SEQ ID NO: 9339 - protein, 7 aa, Artificial Sequence
  Synthetic
RTFTTGG

SEQ ID NO: 9340 - protein, 7 aa, Artificial Sequence
  Synthetic
RIDTTYA

SEQ ID NO: 9341 - protein, 7 aa, Artificial Sequence
  Synthetic
RTFNTYV

SEQ ID NO: 9342 - protein, 7 aa, Artificial Sequence
  Synthetic
SLSRITV

SEQ ID NO: 9343 - protein, 7 aa, Artificial Sequence
  Synthetic
STSSINS

SEQ ID NO: 9344 - protein, 7 aa, Artificial Sequence
  Synthetic
LTSRKYA

SEQ ID NO: 9345 - protein, 7 aa, Artificial Sequence
  Synthetic
RTFSTYA

SEQ ID NO: 9346 - protein, 7 aa, Artificial Sequence
  Synthetic
GAFSTYD

SEQ ID NO: 9347 - protein, 7 aa, Artificial Sequence
  Synthetic
SIFRITE

SEQ ID NO: 9348 - protein, 7 aa, Artificial Sequence
  Synthetic
ATFSINR

SEQ ID NO: 9349 - protein, 7 aa, Artificial Sequence
  Synthetic
SIFSIGL

SEQ ID NO: 9350 - protein, 7 aa, Artificial Sequence
  Synthetic
LTFSTYD

SEQ ID NO: 9351 - protein, 7 aa, Artificial Sequence
  Synthetic
RTFSTYD

SEQ ID NO: 9352 - protein, 7 aa, Artificial Sequence
  Synthetic
RTFYNYA

SEQ ID NO: 9353 - protein, 6 aa, Artificial Sequence
  Synthetic
SIFSLT

SEQ ID NO: 9354 - protein, 7 aa, Artificial Sequence
  Synthetic
LTFSSYN

SEQ ID NO: 9355 - protein, 6 aa, Artificial Sequence
  Synthetic
SIFSFA

SEQ ID NO: 9356 - protein, 6 aa, Artificial Sequence
  Synthetic
SIFTFA

SEQ ID NO: 9357 - protein, 7 aa, Artificial Sequence
  Synthetic
VTFTPYQ

SEQ ID NO: 9358 - protein, 7 aa, Artificial Sequence
  Synthetic
LTFTPYR

SEQ ID NO: 9359 - protein, 7 aa, Artificial Sequence
  Synthetic
LTFTPYR

SEQ ID NO: 9360 - protein, 7 aa, Artificial Sequence
  Synthetic
LTFTPYR

SEQ ID NO: 9361 - protein, 7 aa, Artificial Sequence
  Synthetic
IDFNLNA

SEQ ID NO: 9362 - protein, 7 aa, Artificial Sequence
  Synthetic
RDFSDYV

SEQ ID NO: 9363 - protein, 7 aa, Artificial Sequence
  Synthetic
RDFSDYV

SEQ ID NO: 9364 - protein, 7 aa, Artificial Sequence
  Synthetic
GTFSSYA

SEQ ID NO: 9365 - protein, 7 aa, Artificial Sequence
  Synthetic
SIFSLDA

SEQ ID NO: 9366 - protein, 7 aa, Artificial Sequence
  Synthetic
SIFDIDA

SEQ ID NO: 9367 - protein, 7 aa, Artificial Sequence
  Synthetic
LPFGINA

SEQ ID NO: 9368 - protein, 7 aa, Artificial Sequence
  Synthetic
RTSSNTF

SEQ ID NO: 9369 - protein, 7 aa, Artificial Sequence
  Synthetic
GTLSDYH

SEQ ID NO: 9370 - protein, 7 aa, Artificial Sequence
  Synthetic
RTFSSYD

SEQ ID NO: 9371 - protein, 7 aa, Artificial Sequence
  Synthetic
GTLSDYH

SEQ ID NO: 9372 - protein, 7 aa, Artificial Sequence
  Synthetic
HTFSEIG

SEQ ID NO: 9373 - protein, 7 aa, Artificial Sequence
  Synthetic
RTETTSA

SEQ ID NO: 9374 - protein, 7 aa, Artificial Sequence
  Synthetic
GTLSDYH

SEQ ID NO: 9375 - protein, 7 aa, Artificial Sequence
  Synthetic
RTFSSYI

SEQ ID NO: 9376 - protein, 7 aa, Artificial Sequence
  Synthetic
RTFSSYA

SEQ ID NO: 9377 - protein, 7 aa, Artificial Sequence
  Synthetic
RTFSSYA

SEQ ID NO: 9378 - protein, 7 aa, Artificial Sequence
  Synthetic
SFFSINV

SEQ ID NO: 9379 - protein, 7 aa, Artificial Sequence
  Synthetic
RTSSMYS

SEQ ID NO: 9380 - protein, 7 aa, Artificial Sequence
  Synthetic
SIFSSDV

SEQ ID NO: 9381 - protein, 7 aa, Artificial Sequence
  Synthetic
SIFSSDV

SEQ ID NO: 9382 - protein, 7 aa, Artificial Sequence
  Synthetic
PTYDSYG

SEQ ID NO: 9383 - protein, 7 aa, Artificial Sequence
  Synthetic
NIDTIDV

SEQ ID NO: 9384 - protein, 7 aa, Artificial Sequence
  Synthetic
NINTIDV

SEQ ID NO: 9385 - protein, 7 aa, Artificial Sequence
  Synthetic
RTDSTYA

SEQ ID NO: 9386 - protein, 7 aa, Artificial Sequence
  Synthetic
PIYESYG

SEQ ID NO: 9387 - protein, 7 aa, Artificial Sequence
  Synthetic
GTFSNPS

SEQ ID NO: 9388 - protein, 7 aa, Artificial Sequence
  Synthetic
NVDRIDA

SEQ ID NO: 9389 - protein, 7 aa, Artificial Sequence
  Synthetic
SISSINA

SEQ ID NO: 9390 - protein, 7 aa, Artificial Sequence
  Synthetic
LTFDTYA

SEQ ID NO: 9391 - protein, 7 aa, Artificial Sequence
  Synthetic
LTFDTYA

SEQ ID NO: 9392 - protein, 7 aa, Artificial Sequence
  Synthetic
SIISNNA

SEQ ID NO: 9393 - protein, 7 aa, Artificial Sequence
  Synthetic
RSFSRDA

SEQ ID NO: 9394 - protein, 7 aa, Artificial Sequence
  Synthetic
FTFSRYA

SEQ ID NO: 9395 - protein, 7 aa, Artificial Sequence
  Synthetic
RTFSDLS

SEQ ID NO: 9396 - protein, 7 aa, Artificial Sequence
  Synthetic
RTFSDLS

SEQ ID NO: 9397 - protein, 7 aa, Artificial Sequence
  Synthetic
RTFSDLS

SEQ ID NO: 9398 - protein, 7 aa, Artificial Sequence
  Synthetic
LTFRNFH

SEQ ID NO: 9399 - protein, 7 aa, Artificial Sequence
  Synthetic
STFSINA

SEQ ID NO: 9400 - protein, 7 aa, Artificial Sequence
  Synthetic
RTFSTST

SEQ ID NO: 9401 - protein, 7 aa, Artificial Sequence
  Synthetic
SIFRFYA

SEQ ID NO: 9402 - protein, 7 aa, Artificial Sequence
  Synthetic
SIFRFYA

SEQ ID NO: 9403 - protein, 7 aa, Artificial Sequence
  Synthetic
RTFSRTS

SEQ ID NO: 9404 - protein, 7 aa, Artificial Sequence
  Synthetic
FTVDNYA

SEQ ID NO: 9405 - protein, 7 aa, Artificial Sequence
  Synthetic
NSLRIGT

SEQ ID NO: 9406 - protein, 7 aa, Artificial Sequence
  Synthetic
RTFSTYP

SEQ ID NO: 9407 - protein, 7 aa, Artificial Sequence
  Synthetic
FSLDNYG

SEQ ID NO: 9408 - protein, 7 aa, Artificial Sequence
  Synthetic
AFFRAGP

SEQ ID NO: 9409 - protein, 7 aa, Artificial Sequence
  Synthetic
RTFRSDV

SEQ ID NO: 9410 - protein, 7 aa, Artificial Sequence
  Synthetic
PTFSDYA

SEQ ID NO: 9411 - protein, 7 aa, Artificial Sequence
  Synthetic
RIFSVYR

SEQ ID NO: 9412 - protein, 5 aa, Artificial Sequence
  Synthetic
SSTYE

SEQ ID NO: 9413 - protein, 7 aa, Artificial Sequence
  Synthetic
RTFSSYA

SEQ ID NO: 9414 - protein, 7 aa, Artificial Sequence
  Synthetic
FTLDYYA

SEQ ID NO: 9415 - protein, 7 aa, Artificial Sequence
  Synthetic
RTFSHYA

SEQ ID NO: 9416 - protein, 7 aa, Artificial Sequence
  Synthetic
RTFSNYA

SEQ ID NO: 9417 - protein, 7 aa, Artificial Sequence
  Synthetic
RISSTYR

SEQ ID NO: 9418 - protein, 7 aa, Artificial Sequence
  Synthetic
LTFSDYA

SEQ ID NO: 9419 - protein, 7 aa, Artificial Sequence
  Synthetic
FTLDNHA

SEQ ID NO: 9420 - protein, 7 aa, Artificial Sequence
  Synthetic
RTFSVYP

SEQ ID NO: 9421 - protein, 7 aa, Artificial Sequence
  Synthetic
GIFDNYA

SEQ ID NO: 9422 - protein, 7 aa, Artificial Sequence
  Synthetic
IYFRLYT

SEQ ID NO: 9423 - protein, 7 aa, Artificial Sequence
  Synthetic
SIFSVNA

SEQ ID NO: 9424 - protein, 7 aa, Artificial Sequence
  Synthetic
RSFSGDT

SEQ ID NO: 9425 - protein, 7 aa, Artificial Sequence
  Synthetic
SAFSINS

SEQ ID NO: 9426 - protein, 7 aa, Artificial Sequence
  Synthetic
NFFNIIT

SEQ ID NO: 9427 - protein, 7 aa, Artificial Sequence
  Synthetic
RAFSSYA

SEQ ID NO: 9428 - protein, 7 aa, Artificial Sequence
  Synthetic
RSFGSYH

SEQ ID NO: 9429 - protein, 7 aa, Artificial Sequence
  Synthetic
RAYRNYV

SEQ ID NO: 9430 - protein, 7 aa, Artificial Sequence
  Synthetic
RTFSTYA

SEQ ID NO: 9431 - protein, 7 aa, Artificial Sequence
  Synthetic
IPFSRYH

SEQ ID NO: 9432 - protein, 7 aa, Artificial Sequence
  Synthetic
DTFSTYG

SEQ ID NO: 9433 - protein, 7 aa, Artificial Sequence
  Synthetic
RTFSIYS

SEQ ID NO: 9434 - protein, 7 aa, Artificial Sequence
  Synthetic
IYFRLYT

SEQ ID NO: 9435 - protein, 7 aa, Artificial Sequence
  Synthetic
RTFSRYA

SEQ ID NO: 9436 - protein, 7 aa, Artificial Sequence
  Synthetic
GTLNGYA

SEQ ID NO: 9437 - protein, 7 aa, Artificial Sequence
  Synthetic
RSFSRST

SEQ ID NO: 9438 - protein, 7 aa, Artificial Sequence
  Synthetic
GTFDDYA

SEQ ID NO: 9439 - protein, 7 aa, Artificial Sequence
  Synthetic
FTFSSAI

SEQ ID NO: 9440 - protein, 7 aa, Artificial Sequence
  Synthetic
AFFRAGP

SEQ ID NO: 9441 - protein, 7 aa, Artificial Sequence
  Synthetic
HQLYRPP

SEQ ID NO: 9442 - protein, 7 aa, Artificial Sequence
  Synthetic
ITFSMYA

SEQ ID NO: 9443 - protein, 7 aa, Artificial Sequence
  Synthetic
IAVTNYL

SEQ ID NO: 9444 - protein, 7 aa, Artificial Sequence
  Synthetic
ITFGRNI

SEQ ID NO: 9445 - protein, 7 aa, Artificial Sequence
  Synthetic
SISDFAA

SEQ ID NO: 9446 - protein, 7 aa, Artificial Sequence
  Synthetic
IIQSINA

SEQ ID NO: 9447 - protein, 7 aa, Artificial Sequence
  Synthetic
GTFSINT

SEQ ID NO: 9448 - protein, 7 aa, Artificial Sequence
  Synthetic
FTFRSSA

SEQ ID NO: 9449 - protein, 7 aa, Artificial Sequence
  Synthetic
FTLAEYG

SEQ ID NO: 9450 - protein, 7 aa, Artificial Sequence
  Synthetic
GTFSWYA

SEQ ID NO: 9451 - protein, 7 aa, Artificial Sequence
  Synthetic
GTFSWYA

SEQ ID NO: 9452 - protein, 7 aa, Artificial Sequence
  Synthetic
GTFSWYA

SEQ ID NO: 9453 - protein, 12 aa, Artificial Sequence
  Synthetic
TIFSINDISINH

SEQ ID NO: 9454 - protein, 7 aa, Artificial Sequence
  Synthetic
ITFSDYA

SEQ ID NO: 9455 - protein, 7 aa, Artificial Sequence
  Synthetic
RTFSDYS

SEQ ID NO: 9456 - protein, 7 aa, Artificial Sequence
  Synthetic
RTFSSYA

SEQ ID NO: 9457 - protein, 7 aa, Artificial Sequence
  Synthetic
SIFSPND

SEQ ID NO: 9458 - protein, 7 aa, Artificial Sequence
  Synthetic
RTGNINT

SEQ ID NO: 9459 - protein, 7 aa, Artificial Sequence
  Synthetic
ITFSDYA

SEQ ID NO: 9460 - protein, 7 aa, Artificial Sequence
  Synthetic
RTFSDYA

SEQ ID NO: 9461 - protein, 7 aa, Artificial Sequence
  Synthetic
ITFSDYA

SEQ ID NO: 9462 - protein, 12 aa, Artificial Sequence
  Synthetic
TVFSINDISINH

SEQ ID NO: 9463 - protein, 7 aa, Artificial Sequence
  Synthetic
SSVSINH

SEQ ID NO: 9464 - protein, 7 aa, Artificial Sequence
  Synthetic
RSVDNYA

SEQ ID NO: 9465 - protein, 7 aa, Artificial Sequence
  Synthetic
ITFSLYT

SEQ ID NO: 9466 - protein, 7 aa, Artificial Sequence
  Synthetic
RAFGYYY

SEQ ID NO: 9467 - protein, 7 aa, Artificial Sequence
  Synthetic
RASSSYA

SEQ ID NO: 9468 - protein, 7 aa, Artificial Sequence
  Synthetic
SSFSIRT

SEQ ID NO: 9469 - protein, 7 aa, Artificial Sequence
  Synthetic
LTFSNYV

SEQ ID NO: 9470 - protein, 7 aa, Artificial Sequence
  Synthetic
LIFSNYV

SEQ ID NO: 9471 - protein, 7 aa, Artificial Sequence
  Synthetic
RDFSTYA

SEQ ID NO: 9472 - protein, 7 aa, Artificial Sequence
  Synthetic
RAFSDYA

SEQ ID NO: 9473 - protein, 7 aa, Artificial Sequence
  Synthetic
RASSSYA

SEQ ID NO: 9474 - protein, 7 aa, Artificial Sequence
  Synthetic
SSFSIRT

SEQ ID NO: 9475 - protein, 7 aa, Artificial Sequence
  Synthetic
STFVINP

SEQ ID NO: 9476 - protein, 7 aa, Artificial Sequence
  Synthetic
GTFSIYT

SEQ ID NO: 9477 - protein, 7 aa, Artificial Sequence
  Synthetic
STLSIKA

SEQ ID NO: 9478 - protein, 7 aa, Artificial Sequence
  Synthetic
SFGYIGG

SEQ ID NO: 9479 - protein, 7 aa, Artificial Sequence
  Synthetic
GTFSIYT

SEQ ID NO: 9480 - protein, 7 aa, Artificial Sequence
  Synthetic
GTSSIYT

SEQ ID NO: 9481 - protein, 7 aa, Artificial Sequence
  Synthetic
INSRIYR

SEQ ID NO: 9482 - protein, 7 aa, Artificial Sequence
  Synthetic
NTFVINP

SEQ ID NO: 9483 - protein, 7 aa, Artificial Sequence
  Synthetic
TIFSLHA

SEQ ID NO: 9484 - protein, 4 aa, Artificial Sequence
  Synthetic
RAFT

SEQ ID NO: 9485 - protein, 7 aa, Artificial Sequence
  Synthetic
NTFVLNP

SEQ ID NO: 9486 - protein, 7 aa, Artificial Sequence
  Synthetic
TTVSSNT

SEQ ID NO: 9487 - protein, 7 aa, Artificial Sequence
  Synthetic
IIFRFNA

SEQ ID NO: 9488 - protein, 7 aa, Artificial Sequence
  Synthetic
LTFSNYV

SEQ ID NO: 9489 - protein, 7 aa, Artificial Sequence
  Synthetic
LTFSNYV

SEQ ID NO: 9490 - protein, 7 aa, Artificial Sequence
  Synthetic
RAFQYYY

SEQ ID NO: 9491 - protein, 7 aa, Artificial Sequence
  Synthetic
LIFNNHY

SEQ ID NO: 9492 - protein, 7 aa, Artificial Sequence
  Synthetic
LTFSSYY

SEQ ID NO: 9493 - protein, 7 aa, Artificial Sequence
  Synthetic
LIFNNHY

SEQ ID NO: 9494 - protein, 7 aa, Artificial Sequence
  Synthetic
LTFSRYY

SEQ ID NO: 9495 - protein, 7 aa, Artificial Sequence
  Synthetic
RAFNYYY

SEQ ID NO: 9496 - protein, 7 aa, Artificial Sequence
  Synthetic
LSFNHYY

SEQ ID NO: 9497 - protein, 7 aa, Artificial Sequence
  Synthetic
RTFSSNA

SEQ ID NO: 9498 - protein, 7 aa, Artificial Sequence
  Synthetic
RTVSSKA

SEQ ID NO: 9499 - protein, 7 aa, Artificial Sequence
  Synthetic
RTLSTYP

SEQ ID NO: 9500 - protein, 7 aa, Artificial Sequence
  Synthetic
ITLSFYG

SEQ ID NO: 9501 - protein, 7 aa, Artificial Sequence
  Synthetic
RTFSSYS

SEQ ID NO: 9502 - protein, 7 aa, Artificial Sequence
  Synthetic
RTFSRYV

SEQ ID NO: 9503 - protein, 7 aa, Artificial Sequence
  Synthetic
RTVENYA

SEQ ID NO: 9504 - protein, 7 aa, Artificial Sequence
  Synthetic
SISRFND

SEQ ID NO: 9505 - protein, 7 aa, Artificial Sequence
  Synthetic
RTFNSYA

SEQ ID NO: 9506 - protein, 5 aa, Artificial Sequence
  Synthetic
RTFSR

SEQ ID NO: 9507 - protein, 7 aa, Artificial Sequence
  Synthetic
RTFGTYA

SEQ ID NO: 9508 - protein, 7 aa, Artificial Sequence
  Synthetic
STFSSYV

SEQ ID NO: 9509 - protein, 7 aa, Artificial Sequence
  Synthetic
RTFTLEA

SEQ ID NO: 9510 - protein, 7 aa, Artificial Sequence
  Synthetic
DFFSINN

SEQ ID NO: 9511 - protein, 7 aa, Artificial Sequence
  Synthetic
RTFDNWT

SEQ ID NO: 9512 - protein, 7 aa, Artificial Sequence
  Synthetic
RTFSSYT

SEQ ID NO: 9513 - protein, 7 aa, Artificial Sequence
  Synthetic
RTFSGGA

SEQ ID NO: 9514 - protein, 7 aa, Artificial Sequence
  Synthetic
ISFSIRD

SEQ ID NO: 9515 - protein, 7 aa, Artificial Sequence
  Synthetic
RTFSNYN

SEQ ID NO: 9516 - protein, 7 aa, Artificial Sequence
  Synthetic
RTFNSYN

SEQ ID NO: 9517 - protein, 7 aa, Artificial Sequence
  Synthetic
SIRTFNT

SEQ ID NO: 9518 - protein, 7 aa, Artificial Sequence
  Synthetic
RTWNPSA

SEQ ID NO: 9519 - protein, 7 aa, Artificial Sequence
  Synthetic
RTFSSSL

SEQ ID NO: 9520 - protein, 7 aa, Artificial Sequence
  Synthetic
RTGRNYD

SEQ ID NO: 9521 - protein, 7 aa, Artificial Sequence
  Synthetic
RSSRSWA

SEQ ID NO: 9522 - protein, 7 aa, Artificial Sequence
  Synthetic
LAFSDYA

SEQ ID NO: 9523 - protein, 7 aa, Artificial Sequence
  Synthetic
FTFSSYA

SEQ ID NO: 9524 - protein, 7 aa, Artificial Sequence
  Synthetic
RTSSAFA

SEQ ID NO: 9525 - protein, 7 aa, Artificial Sequence
  Synthetic
RTFPIYG

SEQ ID NO: 9526 - protein, 7 aa, Artificial Sequence
  Synthetic
LAFSNYH

SEQ ID NO: 9527 - protein, 7 aa, Artificial Sequence
  Synthetic
RTFTSYD

SEQ ID NO: 9528 - protein, 7 aa, Artificial Sequence
  Synthetic
LAFSNYH

SEQ ID NO: 9529 - protein, 7 aa, Artificial Sequence
  Synthetic
LAFSNYH

SEQ ID NO: 9530 - protein, 7 aa, Artificial Sequence
  Synthetic
RTASINA

SEQ ID NO: 9531 - protein, 7 aa, Artificial Sequence
  Synthetic
FTFSTYA

SEQ ID NO: 9532 - protein, 7 aa, Artificial Sequence
  Synthetic
STFSRYR

SEQ ID NO: 9533 - protein, 7 aa, Artificial Sequence
  Synthetic
QSFSGYA

SEQ ID NO: 9534 - protein, 7 aa, Artificial Sequence
  Synthetic
RTFTSYT

SEQ ID NO: 9535 - protein, 7 aa, Artificial Sequence
  Synthetic
GTFNPYA

SEQ ID NO: 9536 - protein, 7 aa, Artificial Sequence
  Synthetic
RTFRNYA

SEQ ID NO: 9537 - protein, 7 aa, Artificial Sequence
  Synthetic
FIFVRNP

SEQ ID NO: 9538 - protein, 7 aa, Artificial Sequence
  Synthetic
FSLTSST

SEQ ID NO: 9539 - protein, 7 aa, Artificial Sequence
  Synthetic
TLHSISD

SEQ ID NO: 9540 - protein, 7 aa, Artificial Sequence
  Synthetic
DISAFTT

SEQ ID NO: 9541 - protein, 6 aa, Artificial Sequence
  Synthetic
ISAVNQ

SEQ ID NO: 9542 - protein, 7 aa, Artificial Sequence
  Synthetic
NIFGLNA

SEQ ID NO: 9543 - protein, 7 aa, Artificial Sequence
  Synthetic
DTYSSQC

SEQ ID NO: 9544 - protein, 7 aa, Artificial Sequence
  Synthetic
FADSIRC

SEQ ID NO: 9545 - protein, 7 aa, Artificial Sequence
  Synthetic
DTPSLKC

SEQ ID NO: 9546 - protein, 7 aa, Artificial Sequence
  Synthetic
YIYSGKC

SEQ ID NO: 9547 - protein, 7 aa, Artificial Sequence
  Synthetic
YKYDNYC

SEQ ID NO: 9548 - protein, 9 aa, Artificial Sequence
  Synthetic
FIHNYNKYS

SEQ ID NO: 9549 - protein, 7 aa, Artificial Sequence
  Synthetic
DTYSDCN

SEQ ID NO: 9550 - protein, 7 aa, Artificial Sequence
  Synthetic
LTFSTYC

SEQ ID NO: 9551 - protein, 7 aa, Artificial Sequence
  Synthetic
TTECYYD

SEQ ID NO: 9552 - protein, 8 aa, Artificial Sequence
  Synthetic
EYTLKVHY

SEQ ID NO: 9553 - protein, 7 aa, Artificial Sequence
  Synthetic
IDYRPTY

SEQ ID NO: 9554 - protein, 7 aa, Artificial Sequence
  Synthetic
HTWNSYV

SEQ ID NO: 9555 - protein, 7 aa, Artificial Sequence
  Synthetic
STLDDYA

SEQ ID NO: 9556 - protein, 7 aa, Artificial Sequence
  Synthetic
RTLGDYG

SEQ ID NO: 9557 - protein, 7 aa, Artificial Sequence
  Synthetic
RTFSPYV

SEQ ID NO: 9558 - protein, 7 aa, Artificial Sequence
  Synthetic
RTHTPYA

SEQ ID NO: 9559 - protein, 7 aa, Artificial Sequence
  Synthetic
RTYTPYA

SEQ ID NO: 9560 - protein, 7 aa, Artificial Sequence
  Synthetic
RALSSTI

SEQ ID NO: 9561 - protein, 7 aa, Artificial Sequence
  Synthetic
SIFSINA

SEQ ID NO: 9562 - protein, 5 aa, Artificial Sequence
  Synthetic
RTSYP

SEQ ID NO: 9563 - protein, 7 aa, Artificial Sequence
  Synthetic
GTFSTFN

SEQ ID NO: 9564 - protein, 7 aa, Artificial Sequence
  Synthetic
SIFDIYA

SEQ ID NO: 9565 - protein, 7 aa, Artificial Sequence
  Synthetic
SIFSLNA

SEQ ID NO: 9566 - protein, 7 aa, Artificial Sequence
  Synthetic
RPFSTFD

SEQ ID NO: 9567 - protein, 7 aa, Artificial Sequence
  Synthetic
RTFSSYS

SEQ ID NO: 9568 - protein, 7 aa, Artificial Sequence
  Synthetic
RTFSMYT

SEQ ID NO: 9569 - protein, 7 aa, Artificial Sequence
  Synthetic
RTFSSRA

SEQ ID NO: 9570 - protein, 7 aa, Artificial Sequence
  Synthetic
RTFSAYA

SEQ ID NO: 9571 - protein, 7 aa, Artificial Sequence
  Synthetic
SFFSIND

SEQ ID NO: 9572 - protein, 4 aa, Artificial Sequence
  Synthetic
RTYA

SEQ ID NO: 9573 - protein, 7 aa, Artificial Sequence
  Synthetic
ITFSSYT

SEQ ID NO: 9574 - protein, 7 aa, Artificial Sequence
  Synthetic
RTFSSYN

SEQ ID NO: 9575 - protein, 7 aa, Artificial Sequence
  Synthetic
LTFNRYN

SEQ ID NO: 9576 - protein, 7 aa, Artificial Sequence
  Synthetic
STFSTYT

SEQ ID NO: 9577 - protein, 7 aa, Artificial Sequence
  Synthetic
RTFSIYT

SEQ ID NO: 9578 - protein, 7 aa, Artificial Sequence
  Synthetic
RTFSSFV

SEQ ID NO: 9579 - protein, 7 aa, Artificial Sequence
  Synthetic
SIFSINT

SEQ ID NO: 9580 - protein, 7 aa, Artificial Sequence
  Synthetic
SIFALNI

SEQ ID NO: 9581 - protein, 7 aa, Artificial Sequence
  Synthetic
RTFTSYA

SEQ ID NO: 9582 - protein, 7 aa, Artificial Sequence
  Synthetic
RAIRSYF

SEQ ID NO: 9583 - protein, 7 aa, Artificial Sequence
  Synthetic
FTFSTYA

SEQ ID NO: 9584 - protein, 7 aa, Artificial Sequence
  Synthetic
APFREST

SEQ ID NO: 9585 - protein, 7 aa, Artificial Sequence
  Synthetic
EGFSNYP

SEQ ID NO: 9586 - protein, 7 aa, Artificial Sequence
  Synthetic
RTISTYS

SEQ ID NO: 9587 - protein, 7 aa, Artificial Sequence
  Synthetic
RTGSNWC

SEQ ID NO: 9588 - protein, 7 aa, Artificial Sequence
  Synthetic
RTGSNWS

SEQ ID NO: 9589 - protein, 7 aa, Artificial Sequence
  Synthetic
RTFSNYH

SEQ ID NO: 9590 - protein, 7 aa, Artificial Sequence
  Synthetic
RIFSNAA

SEQ ID NO: 9591 - protein, 7 aa, Artificial Sequence
  Synthetic
SIFSINT

SEQ ID NO: 9592 - protein, 7 aa, Artificial Sequence
  Synthetic
RSFSTYR

SEQ ID NO: 9593 - protein, 7 aa, Artificial Sequence
  Synthetic
NTISGYA

SEQ ID NO: 9594 - protein, 7 aa, Artificial Sequence
  Synthetic
GSFSNYN

SEQ ID NO: 9595 - protein, 7 aa, Artificial Sequence
  Synthetic
RIPRNYP

SEQ ID NO: 9596 - protein, 7 aa, Artificial Sequence
  Synthetic
ESIASFN

SEQ ID NO: 9597 - protein, 7 aa, Artificial Sequence
  Synthetic
RTFSSVS

SEQ ID NO: 9598 - protein, 7 aa, Artificial Sequence
  Synthetic
RTFSSVT

SEQ ID NO: 9599 - protein, 7 aa, Artificial Sequence
  Synthetic
RTFSRFA

SEQ ID NO: 9600 - protein, 7 aa, Artificial Sequence
  Synthetic
SIFSESA

SEQ ID NO: 9601 - protein, 7 aa, Artificial Sequence
  Synthetic
RTFSSDA

SEQ ID NO: 9602 - protein, 7 aa, Artificial Sequence
  Synthetic
LPFSTYS

SEQ ID NO: 9603 - protein, 7 aa, Artificial Sequence
  Synthetic
RTFSTYT

SEQ ID NO: 9604 - protein, 7 aa, Artificial Sequence
  Synthetic
YTFSSHA

SEQ ID NO: 9605 - protein, 7 aa, Artificial Sequence
  Synthetic
GTFTDYA

SEQ ID NO: 9606 - protein, 7 aa, Artificial Sequence
  Synthetic
NTISDYA

SEQ ID NO: 9607 - protein, 7 aa, Artificial Sequence
  Synthetic
FTFDEHA

SEQ ID NO: 9608 - protein, 7 aa, Artificial Sequence
  Synthetic
FTLDEHA

SEQ ID NO: 9609 - protein, 7 aa, Artificial Sequence
  Synthetic
RTFSSYG

SEQ ID NO: 9610 - protein, 7 aa, Artificial Sequence
  Synthetic
RTFSSYS

SEQ ID NO: 9611 - protein, 7 aa, Artificial Sequence
  Synthetic
STFSIGA

SEQ ID NO: 9612 - protein, 7 aa, Artificial Sequence
  Synthetic
STFSGND

SEQ ID NO: 9613 - protein, 7 aa, Artificial Sequence
  Synthetic
PTSITYG

SEQ ID NO: 9614 - protein, 7 aa, Artificial Sequence
  Synthetic
RTFGSYT

SEQ ID NO: 9615 - protein, 7 aa, Artificial Sequence
  Synthetic
RTFSSYG

SEQ ID NO: 9616 - protein, 7 aa, Artificial Sequence
  Synthetic
ITFSEKH

SEQ ID NO: 9617 - protein, 7 aa, Artificial Sequence
  Synthetic
RTFSSYH

SEQ ID NO: 9618 - protein, 7 aa, Artificial Sequence
  Synthetic
FKITHYT

SEQ ID NO: 9619 - protein, 7 aa, Artificial Sequence
  Synthetic
RTFSIYA

SEQ ID NO: 9620 - protein, 8 aa, Artificial Sequence
  Synthetic
GLIFSSYA

SEQ ID NO: 9621 - protein, 7 aa, Artificial Sequence
  Synthetic
PMSSSAV

SEQ ID NO: 9622 - protein, 7 aa, Artificial Sequence
  Synthetic
IDVNRNA

SEQ ID NO: 9623 - protein, 10 aa, Artificial Sequence
  Synthetic
RTSHGYGGYG

SEQ ID NO: 9624 - protein, 10 aa, Artificial Sequence
  Synthetic
RATSGHGHYG

SEQ ID NO: 9625 - protein, 7 aa, Artificial Sequence
  Synthetic
NIDRLYA

SEQ ID NO: 9626 - protein, 10 aa, Artificial Sequence
  Synthetic
RTFSGHGGYG

SEQ ID NO: 9627 - protein, 7 aa, Artificial Sequence
  Synthetic
NTFSGGF

SEQ ID NO: 9628 - protein, 10 aa, Artificial Sequence
  Synthetic
RASSGHGGYG

SEQ ID NO: 9629 - protein, 7 aa, Artificial Sequence
  Synthetic
SIFSIDV

SEQ ID NO: 9630 - protein, 7 aa, Artificial Sequence
  Synthetic
SIVRGNT

SEQ ID NO: 9631 - protein, 7 aa, Artificial Sequence
  Synthetic
SFSNMNV

SEQ ID NO: 9632 - protein, 7 aa, Artificial Sequence
  Synthetic
SIGSINA

SEQ ID NO: 9633 - protein, 7 aa, Artificial Sequence
  Synthetic
MIFDFND

SEQ ID NO: 9634 - protein, 7 aa, Artificial Sequence
  Synthetic
SIYSLDA

SEQ ID NO: 9635 - protein, 7 aa, Artificial Sequence
  Synthetic
TIHSIVD

SEQ ID NO: 9636 - protein, 7 aa, Artificial Sequence
  Synthetic
SIFSVNA

SEQ ID NO: 9637 - protein, 7 aa, Artificial Sequence
  Synthetic
NVFMIKD

SEQ ID NO: 9638 - protein, 7 aa, Artificial Sequence
  Synthetic
GIFSIND

SEQ ID NO: 9639 - protein, 4 aa, Artificial Sequence
  Synthetic
GTNT

SEQ ID NO: 9640 - protein, 7 aa, Artificial Sequence
  Synthetic
ITFSNDA

SEQ ID NO: 9641 - protein, 7 aa, Artificial Sequence
  Synthetic
STFSIST

SEQ ID NO: 9642 - protein, 7 aa, Artificial Sequence
  Synthetic
RTWNDLD

SEQ ID NO: 9643 - protein, 7 aa, Artificial Sequence
  Synthetic
RTSTVNG

SEQ ID NO: 9644 - protein, 7 aa, Artificial Sequence
  Synthetic
SDINFNV

SEQ ID NO: 9645 - protein, 7 aa, Artificial Sequence
  Synthetic
RTLENYR

SEQ ID NO: 9646 - protein, 7 aa, Artificial Sequence
  Synthetic
LAFENYF

SEQ ID NO: 9647 - protein, 7 aa, Artificial Sequence
  Synthetic
FTLDLYT

SEQ ID NO: 9648 - protein, 7 aa, Artificial Sequence
  Synthetic
FILDYYA

SEQ ID NO: 9649 - protein, 7 aa, Artificial Sequence
  Synthetic
RALNTLH

SEQ ID NO: 9650 - protein, 7 aa, Artificial Sequence
  Synthetic
PTLGSYV

SEQ ID NO: 9651 - protein, 7 aa, Artificial Sequence
  Synthetic
GTFSEHY

SEQ ID NO: 9652 - protein, 7 aa, Artificial Sequence
  Synthetic
RTSDIYG

SEQ ID NO: 9653 - protein, 7 aa, Artificial Sequence
  Synthetic
RIGSISG

SEQ ID NO: 9654 - protein, 7 aa, Artificial Sequence
  Synthetic
FTFDDYA

SEQ ID NO: 9655 - protein, 7 aa, Artificial Sequence
  Synthetic
SITSIRS

SEQ ID NO: 9656 - protein, 7 aa, Artificial Sequence
  Synthetic
NMFSINA

SEQ ID NO: 9657 - protein, 7 aa, Artificial Sequence
  Synthetic
RTFSNYA

SEQ ID NO: 9658 - protein, 7 aa, Artificial Sequence
  Synthetic
IIFSVRA

SEQ ID NO: 9659 - protein, 7 aa, Artificial Sequence
  Synthetic
SIFSINT

SEQ ID NO: 9660 - protein, 7 aa, Artificial Sequence
  Synthetic
SIFSRNA

SEQ ID NO: 9661 - protein, 7 aa, Artificial Sequence
  Synthetic
RTLSRYT

SEQ ID NO: 9662 - protein, 7 aa, Artificial Sequence
  Synthetic
NIFSLNT

SEQ ID NO: 9663 - protein, 7 aa, Artificial Sequence
  Synthetic
TFQRINH

SEQ ID NO: 9664 - protein, 7 aa, Artificial Sequence
  Synthetic
RAFDAYH

SEQ ID NO: 9665 - protein, 7 aa, Artificial Sequence
  Synthetic
FTLDNYA

SEQ ID NO: 9666 - protein, 7 aa, Artificial Sequence
  Synthetic
IIFSLNH

SEQ ID NO: 9667 - protein, 7 aa, Artificial Sequence
  Synthetic
SSLSNYT

SEQ ID NO: 9668 - protein, 7 aa, Artificial Sequence
  Synthetic
STFTNYA

SEQ ID NO: 9669 - protein, 7 aa, Artificial Sequence
  Synthetic
RTFSSFV

SEQ ID NO: 9670 - protein, 7 aa, Artificial Sequence
  Synthetic
NSFNNYV

SEQ ID NO: 9671 - protein, 7 aa, Artificial Sequence
  Synthetic
VGFSVTN

SEQ ID NO: 9672 - protein, 7 aa, Artificial Sequence
  Synthetic
IIASDSA

SEQ ID NO: 9673 - protein, 7 aa, Artificial Sequence
  Synthetic
SIFSMNT

SEQ ID NO: 9674 - protein, 7 aa, Artificial Sequence
  Synthetic
SGISFNA

SEQ ID NO: 9675 - protein, 7 aa, Artificial Sequence
  Synthetic
STFSIDA

SEQ ID NO: 9676 - protein, 7 aa, Artificial Sequence
  Synthetic
SIFSINR

SEQ ID NO: 9677 - protein, 7 aa, Artificial Sequence
  Synthetic
NIFRINA

SEQ ID NO: 9678 - protein, 11 aa, Artificial Sequence
  Synthetic
NASGNAFRINA

SEQ ID NO: 9679 - protein, 7 aa, Artificial Sequence
  Synthetic
SISTIYV

SEQ ID NO: 9680 - protein, 7 aa, Artificial Sequence
  Synthetic
STGSIVT

SEQ ID NO: 9681 - protein, 7 aa, Artificial Sequence
  Synthetic
SGFRGNV

SEQ ID NO: 9682 - protein, 7 aa, Artificial Sequence
  Synthetic
STFSINP

SEQ ID NO: 9683 - protein, 7 aa, Artificial Sequence
  Synthetic
RTFSLYT

SEQ ID NO: 9684 - protein, 7 aa, Artificial Sequence
  Synthetic
FSLDDYD

SEQ ID NO: 9685 - protein, 7 aa, Artificial Sequence
  Synthetic
STFSINA

SEQ ID NO: 9686 - protein, 7 aa, Artificial Sequence
  Synthetic
SIDTINT

SEQ ID NO: 9687 - protein, 7 aa, Artificial Sequence
  Synthetic
RSISDYT

SEQ ID NO: 9688 - protein, 7 aa, Artificial Sequence
  Synthetic
PISGINR

SEQ ID NO: 9689 - protein, 7 aa, Artificial Sequence
  Synthetic
RTISSYF

SEQ ID NO: 9690 - protein, 7 aa, Artificial Sequence
  Synthetic
TTLDYYA

SEQ ID NO: 9691 - protein, 7 aa, Artificial Sequence
  Synthetic
STIENYA

SEQ ID NO: 9692 - protein, 7 aa, Artificial Sequence
  Synthetic
KFFEYYY

SEQ ID NO: 9693 - protein, 7 aa, Artificial Sequence
  Synthetic
VTLDLYA

SEQ ID NO: 9694 - protein, 7 aa, Artificial Sequence
  Synthetic
DTYKIYV

SEQ ID NO: 9695 - protein, 7 aa, Artificial Sequence
  Synthetic
FTLENNM

SEQ ID NO: 9696 - protein, 7 aa, Artificial Sequence
  Synthetic
SFFKINA

SEQ ID NO: 9697 - protein, 7 aa, Artificial Sequence
  Synthetic
FSFGDYA

SEQ ID NO: 9698 - protein, 7 aa, Artificial Sequence
  Synthetic
RTDRSNA

SEQ ID NO: 9699 - protein, 7 aa, Artificial Sequence
  Synthetic
SISSINV

SEQ ID NO: 9700 - protein, 7 aa, Artificial Sequence
  Synthetic
GAFSGLV

SEQ ID NO: 9701 - protein, 7 aa, Artificial Sequence
  Synthetic
TIFAVHT

SEQ ID NO: 9702 - protein, 7 aa, Artificial Sequence
  Synthetic
LTFGTHV

SEQ ID NO: 9703 - protein, 7 aa, Artificial Sequence
  Synthetic
STLSRYS

SEQ ID NO: 9704 - protein, 8 aa, Artificial Sequence
  Synthetic
FSFDDDYV

SEQ ID NO: 9705 - protein, 7 aa, Artificial Sequence
  Synthetic
SIFMINA

SEQ ID NO: 9706 - protein, 7 aa, Artificial Sequence
  Synthetic
RTLDRYG

SEQ ID NO: 9707 - protein, 6 aa, Artificial Sequence
  Synthetic
TLDTYA

SEQ ID NO: 9708 - protein, 7 aa, Artificial Sequence
  Synthetic
PAFSAYA

SEQ ID NO: 9709 - protein, 7 aa, Artificial Sequence
  Synthetic
FTLDNYA

SEQ ID NO: 9710 - protein, 7 aa, Artificial Sequence
  Synthetic
RTFSSYA

SEQ ID NO: 9711 - protein, 8 aa, Artificial Sequence
  Synthetic
GLTFSTYA

SEQ ID NO: 9712 - protein, 7 aa, Artificial Sequence
  Synthetic
RTFSSYA

SEQ ID NO: 9713 - protein, 7 aa, Artificial Sequence
  Synthetic
RAFESYA

SEQ ID NO: 9714 - protein, 8 aa, Artificial Sequence
  Synthetic
RSVTSINL

SEQ ID NO: 9715 - protein, 7 aa, Artificial Sequence
  Synthetic
FTFDDTG

SEQ ID NO: 9716 - protein, 7 aa, Artificial Sequence
  Synthetic
GTSNSYR

SEQ ID NO: 9717 - protein, 7 aa, Artificial Sequence
  Synthetic
PTFSIYA

SEQ ID NO: 9718 - protein, 7 aa, Artificial Sequence
  Synthetic
RTFSRYN

SEQ ID NO: 9719 - protein, 7 aa, Artificial Sequence
  Synthetic
RTSNIYA

SEQ ID NO: 9720 - protein, 7 aa, Artificial Sequence
  Synthetic
FTFEDYA

SEQ ID NO: 9721 - protein, 7 aa, Artificial Sequence
  Synthetic
FKLGYYA

SEQ ID NO: 9722 - protein, 7 aa, Artificial Sequence
  Synthetic
LRFSDYV

SEQ ID NO: 9723 - protein, 7 aa, Artificial Sequence
  Synthetic
LLFSSYD

SEQ ID NO: 9724 - protein, 7 aa, Artificial Sequence
  Synthetic
IAFQGYA

SEQ ID NO: 9725 - protein, 7 aa, Artificial Sequence
  Synthetic
LSFSNYA

SEQ ID NO: 9726 - protein, 7 aa, Artificial Sequence
  Synthetic
LPVDYYA

SEQ ID NO: 9727 - protein, 7 aa, Artificial Sequence
  Synthetic
LIIKDTT

SEQ ID NO: 9728 - protein, 4 aa, Artificial Sequence
  Synthetic
RTFS

SEQ ID NO: 9729 - protein, 7 aa, Artificial Sequence
  Synthetic
SISSIDY

SEQ ID NO: 9730 - protein, 7 aa, Artificial Sequence
  Synthetic
FAFNLYW

SEQ ID NO: 9731 - protein, 7 aa, Artificial Sequence
  Synthetic
LSFSEFV

SEQ ID NO: 9732 - protein, 7 aa, Artificial Sequence
  Synthetic
YAYSSNC

SEQ ID NO: 9733 - protein, 7 aa, Artificial Sequence
  Synthetic
RTFSSYA

SEQ ID NO: 9734 - protein, 7 aa, Artificial Sequence
  Synthetic
SYFSINR

SEQ ID NO: 9735 - protein, 8 aa, Artificial Sequence
  Synthetic
STSSRINA

SEQ ID NO: 9736 - protein, 7 aa, Artificial Sequence
  Synthetic
STFSINA

SEQ ID NO: 9737 - protein, 7 aa, Artificial Sequence
  Synthetic
STFSINA

SEQ ID NO: 9738 - protein, 7 aa, Artificial Sequence
  Synthetic
SIVSFNA

SEQ ID NO: 9739 - protein, 6 aa, Artificial Sequence
  Synthetic
SISRNG

SEQ ID NO: 9740 - protein, 7 aa, Artificial Sequence
  Synthetic
STAKINA

SEQ ID NO: 9741 - protein, 7 aa, Artificial Sequence
  Synthetic
RTFGIYQ

SEQ ID NO: 9742 - protein, 7 aa, Artificial Sequence
  Synthetic
STSTVNG

SEQ ID NO: 9743 - protein, 7 aa, Artificial Sequence
  Synthetic
GTFTMYA

SEQ ID NO: 9744 - protein, 7 aa, Artificial Sequence
  Synthetic
FAFSINA

SEQ ID NO: 9745 - protein, 7 aa, Artificial Sequence
  Synthetic
STFSINA

SEQ ID NO: 9746 - protein, 7 aa, Artificial Sequence
  Synthetic
RTFSNYH

SEQ ID NO: 9747 - protein, 7 aa, Artificial Sequence
  Synthetic
RTFSDYI

SEQ ID NO: 9748 - protein, 7 aa, Artificial Sequence
  Synthetic
STFSINA

SEQ ID NO: 9749 - protein, 7 aa, Artificial Sequence
  Synthetic
RTFSNYT

SEQ ID NO: 9750 - protein, 7 aa, Artificial Sequence
  Synthetic
RAFSSYH

SEQ ID NO: 9751 - protein, 7 aa, Artificial Sequence
  Synthetic
PIFDKNL

SEQ ID NO: 9752 - protein, 7 aa, Artificial Sequence
  Synthetic
RSDSTDT

SEQ ID NO: 9753 - protein, 7 aa, Artificial Sequence
  Synthetic
RTASNWA

SEQ ID NO: 9754 - protein, 7 aa, Artificial Sequence
  Synthetic
RTASSWA

SEQ ID NO: 9755 - protein, 7 aa, Artificial Sequence
  Synthetic
RTASSWA

SEQ ID NO: 9756 - protein, 7 aa, Artificial Sequence
  Synthetic
RSFRTYA

SEQ ID NO: 9757 - protein, 7 aa, Artificial Sequence
  Synthetic
SIFSINA

SEQ ID NO: 9758 - protein, 7 aa, Artificial Sequence
  Synthetic
NISSVSF

SEQ ID NO: 9759 - protein, 7 aa, Artificial Sequence
  Synthetic
SVASINV

SEQ ID NO: 9760 - protein, 7 aa, Artificial Sequence
  Synthetic
SVASINV

SEQ ID NO: 9761 - protein, 4 aa, Artificial Sequence
  Synthetic
RTDT

SEQ ID NO: 9762 - protein, 7 aa, Artificial Sequence
  Synthetic
RTASNWP

SEQ ID NO: 9763 - protein, 7 aa, Artificial Sequence
  Synthetic
SIFSINS

SEQ ID NO: 9764 - protein, 7 aa, Artificial Sequence
  Synthetic
PIFSPNT

SEQ ID NO: 9765 - protein, 7 aa, Artificial Sequence
  Synthetic
PIISPNT

SEQ ID NO: 9766 - protein, 7 aa, Artificial Sequence
  Synthetic
PITSPNT

SEQ ID NO: 9767 - protein, 7 aa, Artificial Sequence
  Synthetic
RTFSSYH

SEQ ID NO: 9768 - protein, 7 aa, Artificial Sequence
  Synthetic
GTFSWYA

SEQ ID NO: 9769 - protein, 7 aa, Artificial Sequence
  Synthetic
GTFSWYA

SEQ ID NO: 9770 - protein, 7 aa, Artificial Sequence
  Synthetic
RTGSTYD

SEQ ID NO: 9771 - protein, 10 aa, Artificial Sequence
  Synthetic
RAASGHGHYG

SEQ ID NO: 9772 - protein, 7 aa, Artificial Sequence
  Synthetic
ATGSTYD

SEQ ID NO: 9773 - protein, 7 aa, Artificial Sequence
  Synthetic
NIFRIND

SEQ ID NO: 9774 - protein, 7 aa, Artificial Sequence
  Synthetic
RTFSTYA

SEQ ID NO: 9775 - protein, 7 aa, Artificial Sequence
  Synthetic
RNLRMYR

SEQ ID NO: 9776 - protein, 7 aa, Artificial Sequence
  Synthetic
RTFTSFA

SEQ ID NO: 9777 - protein, 7 aa, Artificial Sequence
  Synthetic
RTFSNYR

SEQ ID NO: 9778 - protein, 7 aa, Artificial Sequence
  Synthetic
RTSSSHD

SEQ ID NO: 9779 - protein, 7 aa, Artificial Sequence
  Synthetic
SIFSINS

SEQ ID NO: 9780 - protein, 7 aa, Artificial Sequence
  Synthetic
RTFSNNA

SEQ ID NO: 9781 - protein, 7 aa, Artificial Sequence
  Synthetic
RAFSSYG

SEQ ID NO: 9782 - protein, 7 aa, Artificial Sequence
  Synthetic
ITFASEA

SEQ ID NO: 9783 - protein, 7 aa, Artificial Sequence
  Synthetic
RISSSYD

SEQ ID NO: 9784 - protein, 7 aa, Artificial Sequence
  Synthetic
RTLSSYA

SEQ ID NO: 9785 - protein, 7 aa, Artificial Sequence
  Synthetic
RTSSAYA

SEQ ID NO: 9786 - protein, 4 aa, Artificial Sequence
  Synthetic
YTSR

SEQ ID NO: 9787 - protein, 7 aa, Artificial Sequence
  Synthetic
IWFSINN

SEQ ID NO: 9788 - protein, 7 aa, Artificial Sequence
  Synthetic
RTSSLYS

SEQ ID NO: 9789 - protein, 7 aa, Artificial Sequence
  Synthetic
IIFSVYK

SEQ ID NO: 9790 - protein, 7 aa, Artificial Sequence
  Synthetic
RTFSSYA

SEQ ID NO: 9791 - protein, 7 aa, Artificial Sequence
  Synthetic
RTFSSYA

SEQ ID NO: 9792 - protein, 8 aa, Artificial Sequence
  Synthetic
ERAFSNYA

SEQ ID NO: 9793 - protein, 7 aa, Artificial Sequence
  Synthetic
FTLDYLA

SEQ ID NO: 9794 - protein, 7 aa, Artificial Sequence
  Synthetic
RTFSWSA

SEQ ID NO: 9795 - protein, 7 aa, Artificial Sequence
  Synthetic
STFSNYA

SEQ ID NO: 9796 - protein, 7 aa, Artificial Sequence
  Synthetic
RLTVDYA

SEQ ID NO: 9797 - protein, 7 aa, Artificial Sequence
  Synthetic
RLTVDYA

SEQ ID NO: 9798 - protein, 7 aa, Artificial Sequence
  Synthetic
NTASIRA

SEQ ID NO: 9799 - protein, 7 aa, Artificial Sequence
  Synthetic
RTFSSYN

SEQ ID NO: 9800 - protein, 7 aa, Artificial Sequence
  Synthetic
RTSRSYG

SEQ ID NO: 9801 - protein, 7 aa, Artificial Sequence
  Synthetic
RTFSSYA

SEQ ID NO: 9802 - protein, 7 aa, Artificial Sequence
  Synthetic
RTFSSYA

SEQ ID NO: 9803 - protein, 7 aa, Artificial Sequence
  Synthetic
FTLDYYS

SEQ ID NO: 9804 - protein, 7 aa, Artificial Sequence
  Synthetic
SISSITT

SEQ ID NO: 9805 - protein, 7 aa, Artificial Sequence
  Synthetic
RTFSSYA

SEQ ID NO: 9806 - protein, 7 aa, Artificial Sequence
  Synthetic
RTFSMDP

SEQ ID NO: 9807 - protein, 7 aa, Artificial Sequence
  Synthetic
RTFSRYP

SEQ ID NO: 9808 - protein, 7 aa, Artificial Sequence
  Synthetic
LTFSRYV

SEQ ID NO: 9809 - protein, 7 aa, Artificial Sequence
  Synthetic
RTFSSTV

SEQ ID NO: 9810 - protein, 7 aa, Artificial Sequence
  Synthetic
FTFGTSN

SEQ ID NO: 9811 - protein, 7 aa, Artificial Sequence
  Synthetic
SIFRLST

SEQ ID NO: 9812 - protein, 7 aa, Artificial Sequence
  Synthetic
SLFSILR

SEQ ID NO: 9813 - protein, 7 aa, Artificial Sequence
  Synthetic
YPHPYLH

SEQ ID NO: 9814 - protein, 7 aa, Artificial Sequence
  Synthetic
RTFSDYA

SEQ ID NO: 9815 - protein, 7 aa, Artificial Sequence
  Synthetic
RTFSTYA

SEQ ID NO: 9816 - protein, 7 aa, Artificial Sequence
  Synthetic
RTFSRAV

SEQ ID NO: 9817 - protein, 7 aa, Artificial Sequence
  Synthetic
YTSGRDS

SEQ ID NO: 9818 - protein, 7 aa, Artificial Sequence
  Synthetic
YTYSSNC

SEQ ID NO: 9819 - protein, 7 aa, Artificial Sequence
  Synthetic
SIFSIDT

SEQ ID NO: 9820 - protein, 7 aa, Artificial Sequence
  Synthetic
SIFSIYA

SEQ ID NO: 9821 - protein, 7 aa, Artificial Sequence
  Synthetic
STFGIRT

SEQ ID NO: 9822 - protein, 7 aa, Artificial Sequence
  Synthetic
GTFSTYG

SEQ ID NO: 9823 - protein, 7 aa, Artificial Sequence
  Synthetic
RTFSSDV

SEQ ID NO: 9824 - protein, 6 aa, Artificial Sequence
  Synthetic
PFSPNS

SEQ ID NO: 9825 - protein, 7 aa, Artificial Sequence
  Synthetic
RTFRNYP

SEQ ID NO: 9826 - protein, 7 aa, Artificial Sequence
  Synthetic
SRFDNYA

SEQ ID NO: 9827 - protein, 7 aa, Artificial Sequence
  Synthetic
SIFSGNV

SEQ ID NO: 9828 - protein, 7 aa, Artificial Sequence
  Synthetic
SIYSLIA

SEQ ID NO: 9829 - protein, 7 aa, Artificial Sequence
  Synthetic
SGFNNNA

SEQ ID NO: 9830 - protein, 7 aa, Artificial Sequence
  Synthetic
NIVSIDA

SEQ ID NO: 9831 - protein, 7 aa, Artificial Sequence
  Synthetic
NIIGGNH

SEQ ID NO: 9832 - protein, 7 aa, Artificial Sequence
  Synthetic
FTLDYYA

SEQ ID NO: 9833 - protein, 7 aa, Artificial Sequence
  Synthetic
FTFSNYA

SEQ ID NO: 9834 - protein, 7 aa, Artificial Sequence
  Synthetic
SIFSLND

SEQ ID NO: 9835 - protein, 7 aa, Artificial Sequence
  Synthetic
RTFSNDH

SEQ ID NO: 9836 - protein, 7 aa, Artificial Sequence
  Synthetic
RSLSNYY

SEQ ID NO: 9837 - protein, 12 aa, Artificial Sequence
  Synthetic
RTFSDHSGYTYT

SEQ ID NO: 9838 - protein, 7 aa, Artificial Sequence
  Synthetic
SISGIVV

SEQ ID NO: 9839 - protein, 7 aa, Artificial Sequence
  Synthetic
NTDSSYY

SEQ ID NO: 9840 - protein, 7 aa, Artificial Sequence
  Synthetic
IMLGYFT

SEQ ID NO: 9841 - protein, 7 aa, Artificial Sequence
  Synthetic
FTLGYYP

SEQ ID NO: 9842 - protein, 7 aa, Artificial Sequence
  Synthetic
SISRFNA

SEQ ID NO: 9843 - protein, 7 aa, Artificial Sequence
  Synthetic
HTFNYPI

SEQ ID NO: 9844 - protein, 7 aa, Artificial Sequence
  Synthetic
RTWSIYG

SEQ ID NO: 9845 - protein, 7 aa, Artificial Sequence
  Synthetic
SFFMSNV

SEQ ID NO: 9846 - protein, 7 aa, Artificial Sequence
  Synthetic
GTLEHYA

SEQ ID NO: 9847 - protein, 7 aa, Artificial Sequence
  Synthetic
SIASIYR

SEQ ID NO: 9848 - protein, 7 aa, Artificial Sequence
  Synthetic
GDFSRNA

SEQ ID NO: 9849 - protein, 7 aa, Artificial Sequence
  Synthetic
SIVNFET

SEQ ID NO: 9850 - protein, 7 aa, Artificial Sequence
  Synthetic
GSFSRNA

SEQ ID NO: 9851 - protein, 7 aa, Artificial Sequence
  Synthetic
RTLSSYA

SEQ ID NO: 9852 - protein, 7 aa, Artificial Sequence
  Synthetic
SILSFNH

SEQ ID NO: 9853 - protein, 7 aa, Artificial Sequence
  Synthetic
SIFTIYA

SEQ ID NO: 9854 - protein, 7 aa, Artificial Sequence
  Synthetic
RTFSRSS

SEQ ID NO: 9855 - protein, 7 aa, Artificial Sequence
  Synthetic
TTFSKNA

SEQ ID NO: 9856 - protein, 7 aa, Artificial Sequence
  Synthetic
RTFTTYL

SEQ ID NO: 9857 - protein, 7 aa, Artificial Sequence
  Synthetic
SIFSPNA

SEQ ID NO: 9858 - protein, 7 aa, Artificial Sequence
  Synthetic
SIFSGNA

SEQ ID NO: 9859 - protein, 7 aa, Artificial Sequence
  Synthetic
NIFSFNV

SEQ ID NO: 9860 - protein, 10 aa, Artificial Sequence
  Synthetic
FSGFTLDYYA

SEQ ID NO: 9861 - protein, 7 aa, Artificial Sequence
  Synthetic
FRLQYYT

SEQ ID NO: 9862 - protein, 7 aa, Artificial Sequence
  Synthetic
RTFSSYV

SEQ ID NO: 9863 - protein, 7 aa, Artificial Sequence
  Synthetic
RTFTNYG

SEQ ID NO: 9864 - protein, 7 aa, Artificial Sequence
  Synthetic
FTFSSYA

SEQ ID NO: 9865 - protein, 7 aa, Artificial Sequence
  Synthetic
IIFFMYD

SEQ ID NO: 9866 - protein, 7 aa, Artificial Sequence
  Synthetic
SVSRTYV

SEQ ID NO: 9867 - protein, 7 aa, Artificial Sequence
  Synthetic
TALTYYA

SEQ ID NO: 9868 - protein, 7 aa, Artificial Sequence
  Synthetic
IIFRELG

SEQ ID NO: 9869 - protein, 7 aa, Artificial Sequence
  Synthetic
NINSMHV

SEQ ID NO: 9870 - protein, 7 aa, Artificial Sequence
  Synthetic
TIFSRNI

SEQ ID NO: 9871 - protein, 7 aa, Artificial Sequence
  Synthetic
RTGSRHA

SEQ ID NO: 9872 - protein, 7 aa, Artificial Sequence
  Synthetic
RTSTSYA

SEQ ID NO: 9873 - protein, 7 aa, Artificial Sequence
  Synthetic
RPFRNYR

SEQ ID NO: 9874 - protein, 7 aa, Artificial Sequence
  Synthetic
FTFSRAV

SEQ ID NO: 9875 - protein, 7 aa, Artificial Sequence
  Synthetic
GVFIIYN

SEQ ID NO: 9876 - protein, 7 aa, Artificial Sequence
  Synthetic
RDFSMYM

SEQ ID NO: 9877 - protein, 7 aa, Artificial Sequence
  Synthetic
RTFSNYY

SEQ ID NO: 9878 - protein, 7 aa, Artificial Sequence
  Synthetic
RTIDVSV

SEQ ID NO: 9879 - protein, 7 aa, Artificial Sequence
  Synthetic
RMFSINS

SEQ ID NO: 9880 - protein, 7 aa, Artificial Sequence
  Synthetic
RTFSSYA

SEQ ID NO: 9881 - protein, 7 aa, Artificial Sequence
  Synthetic
VTLEEVS

SEQ ID NO: 9882 - protein, 7 aa, Artificial Sequence
  Synthetic
SLASMNS

SEQ ID NO: 9883 - protein, 7 aa, Artificial Sequence
  Synthetic
TIFSYNA

SEQ ID NO: 9884 - protein, 8 aa, Artificial Sequence
  Synthetic
GAVYHRSG

SEQ ID NO: 9885 - protein, 7 aa, Artificial Sequence
  Synthetic
FTIENYH

SEQ ID NO: 9886 - protein, 7 aa, Artificial Sequence
  Synthetic
SNLRLYG

SEQ ID NO: 9887 - protein, 7 aa, Artificial Sequence
  Synthetic
FTLNYYS

SEQ ID NO: 9888 - protein, 7 aa, Artificial Sequence
  Synthetic
VNLNNFA

SEQ ID NO: 9889 - protein, 7 aa, Artificial Sequence
  Synthetic
LNFDVLA

SEQ ID NO: 9890 - protein, 7 aa, Artificial Sequence
  Synthetic
FVLEIFV

SEQ ID NO: 9891 - protein, 9 aa, Artificial Sequence
  Synthetic
TTSSLDYIP

SEQ ID NO: 9892 - protein, 7 aa, Artificial Sequence
  Synthetic
FTLDSHH

SEQ ID NO: 9893 - protein, 7 aa, Artificial Sequence
  Synthetic
LDLDYLT

SEQ ID NO: 9894 - protein, 7 aa, Artificial Sequence
  Synthetic
SSLDSYA

SEQ ID NO: 9895 - protein, 7 aa, Artificial Sequence
  Synthetic
SSLDSYA

SEQ ID NO: 9896 - protein, 7 aa, Artificial Sequence
  Synthetic
EPLENNA

SEQ ID NO: 9897 - protein, 7 aa, Artificial Sequence
  Synthetic
EALYHYA

SEQ ID NO: 9898 - protein, 7 aa, Artificial Sequence
  Synthetic
RTLNGYD

SEQ ID NO: 9899 - protein, 7 aa, Artificial Sequence
  Synthetic
SSLSYYH

SEQ ID NO: 9900 - protein, 7 aa, Artificial Sequence
  Synthetic
SIFSIYA

SEQ ID NO: 9901 - protein, 7 aa, Artificial Sequence
  Synthetic
SVFTMYT

SEQ ID NO: 9902 - protein, 7 aa, Artificial Sequence
  Synthetic
FTLEYYA

SEQ ID NO: 9903 - protein, 7 aa, Artificial Sequence
  Synthetic
IIFSINA

SEQ ID NO: 9904 - protein, 7 aa, Artificial Sequence
  Synthetic
GNLDYYA

SEQ ID NO: 9905 - protein, 13 aa, Artificial Sequence
  Synthetic
SLPSTPFNPFNNM

SEQ ID NO: 9906 - protein, 7 aa, Artificial Sequence
  Synthetic
FTFGDWV

SEQ ID NO: 9907 - protein, 7 aa, Artificial Sequence
  Synthetic
SDISGIA

SEQ ID NO: 9908 - protein, 7 aa, Artificial Sequence
  Synthetic
FGMDYYY

SEQ ID NO: 9909 - protein, 7 aa, Artificial Sequence
  Synthetic
RTSSFYA

SEQ ID NO: 9910 - protein, 7 aa, Artificial Sequence
  Synthetic
RSFSAAV

SEQ ID NO: 9911 - protein, 7 aa, Artificial Sequence
  Synthetic
LIFRFSA

SEQ ID NO: 9912 - protein, 7 aa, Artificial Sequence
  Synthetic
LSFRSYG

SEQ ID NO: 9913 - protein, 7 aa, Artificial Sequence
  Synthetic
IILRFTS

SEQ ID NO: 9914 - protein, 7 aa, Artificial Sequence
  Synthetic
RTFRLYN

SEQ ID NO: 9915 - protein, 7 aa, Artificial Sequence
  Synthetic
FTFSRYT

SEQ ID NO: 9916 - protein, 7 aa, Artificial Sequence
  Synthetic
RTLDMYA

SEQ ID NO: 9917 - protein, 7 aa, Artificial Sequence
  Synthetic
RINGDYA

SEQ ID NO: 9918 - protein, 7 aa, Artificial Sequence
  Synthetic
FTLADYV

SEQ ID NO: 9919 - protein, 7 aa, Artificial Sequence
  Synthetic
VPFSDYT

SEQ ID NO: 9920 - protein, 7 aa, Artificial Sequence
  Synthetic
FTLDDYA

SEQ ID NO: 9921 - protein, 7 aa, Artificial Sequence
  Synthetic
GTFSDYG

SEQ ID NO: 9922 - protein, 7 aa, Artificial Sequence
  Synthetic
RADIIYA

SEQ ID NO: 9923 - protein, 7 aa, Artificial Sequence
  Synthetic
SIVSIYA

SEQ ID NO: 9924 - protein, 7 aa, Artificial Sequence
  Synthetic
STFSSYG

SEQ ID NO: 9925 - protein, 7 aa, Artificial Sequence
  Synthetic
STFNNPA

SEQ ID NO: 9926 - protein, 11 aa, Artificial Sequence
  Synthetic
SAVSDSFSTYA

SEQ ID NO: 9927 - protein, 7 aa, Artificial Sequence
  Synthetic
PLFNLYD

SEQ ID NO: 9928 - protein, 7 aa, Artificial Sequence
  Synthetic
RTFSRYA

SEQ ID NO: 9929 - protein, 7 aa, Artificial Sequence
  Synthetic
RTFSRYT

SEQ ID NO: 9930 - protein, 7 aa, Artificial Sequence
  Synthetic
SSFSRYA

SEQ ID NO: 9931 - protein, 7 aa, Artificial Sequence
  Synthetic
FIFSLYT

SEQ ID NO: 9932 - protein, 7 aa, Artificial Sequence
  Synthetic
IIFSIYT

SEQ ID NO: 9933 - protein, 7 aa, Artificial Sequence
  Synthetic
SIARPGA

SEQ ID NO: 9934 - protein, 7 aa, Artificial Sequence
  Synthetic
LTFSSTA

SEQ ID NO: 9935 - protein, 8 aa, Artificial Sequence
  Synthetic
STTATIYS

SEQ ID NO: 9936 - protein, 7 aa, Artificial Sequence
  Synthetic
SIVNSRT

SEQ ID NO: 9937 - protein, 8 aa, Artificial Sequence
  Synthetic
ERSINNYG

SEQ ID NO: 9938 - protein, 7 aa, Artificial Sequence
  Synthetic
FTFSSYR

SEQ ID NO: 9939 - protein, 7 aa, Artificial Sequence
  Synthetic
VIFSIYT

SEQ ID NO: 9940 - protein, 7 aa, Artificial Sequence
  Synthetic
LTFGNYA

SEQ ID NO: 9941 - protein, 8 aa, Artificial Sequence
  Synthetic
GRTFSGYA

SEQ ID NO: 9942 - protein, 7 aa, Artificial Sequence
  Synthetic
RTFTSYY

SEQ ID NO: 9943 - protein, 7 aa, Artificial Sequence
  Synthetic
IIFDYYS

SEQ ID NO: 9944 - protein, 7 aa, Artificial Sequence
  Synthetic
MSFSRRP

SEQ ID NO: 9945 - protein, 7 aa, Artificial Sequence
  Synthetic
RTFSSYV

SEQ ID NO: 9946 - protein, 7 aa, Artificial Sequence
  Synthetic
LSLSDYA

SEQ ID NO: 9947 - protein, 7 aa, Artificial Sequence
  Synthetic
GTLRNYD

SEQ ID NO: 9948 - protein, 7 aa, Artificial Sequence
  Synthetic
GTVSTID

SEQ ID NO: 9949 - protein, 7 aa, Artificial Sequence
  Synthetic
RTLSTKT

SEQ ID NO: 9950 - protein, 7 aa, Artificial Sequence
  Synthetic
GTLSSYA

SEQ ID NO: 9951 - protein, 7 aa, Artificial Sequence
  Synthetic
IIFRPNY

SEQ ID NO: 9952 - protein, 7 aa, Artificial Sequence
  Synthetic
SIASLNG

SEQ ID NO: 9953 - protein, 7 aa, Artificial Sequence
  Synthetic
RTFNKNA

SEQ ID NO: 9954 - protein, 7 aa, Artificial Sequence
  Synthetic
SIFSIWA

SEQ ID NO: 9955 - protein, 7 aa, Artificial Sequence
  Synthetic
TTFNMYA

SEQ ID NO: 9956 - protein, 7 aa, Artificial Sequence
  Synthetic
GTFSSNA

SEQ ID NO: 9957 - protein, 7 aa, Artificial Sequence
  Synthetic
STFDDYA

SEQ ID NO: 9958 - protein, 7 aa, Artificial Sequence
  Synthetic
FPFSSYV

SEQ ID NO: 9959 - protein, 7 aa, Artificial Sequence
  Synthetic
VTVRDVP

SEQ ID NO: 9960 - protein, 7 aa, Artificial Sequence
  Synthetic
TTLFIAA

SEQ ID NO: 9961 - protein, 7 aa, Artificial Sequence
  Synthetic
ITDSNYA

SEQ ID NO: 9962 - protein, 7 aa, Artificial Sequence
  Synthetic
SFFSMHD

SEQ ID NO: 9963 - protein, 7 aa, Artificial Sequence
  Synthetic
FTLGHYA

SEQ ID NO: 9964 - protein, 14 aa, Artificial Sequence
  Synthetic
RTFSTPGRTFSDYG

SEQ ID NO: 9965 - protein, 7 aa, Artificial Sequence
  Synthetic
SISSFYF

SEQ ID NO: 9966 - protein, 7 aa, Artificial Sequence
  Synthetic
FTFSSTP

SEQ ID NO: 9967 - protein, 7 aa, Artificial Sequence
  Synthetic
FTFSTSP

SEQ ID NO: 9968 - protein, 14 aa, Artificial Sequence
  Synthetic
RTFSVSGRTFSDHG

SEQ ID NO: 9969 - protein, 7 aa, Artificial Sequence
  Synthetic
VTFSDYY

SEQ ID NO: 9970 - protein, 7 aa, Artificial Sequence
  Synthetic
RTFSNAL

SEQ ID NO: 9971 - protein, 7 aa, Artificial Sequence
  Synthetic
FTFSAKG

SEQ ID NO: 9972 - protein, 7 aa, Artificial Sequence
  Synthetic
RSFSLAS

SEQ ID NO: 9973 - protein, 7 aa, Artificial Sequence
  Synthetic
SISSIDV

SEQ ID NO: 9974 - protein, 7 aa, Artificial Sequence
  Synthetic
SMFSMYN

SEQ ID NO: 9975 - protein, 7 aa, Artificial Sequence
  Synthetic
GTFSSYA

SEQ ID NO: 9976 - protein, 7 aa, Artificial Sequence
  Synthetic
FSFSDYQ

SEQ ID NO: 9977 - protein, 7 aa, Artificial Sequence
  Synthetic
SMFSMYR

SEQ ID NO: 9978 - protein, 7 aa, Artificial Sequence
  Synthetic
RTSSVYS

SEQ ID NO: 9979 - protein, 7 aa, Artificial Sequence
  Synthetic
RMVSSRA

SEQ ID NO: 9980 - protein, 7 aa, Artificial Sequence
  Synthetic
FIFDNYA

SEQ ID NO: 9981 - protein, 7 aa, Artificial Sequence
  Synthetic
GTFSDYG

SEQ ID NO: 9982 - protein, 7 aa, Artificial Sequence
  Synthetic
RINSIYA

SEQ ID NO: 9983 - protein, 7 aa, Artificial Sequence
  Synthetic
FIFGWST

SEQ ID NO: 9984 - protein, 7 aa, Artificial Sequence
  Synthetic
FTLDYYA

SEQ ID NO: 9985 - protein, 7 aa, Artificial Sequence
  Synthetic
SIFSINA

SEQ ID NO: 9986 - protein, 7 aa, Artificial Sequence
  Synthetic
CTFSSYA

SEQ ID NO: 9987 - protein, 7 aa, Artificial Sequence
  Synthetic
RTFSSYA

SEQ ID NO: 9988 - protein, 7 aa, Artificial Sequence
  Synthetic
RTFSSYD

SEQ ID NO: 9989 - protein, 7 aa, Artificial Sequence
  Synthetic
RTFSSYA

SEQ ID NO: 9990 - protein, 7 aa, Artificial Sequence
  Synthetic
FTLDYYA

SEQ ID NO: 9991 - protein, 19 aa, Artificial Sequence
  Synthetic
HRWFRQAPGKEREIVAVIS

SEQ ID NO: 9992 - protein, 19 aa, Artificial Sequence
  Synthetic
VIWFRQAPGKEREIVSGIS

SEQ ID NO: 9993 - protein, 19 aa, Artificial Sequence
  Synthetic
MAWFRQAPGKEREWVARIN

SEQ ID NO: 9994 - protein, 19 aa, Artificial Sequence
  Synthetic
MTWYRQAPGKQRELVAVIT

SEQ ID NO: 9995 - protein, 19 aa, Artificial Sequence
  Synthetic
VGWYRQTPGNQREWVATSS

SEQ ID NO: 9996 - protein, 19 aa, Artificial Sequence
  Synthetic
MGWFRQAPGKEREFVAAIR

SEQ ID NO: 9997 - protein, 19 aa, Artificial Sequence
  Synthetic
MAWFRQAPGKERERVAKLL

SEQ ID NO: 9998 - protein, 19 aa, Artificial Sequence
  Synthetic
MAWFRQAPGKEREFLATVG

SEQ ID NO: 9999 - protein, 19 aa, Artificial Sequence
  Synthetic
MGWFRQVPGKEREGVARIN

SEQ ID NO: 10000 - protein, 19 aa, Artificial Sequence
  Synthetic
MGWFRQTPGKERELVAAIN

SEQ ID NO: 10001 - protein, 19 aa, Artificial Sequence
  Synthetic
MGWFRQAPGKEREFVADIS

SEQ ID NO: 10002 - protein, 19 aa, Artificial Sequence
  Synthetic
MGWFRQAPGKEREFVAAIS

SEQ ID NO: 10003 - protein, 19 aa, Artificial Sequence
  Synthetic
MGWYRQAPGKQRELVASIN

SEQ ID NO: 10004 - protein, 19 aa, Artificial Sequence
  Synthetic
IGWYRQAPGKQRELVAGIS

SEQ ID NO: 10005 - protein, 19 aa, Artificial Sequence
  Synthetic
MGWYRQAPGKQRELVAGIT

SEQ ID NO: 10006 - protein, 19 aa, Artificial Sequence
  Synthetic
MGWYRQAPGKQRELVATIS

SEQ ID NO: 10007 - protein, 19 aa, Artificial Sequence
  Synthetic
MAWFRQAPGQEREFVAAIS

SEQ ID NO: 10008 - protein, 19 aa, Artificial Sequence
  Synthetic
MGWFRQAPGKDREFVAAIS

SEQ ID NO: 10009 - protein, 19 aa, Artificial Sequence
  Synthetic
MGWYRQPPGKQREFVANIF

SEQ ID NO: 10010 - protein, 19 aa, Artificial Sequence
  Synthetic
MAWFRQAPGKERELVAAIT

SEQ ID NO: 10011 - protein, 19 aa, Artificial Sequence
  Synthetic
LGWFREAPEKEREVVAAIY

SEQ ID NO: 10012 - protein, 19 aa, Artificial Sequence
  Synthetic
MAWFRQAPGKEREGVAAIW

SEQ ID NO: 10013 - protein, 19 aa, Artificial Sequence
  Synthetic
MAWFRQAPGSGREGVAGIS

SEQ ID NO: 10014 - protein, 19 aa, Artificial Sequence
  Synthetic
MAWFRQPPGQEREMVATVN

SEQ ID NO: 10015 - protein, 19 aa, Artificial Sequence
  Synthetic
TGWYRQAPGKEREWVSSIS

SEQ ID NO: 10016 - protein, 19 aa, Artificial Sequence
  Synthetic
TGWFRQAPGKEREGVAAIL

SEQ ID NO: 10017 - protein, 19 aa, Artificial Sequence
  Synthetic
MGWFRQAPGKEREFVAAIS

SEQ ID NO: 10018 - protein, 19 aa, Artificial Sequence
  Synthetic
MGWFRQTPGKEREKVAALN

SEQ ID NO: 10019 - protein, 19 aa, Artificial Sequence
  Synthetic
LGWFRQATGNEREGVAAIN

SEQ ID NO: 10020 - protein, 19 aa, Artificial Sequence
  Synthetic
MAWYRQAPGKERELVSTII

SEQ ID NO: 10021 - protein, 19 aa, Artificial Sequence
  Synthetic
VGWFRQAPGKEREGVAIIY

SEQ ID NO: 10022 - protein, 19 aa, Artificial Sequence
  Synthetic
MAWFRQVTGKEREGVAYIP

SEQ ID NO: 10023 - protein, 19 aa, Artificial Sequence
  Synthetic
MGWYRQIPGHECELVASIG

SEQ ID NO: 10024 - protein, 19 aa, Artificial Sequence
  Synthetic
IYWYRQAPGKEREWVLSLN

SEQ ID NO: 10025 - protein, 19 aa, Artificial Sequence
  Synthetic
MGWFRQTPGKEREGIATLY

SEQ ID NO: 10026 - protein, 19 aa, Artificial Sequence
  Synthetic
MGWFRQAPGKKREGVASIY

SEQ ID NO: 10027 - protein, 19 aa, Artificial Sequence
  Synthetic
MGWLRQAPGKERERVASIY

SEQ ID NO: 10028 - protein, 19 aa, Artificial Sequence
  Synthetic
MGWFRQAPGKEREGVATEY

SEQ ID NO: 10029 - protein, 19 aa, Artificial Sequence
  Synthetic
MGWFRQVPGKELESVATIA

SEQ ID NO: 10030 - protein, 19 aa, Artificial Sequence
  Synthetic
IGWFRQAPGKEREGVAAIY

SEQ ID NO: 10031 - protein, 19 aa, Artificial Sequence
  Synthetic
MGWFRQAPGKEREGLATIV

SEQ ID NO: 10032 - protein, 19 aa, Artificial Sequence
  Synthetic
MGRFREAPGKEREGVAVID

SEQ ID NO: 10033 - protein, 19 aa, Artificial Sequence
  Synthetic
MGWFRQVPGQEREVVAVIF

SEQ ID NO: 10034 - protein, 19 aa, Artificial Sequence
  Synthetic
VGWFRQAPGREREGVAYMH

SEQ ID NO: 10035 - protein, 19 aa, Artificial Sequence
  Synthetic
IAWFRQAPGKEREGVTAIY

SEQ ID NO: 10036 - protein, 19 aa, Artificial Sequence
  Synthetic
WAWFRQAPGKEREGVATIN

SEQ ID NO: 10037 - protein, 19 aa, Artificial Sequence
  Synthetic
MGWFRQAPGKEREGVATIH

SEQ ID NO: 10038 - protein, 19 aa, Artificial Sequence
  Synthetic
MGWFRQAPGKEREGVATIN

SEQ ID NO: 10039 - protein, 19 aa, Artificial Sequence
  Synthetic
MGWFRQAPGKEREGVAAIN

SEQ ID NO: 10040 - protein, 19 aa, Artificial Sequence
  Synthetic
MGWFRQGPGKEREAVADVN

SEQ ID NO: 10041 - protein, 19 aa, Artificial Sequence
  Synthetic
AGWYRQAPGKECELVASIF

SEQ ID NO: 10042 - protein, 19 aa, Artificial Sequence
  Synthetic
HGWFRQAPGKEREVVARFN

SEQ ID NO: 10043 - protein, 19 aa, Artificial Sequence
  Synthetic
MGWFRQAPGQEREGVAVIS

SEQ ID NO: 10044 - protein, 19 aa, Artificial Sequence
  Synthetic
MGWFRQAPGKEREGVAGVY

SEQ ID NO: 10045 - protein, 19 aa, Artificial Sequence
  Synthetic
MAWFRQAPGKEREGVAGIY

SEQ ID NO: 10046 - protein, 19 aa, Artificial Sequence
  Synthetic
MGWFRQAPGKEREAVAGIY

SEQ ID NO: 10047 - protein, 19 aa, Artificial Sequence
  Synthetic
LAWFRQAPGKEREEVAAIY

SEQ ID NO: 10048 - protein, 19 aa, Artificial Sequence
  Synthetic
MGWFRQAPGKEREGVAIVA

SEQ ID NO: 10049 - protein, 19 aa, Artificial Sequence
  Synthetic
LGWFRQTPGKEREGVAAIY

SEQ ID NO: 10050 - protein, 19 aa, Artificial Sequence
  Synthetic
RGWYRQAPGKERELVSIIT

SEQ ID NO: 10051 - protein, 19 aa, Artificial Sequence
  Synthetic
MGWFRQAPGKEREGVATFD

SEQ ID NO: 10052 - protein, 19 aa, Artificial Sequence
  Synthetic
MGWFRQAPGKEREGVAYID

SEQ ID NO: 10053 - protein, 19 aa, Artificial Sequence
  Synthetic
MGWFRQAPGKEREGVAAIY

SEQ ID NO: 10054 - protein, 19 aa, Artificial Sequence
  Synthetic
MGWFRQAPGKEREGVAAIY

SEQ ID NO: 10055 - protein, 19 aa, Artificial Sequence
  Synthetic
MGWFRQAPGKEREEVATID

SEQ ID NO: 10056 - protein, 19 aa, Artificial Sequence
  Synthetic
MGWFRQSPGKERQGVAVID

SEQ ID NO: 10057 - protein, 19 aa, Artificial Sequence
  Synthetic
IGWFRQAPGKEREGVATIY

SEQ ID NO: 10058 - protein, 19 aa, Artificial Sequence
  Synthetic
MGWFRQTPGKEREGVAAID

SEQ ID NO: 10059 - protein, 19 aa, Artificial Sequence
  Synthetic
MGWFRQAPGKEREGVAAID

SEQ ID NO: 10060 - protein, 19 aa, Artificial Sequence
  Synthetic
MGWYRQAPGNECELVSTIS

SEQ ID NO: 10061 - protein, 19 aa, Artificial Sequence
  Synthetic
MGWFRQAPGKEREGVAAIY

SEQ ID NO: 10062 - protein, 19 aa, Artificial Sequence
  Synthetic
MGWFRQAPGKEREGVGAID

SEQ ID NO: 10063 - protein, 19 aa, Artificial Sequence
  Synthetic
MGWFRQAPGKDREGVAAID

SEQ ID NO: 10064 - protein, 19 aa, Artificial Sequence
  Synthetic
MGWYRQAPGKERELVSTIS

SEQ ID NO: 10065 - protein, 19 aa, Artificial Sequence
  Synthetic
MGWFRQAPGKEREGVSYTG

SEQ ID NO: 10066 - protein, 19 aa, Artificial Sequence
  Synthetic
MGWFRQAPGKEREGVSYIG

SEQ ID NO: 10067 - protein, 19 aa, Artificial Sequence
  Synthetic
MGWFRQAPGKEREGVAIIY

SEQ ID NO: 10068 - protein, 19 aa, Artificial Sequence
  Synthetic
MGWFRQAPGKEREGVAIIN

SEQ ID NO: 10069 - protein, 19 aa, Artificial Sequence
  Synthetic
MAWFRQAPGMEREGVAASS

SEQ ID NO: 10070 - protein, 19 aa, Artificial Sequence
  Synthetic
MGWFRQAPGKEREEVARIS

SEQ ID NO: 10071 - protein, 19 aa, Artificial Sequence
  Synthetic
MGWFRQAPGKEREGVAIIS

SEQ ID NO: 10072 - protein, 19 aa, Artificial Sequence
  Synthetic
LGWLRQAPGQECELVSTIT

SEQ ID NO: 10073 - protein, 19 aa, Artificial Sequence
  Synthetic
MAWFRQTPGKEREGVARIN

SEQ ID NO: 10074 - protein, 19 aa, Artificial Sequence
  Synthetic
MGWFRQAPGKEREGVATIN

SEQ ID NO: 10075 - protein, 19 aa, Artificial Sequence
  Synthetic
LNWYRLATGKPREWVSSID

SEQ ID NO: 10076 - protein, 19 aa, Artificial Sequence
  Synthetic
MGWFRQAPGKEREGVALIY

SEQ ID NO: 10077 - protein, 19 aa, Artificial Sequence
  Synthetic
MGWFRQAPGKEREGVATIC

SEQ ID NO: 10078 - protein, 19 aa, Artificial Sequence
  Synthetic
MGWFRQAPGKEREWVAGIT

SEQ ID NO: 10079 - protein, 19 aa, Artificial Sequence
  Synthetic
MSWYRQAPGKEREFVSAID

SEQ ID NO: 10080 - protein, 19 aa, Artificial Sequence
  Synthetic
RSWSRQAPGKEREFVSIIV

SEQ ID NO: 10081 - protein, 19 aa, Artificial Sequence
  Synthetic
MAWYRQAPGKERELVSTIS

SEQ ID NO: 10082 - protein, 19 aa, Artificial Sequence
  Synthetic
MGWYRQAPGKERELLSTRS

SEQ ID NO: 10083 - protein, 19 aa, Artificial Sequence
  Synthetic
MGWFRQAPGSQREGVAVID

SEQ ID NO: 10084 - protein, 19 aa, Artificial Sequence
  Synthetic
MGWFRQAPGKEREGVATIA

SEQ ID NO: 10085 - protein, 19 aa, Artificial Sequence
  Synthetic
MSWFRQAPGKERELVSTIR

SEQ ID NO: 10086 - protein, 19 aa, Artificial Sequence
  Synthetic
AAWFRQAPGKGREGVAAIN

SEQ ID NO: 10087 - protein, 19 aa, Artificial Sequence
  Synthetic
MGWFRQAPGREREGVASIN

SEQ ID NO: 10088 - protein, 19 aa, Artificial Sequence
  Synthetic
MRWFRQAPGKGREGVASIN

SEQ ID NO: 10089 - protein, 19 aa, Artificial Sequence
  Synthetic
IGWFRQAPGKEREAVATIN

SEQ ID NO: 10090 - protein, 19 aa, Artificial Sequence
  Synthetic
VGWFRQAPGKEREGVAVFI

SEQ ID NO: 10091 - protein, 19 aa, Artificial Sequence
  Synthetic
IGWFRQAPGKEREGVAVVN

SEQ ID NO: 10092 - protein, 19 aa, Artificial Sequence
  Synthetic
MAWFRQAPGKEREGVASVN

SEQ ID NO: 10093 - protein, 19 aa, Artificial Sequence
  Synthetic
MGWFRQAPGKEREGVAVIN

SEQ ID NO: 10094 - protein, 19 aa, Artificial Sequence
  Synthetic
MGWFRQAPGKDREVVATIN

SEQ ID NO: 10095 - protein, 19 aa, Artificial Sequence
  Synthetic
MYWFRQAPGKGLEWVSSIY

SEQ ID NO: 10096 - protein, 19 aa, Artificial Sequence
  Synthetic
MGWFRQAPGKEREGVAAIS

SEQ ID NO: 10097 - protein, 19 aa, Artificial Sequence
  Synthetic
MSWYRQVPGKERELVSQIN

SEQ ID NO: 10098 - protein, 19 aa, Artificial Sequence
  Synthetic
VGWFRQAPGKAHEGVASIN

SEQ ID NO: 10099 - protein, 19 aa, Artificial Sequence
  Synthetic
MGWFRHRPGKECELVSMVL

SEQ ID NO: 10100 - protein, 19 aa, Artificial Sequence
  Synthetic
MGWYRQAPGRECELVATVS

SEQ ID NO: 10101 - protein, 19 aa, Artificial Sequence
  Synthetic
MNWYRQAPAKERELVSSIN

SEQ ID NO: 10102 - protein, 19 aa, Artificial Sequence
  Synthetic
MAWFRQVPEKQREAVASIA

SEQ ID NO: 10103 - protein, 19 aa, Artificial Sequence
  Synthetic
LGWYHQAPGNECELVSFIG

SEQ ID NO: 10104 - protein, 19 aa, Artificial Sequence
  Synthetic
IGWFRQAPEKEREVVASMN

SEQ ID NO: 10105 - protein, 19 aa, Artificial Sequence
  Synthetic
MGWFRQAPGKDREGVASIN

SEQ ID NO: 10106 - protein, 19 aa, Artificial Sequence
  Synthetic
VAWFRQAPGKEREGVACIY

SEQ ID NO: 10107 - protein, 19 aa, Artificial Sequence
  Synthetic
MEWYRQAPGKEREFLSGIE

SEQ ID NO: 10108 - protein, 19 aa, Artificial Sequence
  Synthetic
AGWFRQVPGEAREAVAFIN

SEQ ID NO: 10109 - protein, 19 aa, Artificial Sequence
  Synthetic
ITWFRQPPGKEREAVGFIN

SEQ ID NO: 10110 - protein, 19 aa, Artificial Sequence
  Synthetic
MAWFRQAPGKAREIVAGKK

SEQ ID NO: 10111 - protein, 19 aa, Artificial Sequence
  Synthetic
MSWFRQAPGKGREWIATIN

SEQ ID NO: 10112 - protein, 19 aa, Artificial Sequence
  Synthetic
MAWFRQGPGKEREGVAAIR

SEQ ID NO: 10113 - protein, 19 aa, Artificial Sequence
  Synthetic
MGWFRQAPGEEREGVAALN

SEQ ID NO: 10114 - protein, 19 aa, Artificial Sequence
  Synthetic
MAWFRQVPGKEREGVAAIN

SEQ ID NO: 10115 - protein, 19 aa, Artificial Sequence
  Synthetic
IGWFRQAPGNDPEGVAYIT

SEQ ID NO: 10116 - protein, 19 aa, Artificial Sequence
  Synthetic
ISWHRQAPGKEREFLSSIV

SEQ ID NO: 10117 - protein, 19 aa, Artificial Sequence
  Synthetic
MGWFRQAPGKEREGVAVIN

SEQ ID NO: 10118 - protein, 19 aa, Artificial Sequence
  Synthetic
MGWFRQAPGKEREGVATIN

SEQ ID NO: 10119 - protein, 19 aa, Artificial Sequence
  Synthetic
MGWIRQAPGKGREAVACIH

SEQ ID NO: 10120 - protein, 19 aa, Artificial Sequence
  Synthetic
IGWFRRAPGKEREGVAAIV

SEQ ID NO: 10121 - protein, 19 aa, Artificial Sequence
  Synthetic
MGWYRQAPGKEREMVSTIS

SEQ ID NO: 10122 - protein, 19 aa, Artificial Sequence
  Synthetic
MGWFRQAPGKEREGVAAIY

SEQ ID NO: 10123 - protein, 19 aa, Artificial Sequence
  Synthetic
MGWFRQAPGKGLEGVAAIN

SEQ ID NO: 10124 - protein, 19 aa, Artificial Sequence
  Synthetic
MGWFRQAPGNEREWVAQIE

SEQ ID NO: 10125 - protein, 19 aa, Artificial Sequence
  Synthetic
MNWYRQAPGKEREFVSAID

SEQ ID NO: 10126 - protein, 19 aa, Artificial Sequence
  Synthetic
MSWYRQLPGKERELVATIS

SEQ ID NO: 10127 - protein, 19 aa, Artificial Sequence
  Synthetic
MGWFRQAPGKKREGVAAIV

SEQ ID NO: 10128 - protein, 19 aa, Artificial Sequence
  Synthetic
MGWFRQAPGKDREVVATLL

SEQ ID NO: 10129 - protein, 19 aa, Artificial Sequence
  Synthetic
MGWYHQVPGNECELVSTIS

SEQ ID NO: 10130 - protein, 19 aa, Artificial Sequence
  Synthetic
MAWFRQVPGQEREVVAHIN

SEQ ID NO: 10131 - protein, 19 aa, Artificial Sequence
  Synthetic
LGWFRQAPGKERVMVATIN

SEQ ID NO: 10132 - protein, 19 aa, Artificial Sequence
  Synthetic
IGWFRQAPGKEREGVAVIY

SEQ ID NO: 10133 - protein, 19 aa, Artificial Sequence
  Synthetic
MAWFRQGPGKEREWVAVIN

SEQ ID NO: 10134 - protein, 19 aa, Artificial Sequence
  Synthetic
WAWFRQAPGKEREGVAAIH

SEQ ID NO: 10135 - protein, 19 aa, Artificial Sequence
  Synthetic
MGWFRQAPGKEREGVAAIN

SEQ ID NO: 10136 - protein, 19 aa, Artificial Sequence
  Synthetic
MAWVRQAPGKECELVATLG

SEQ ID NO: 10137 - protein, 19 aa, Artificial Sequence
  Synthetic
MGWFRQAPGKEREGVASIN

SEQ ID NO: 10138 - protein, 19 aa, Artificial Sequence
  Synthetic
LGWFRQVPGKEREGVARIV

SEQ ID NO: 10139 - protein, 19 aa, Artificial Sequence
  Synthetic
MAWFRQAPGQAREGVAYIY

SEQ ID NO: 10140 - protein, 19 aa, Artificial Sequence
  Synthetic
MNWYRQAPGKNREFVSGID

SEQ ID NO: 10141 - protein, 19 aa, Artificial Sequence
  Synthetic
MGWYRQAPGKQRELVANVI

SEQ ID NO: 10142 - protein, 19 aa, Artificial Sequence
  Synthetic
TGWFRQASGKEREGVAAIN

SEQ ID NO: 10143 - protein, 19 aa, Artificial Sequence
  Synthetic
MAWFRQAPGKECELVARMT

SEQ ID NO: 10144 - protein, 19 aa, Artificial Sequence
  Synthetic
IGWFRQAPGQEREGVAAIY

SEQ ID NO: 10145 - protein, 19 aa, Artificial Sequence
  Synthetic
MAWFRQAPGKEREGVAAAY

SEQ ID NO: 10146 - protein, 19 aa, Artificial Sequence
  Synthetic
MAWYRHVPGKERERVAAMY

SEQ ID NO: 10147 - protein, 19 aa, Artificial Sequence
  Synthetic
MGWFRQAPGKGRKPVATTY

SEQ ID NO: 10148 - protein, 19 aa, Artificial Sequence
  Synthetic
MGWFRQAPEKKREGVACIR

SEQ ID NO: 10149 - protein, 19 aa, Artificial Sequence
  Synthetic
LGWYRLTPENKCEFISTIH

SEQ ID NO: 10150 - protein, 19 aa, Artificial Sequence
  Synthetic
MGWFRQAPGKEREGVASIY

SEQ ID NO: 10151 - protein, 19 aa, Artificial Sequence
  Synthetic
MAWFRQAPGKEREGVAAIY

SEQ ID NO: 10152 - protein, 19 aa, Artificial Sequence
  Synthetic
MAWFRQAPGKEREGVGIIN

SEQ ID NO: 10153 - protein, 19 aa, Artificial Sequence
  Synthetic
MDWYRQAPGKEREGLAAIY

SEQ ID NO: 10154 - protein, 19 aa, Artificial Sequence
  Synthetic
MGWFREAPGKEREEIVALY

SEQ ID NO: 10155 - protein, 19 aa, Artificial Sequence
  Synthetic
LAWFRQHSGKEREGVASIN

SEQ ID NO: 10156 - protein, 19 aa, Artificial Sequence
  Synthetic
LGWYRQAPGKEREGVAHIG

SEQ ID NO: 10157 - protein, 19 aa, Artificial Sequence
  Synthetic
IAWFRQAPGEEREVVAVIE

SEQ ID NO: 10158 - protein, 19 aa, Artificial Sequence
  Synthetic
MGWFRQAPGKEREWVARIN

SEQ ID NO: 10159 - protein, 19 aa, Artificial Sequence
  Synthetic
MGWYRQVPGNECELASSIS

SEQ ID NO: 10160 - protein, 19 aa, Artificial Sequence
  Synthetic
WAWFRQVPGQEREWVAWID

SEQ ID NO: 10161 - protein, 19 aa, Artificial Sequence
  Synthetic
MGWFRQAPGKEREAIAGIS

SEQ ID NO: 10162 - protein, 19 aa, Artificial Sequence
  Synthetic
MTWYRQAPGKERELISTIS

SEQ ID NO: 10163 - protein, 19 aa, Artificial Sequence
  Synthetic
IGWYRQAPGKEREFVSRID

SEQ ID NO: 10164 - protein, 19 aa, Artificial Sequence
  Synthetic
IGWFRQTPGQERENVANIN

SEQ ID NO: 10165 - protein, 19 aa, Artificial Sequence
  Synthetic
MAWYRLAPGTEREGVATFS

SEQ ID NO: 10166 - protein, 19 aa, Artificial Sequence
  Synthetic
MGWFRQAPGKEREGVATID

SEQ ID NO: 10167 - protein, 19 aa, Artificial Sequence
  Synthetic
LTWFRQSPGREREGIATIF

SEQ ID NO: 10168 - protein, 19 aa, Artificial Sequence
  Synthetic
LSWFRQAPGKEREGVAGIR

SEQ ID NO: 10169 - protein, 19 aa, Artificial Sequence
  Synthetic
MGWFRQSPGKEREGVASFY

SEQ ID NO: 10170 - protein, 19 aa, Artificial Sequence
  Synthetic
MAWYRQAPGKERELVSSTI

SEQ ID NO: 10171 - protein, 19 aa, Artificial Sequence
  Synthetic
MGWYRKTPGSECEMVAEIK

SEQ ID NO: 10172 - protein, 19 aa, Artificial Sequence
  Synthetic
MGWYRQAPGKERELVSSIL

SEQ ID NO: 10173 - protein, 19 aa, Artificial Sequence
  Synthetic
MGWFRQAPGKEREGVAWIY

SEQ ID NO: 10174 - protein, 19 aa, Artificial Sequence
  Synthetic
MGWFRPAPGKEREGVAIIK

SEQ ID NO: 10175 - protein, 19 aa, Artificial Sequence
  Synthetic
MGWYRQAPGKERELVSSIQ

SEQ ID NO: 10176 - protein, 19 aa, Artificial Sequence
  Synthetic
MGWFRQTPGKEREGVASIN

SEQ ID NO: 10177 - protein, 19 aa, Artificial Sequence
  Synthetic
IAWFRQAPGKEREGVAAIS

SEQ ID NO: 10178 - protein, 19 aa, Artificial Sequence
  Synthetic
MAWFRQAPGKEREGVASLK

SEQ ID NO: 10179 - protein, 19 aa, Artificial Sequence
  Synthetic
MGWIRQVPGKEREGVGGIY

SEQ ID NO: 10180 - protein, 19 aa, Artificial Sequence
  Synthetic
LIWFRQAPGKEQEGVASIN

SEQ ID NO: 10181 - protein, 19 aa, Artificial Sequence
  Synthetic
MGWYRQAPGNECELVATIT

SEQ ID NO: 10182 - protein, 19 aa, Artificial Sequence
  Synthetic
VSWFRQPPGKDREGVAGIN

SEQ ID NO: 10183 - protein, 19 aa, Artificial Sequence
  Synthetic
MGWFRQAPGQEREGVAVIS

SEQ ID NO: 10184 - protein, 19 aa, Artificial Sequence
  Synthetic
MAWFRQAPGKEREGVAHIK

SEQ ID NO: 10185 - protein, 19 aa, Artificial Sequence
  Synthetic
MAWFRQAPGEEREGVAAIN

SEQ ID NO: 10186 - protein, 19 aa, Artificial Sequence
  Synthetic
WSWIRQSPGKELEWIAAVA

SEQ ID NO: 10187 - protein, 19 aa, Artificial Sequence
  Synthetic
TNWYRQAPGKEREFVSRIK

SEQ ID NO: 10188 - protein, 19 aa, Artificial Sequence
  Synthetic
WSWYRQFPGTEREFVSSMD

SEQ ID NO: 10189 - protein, 19 aa, Artificial Sequence
  Synthetic
MSWFRQAPGKECELVSSIQ

SEQ ID NO: 10190 - protein, 19 aa, Artificial Sequence
  Synthetic
MAWFRQASGKQREGVAAIN

SEQ ID NO: 10191 - protein, 19 aa, Artificial Sequence
  Synthetic
MGWFREGPGKEREGIATIL

SEQ ID NO: 10192 - protein, 19 aa, Artificial Sequence
  Synthetic
MGWFRQAPGKECERVAHIT

SEQ ID NO: 10193 - protein, 19 aa, Artificial Sequence
  Synthetic
IAWFRQAPGKGREGVATIN

SEQ ID NO: 10194 - protein, 19 aa, Artificial Sequence
  Synthetic
IGWIRQAPGKDREVVAAAN

SEQ ID NO: 10195 - protein, 19 aa, Artificial Sequence
  Synthetic
LGWFRQAPGKEREGVAGIN

SEQ ID NO: 10196 - protein, 19 aa, Artificial Sequence
  Synthetic
MAWFRQAPGKERELVAAIQ

SEQ ID NO: 10197 - protein, 19 aa, Artificial Sequence
  Synthetic
IGWFRQAPGKEREGVASIY

SEQ ID NO: 10198 - protein, 19 aa, Artificial Sequence
  Synthetic
LAWFRQAPEKEREGIAVLS

SEQ ID NO: 10199 - protein, 19 aa, Artificial Sequence
  Synthetic
LGWFRQAPGKEREGVTAIN

SEQ ID NO: 10200 - protein, 19 aa, Artificial Sequence
  Synthetic
MTWYRQAPGKEREFVSSIN

SEQ ID NO: 10201 - protein, 19 aa, Artificial Sequence
  Synthetic
MAWFRQAPGKECEWVSTIG

SEQ ID NO: 10202 - protein, 19 aa, Artificial Sequence
  Synthetic
MSWYRQVPGKGREFVSSIA

SEQ ID NO: 10203 - protein, 19 aa, Artificial Sequence
  Synthetic
MGWYRQAPGKECELSARIF

SEQ ID NO: 10204 - protein, 19 aa, Artificial Sequence
  Synthetic
MTWYRQAPGKEREFVSVID

SEQ ID NO: 10205 - protein, 19 aa, Artificial Sequence
  Synthetic
MSWYRRAPGKGRDFVSGID

SEQ ID NO: 10206 - protein, 19 aa, Artificial Sequence
  Synthetic
VGWFRQAPGKEREGVAAIY

SEQ ID NO: 10207 - protein, 19 aa, Artificial Sequence
  Synthetic
MAWFRQAPGKEREGVALIY

SEQ ID NO: 10208 - protein, 19 aa, Artificial Sequence
  Synthetic
MGWFRQAPGKEREGVATIL

SEQ ID NO: 10209 - protein, 19 aa, Artificial Sequence
  Synthetic
MTWFRQAPGKEREGVASIT

SEQ ID NO: 10210 - protein, 19 aa, Artificial Sequence
  Synthetic
MAWFRQAPGKEREGVATIN

SEQ ID NO: 10211 - protein, 19 aa, Artificial Sequence
  Synthetic
MGWFRQAPGKEREGVAAMD

SEQ ID NO: 10212 - protein, 19 aa, Artificial Sequence
  Synthetic
MGWFRQAPGKEREGVAAIF

SEQ ID NO: 10213 - protein, 19 aa, Artificial Sequence
  Synthetic
SGWFRQAPGKGLEWVAAIR

SEQ ID NO: 10214 - protein, 19 aa, Artificial Sequence
  Synthetic
MGWFRRAPGKEREGVAVID

SEQ ID NO: 10215 - protein, 19 aa, Artificial Sequence
  Synthetic
MGWFRQAPGGEREAVAAIN

SEQ ID NO: 10216 - protein, 19 aa, Artificial Sequence
  Synthetic
IGWFRQAPGKDREGVVFIN

SEQ ID NO: 10217 - protein, 19 aa, Artificial Sequence
  Synthetic
MTWFRQAPGKAREGVAALY

SEQ ID NO: 10218 - protein, 19 aa, Artificial Sequence
  Synthetic
MGWFRQAPGKEREGVAAMD

SEQ ID NO: 10219 - protein, 19 aa, Artificial Sequence
  Synthetic
LGWFRQAPGQGLEAVAAIA

SEQ ID NO: 10220 - protein, 19 aa, Artificial Sequence
  Synthetic
MAWFRQAPGKECELVSNIL

SEQ ID NO: 10221 - protein, 19 aa, Artificial Sequence
  Synthetic
MGWFRQAPGKEREGVAGIS

SEQ ID NO: 10222 - protein, 19 aa, Artificial Sequence
  Synthetic
MAWFRQAPEKEREWVACVR

SEQ ID NO: 10223 - protein, 19 aa, Artificial Sequence
  Synthetic
MAWFRQVLGEGREGVAFIT

SEQ ID NO: 10224 - protein, 19 aa, Artificial Sequence
  Synthetic
CMRWFRQAPKEREWVASVL

SEQ ID NO: 10225 - protein, 19 aa, Artificial Sequence
  Synthetic
MRWYRQAPGKEREWVAGMS

SEQ ID NO: 10226 - protein, 19 aa, Artificial Sequence
  Synthetic
MGWFRQAPGKEREGVAAMD

SEQ ID NO: 10227 - protein, 19 aa, Artificial Sequence
  Synthetic
IGWFRQAPGKEREGVAAIS

SEQ ID NO: 10228 - protein, 19 aa, Artificial Sequence
  Synthetic
MGWYHQAPGNECELVSAIF

SEQ ID NO: 10229 - protein, 19 aa, Artificial Sequence
  Synthetic
MGWFRQAPGKEREGVAHIY

SEQ ID NO: 10230 - protein, 19 aa, Artificial Sequence
  Synthetic
MGWFRQAPGKELEGVAGIS

SEQ ID NO: 10231 - protein, 19 aa, Artificial Sequence
  Synthetic
MGWFRQAPGKEREKVAIIT

SEQ ID NO: 10232 - protein, 19 aa, Artificial Sequence
  Synthetic
MGWYRQSPGRERELVSRIS

SEQ ID NO: 10233 - protein, 19 aa, Artificial Sequence
  Synthetic
MSWYRQAPEKDYEFVSVID

SEQ ID NO: 10234 - protein, 19 aa, Artificial Sequence
  Synthetic
LYWLRQAPGKECEFVSSID

SEQ ID NO: 10235 - protein, 19 aa, Artificial Sequence
  Synthetic
MAWFRQAPGKECELVSSID

SEQ ID NO: 10236 - protein, 19 aa, Artificial Sequence
  Synthetic
MGWFRQAPGKEREGVAAVS

SEQ ID NO: 10237 - protein, 19 aa, Artificial Sequence
  Synthetic
MAWFRQAPGQEREGVAAIS

SEQ ID NO: 10238 - protein, 19 aa, Artificial Sequence
  Synthetic
IGWFRQAPGKEREGVAAIL

SEQ ID NO: 10239 - protein, 19 aa, Artificial Sequence
  Synthetic
MGWFRQAPGKEREGVAGIS

SEQ ID NO: 10240 - protein, 19 aa, Artificial Sequence
  Synthetic
MAWFRQAPGKEREGVATIS

SEQ ID NO: 10241 - protein, 19 aa, Artificial Sequence
  Synthetic
RSWYRQAPGKEREFVSSIN

SEQ ID NO: 10242 - protein, 19 aa, Artificial Sequence
  Synthetic
MVWYRQGSGNECKLVSSIS

SEQ ID NO: 10243 - protein, 19 aa, Artificial Sequence
  Synthetic
MAWFRQAPGKEREGVAAIN

SEQ ID NO: 10244 - protein, 19 aa, Artificial Sequence
  Synthetic
MGWFRQAPGKEREGVAAIC

SEQ ID NO: 10245 - protein, 19 aa, Artificial Sequence
  Synthetic
MAWFRQAPGKEREGVAVVY

SEQ ID NO: 10246 - protein, 19 aa, Artificial Sequence
  Synthetic
MAWFRQAPGKEREGVGRIY

SEQ ID NO: 10247 - protein, 19 aa, Artificial Sequence
  Synthetic
MNWYRQAPGKEREFVSGID

SEQ ID NO: 10248 - protein, 19 aa, Artificial Sequence
  Synthetic
MSWHRQAPGKEREFVSAID

SEQ ID NO: 10249 - protein, 19 aa, Artificial Sequence
  Synthetic
MNWYRQVPGKEREFVSAID

SEQ ID NO: 10250 - protein, 19 aa, Artificial Sequence
  Synthetic
MSWYRQAPGKEREFVSAID

SEQ ID NO: 10251 - protein, 19 aa, Artificial Sequence
  Synthetic
MSWFRQAPGKELEWVSGIN

SEQ ID NO: 10252 - protein, 19 aa, Artificial Sequence
  Synthetic
MGWFHQAPGNECELVSSIS

SEQ ID NO: 10253 - protein, 19 aa, Artificial Sequence
  Synthetic
MGRFRQVPGKEREGVATIY

SEQ ID NO: 10254 - protein, 19 aa, Artificial Sequence
  Synthetic
MSWYRQAPGKEREFVSAID

SEQ ID NO: 10255 - protein, 19 aa, Artificial Sequence
  Synthetic
MAWYRQAPGKERELVSTII

SEQ ID NO: 10256 - protein, 19 aa, Artificial Sequence
  Synthetic
MGWFRQAPGKEREGVATIN

SEQ ID NO: 10257 - protein, 19 aa, Artificial Sequence
  Synthetic
MSWYRQAPGKEREFVSSID

SEQ ID NO: 10258 - protein, 19 aa, Artificial Sequence
  Synthetic
MSWYRQAPGKEREFVSAIE

SEQ ID NO: 10259 - protein, 19 aa, Artificial Sequence
  Synthetic
MGWFRLAPGKEREGVAAIN

SEQ ID NO: 10260 - protein, 19 aa, Artificial Sequence
  Synthetic
MGWFRQAPGKERERVAHIN

SEQ ID NO: 10261 - protein, 19 aa, Artificial Sequence
  Synthetic
MGWFRQAPGKEREGVAAIY

SEQ ID NO: 10262 - protein, 19 aa, Artificial Sequence
  Synthetic
MTWYRQAPGKEREFVAGTD

SEQ ID NO: 10263 - protein, 19 aa, Artificial Sequence
  Synthetic
MNWYRQAPGKEREFVSSID

SEQ ID NO: 10264 - protein, 19 aa, Artificial Sequence
  Synthetic
MSWYRQAPGKEREFVSGID

SEQ ID NO: 10265 - protein, 19 aa, Artificial Sequence
  Synthetic
MGWYRQAPGKQRELVSTIT

SEQ ID NO: 10266 - protein, 19 aa, Artificial Sequence
  Synthetic
VGWFRQAPGMEREGVAGMY

SEQ ID NO: 10267 - protein, 19 aa, Artificial Sequence
  Synthetic
MAWFRQAPGKEREGVAGIY

SEQ ID NO: 10268 - protein, 19 aa, Artificial Sequence
  Synthetic
LNWFRRAPGKECEFVSRIV

SEQ ID NO: 10269 - protein, 19 aa, Artificial Sequence
  Synthetic
MAWFRQVPGKEREGVASIN

SEQ ID NO: 10270 - protein, 19 aa, Artificial Sequence
  Synthetic
MGWFRQAPGKERDWVAVIN

SEQ ID NO: 10271 - protein, 19 aa, Artificial Sequence
  Synthetic
MAWYQQAPGNECELVATIS

SEQ ID NO: 10272 - protein, 19 aa, Artificial Sequence
  Synthetic
MGWFRQAPGKEREGVAVIC

SEQ ID NO: 10273 - protein, 19 aa, Artificial Sequence
  Synthetic
MAWYRQAPGKERELVSSIN

SEQ ID NO: 10274 - protein, 19 aa, Artificial Sequence
  Synthetic
MGWYRQAPGKEREFVSLMD

SEQ ID NO: 10275 - protein, 19 aa, Artificial Sequence
  Synthetic
MAWYRRAPGKERELVASLP

SEQ ID NO: 10276 - protein, 19 aa, Artificial Sequence
  Synthetic
MGWFRQAPGKEREGVASIN

SEQ ID NO: 10277 - protein, 19 aa, Artificial Sequence
  Synthetic
MGWFRQAPGKEREGVAHIN

SEQ ID NO: 10278 - protein, 19 aa, Artificial Sequence
  Synthetic
MGWYHQAPGNECELVGSIS

SEQ ID NO: 10279 - protein, 19 aa, Artificial Sequence
  Synthetic
MAWYRQAPGKEREFVSIIE

SEQ ID NO: 10280 - protein, 19 aa, Artificial Sequence
  Synthetic
MGWFRQAPGKEREVVATIY

SEQ ID NO: 10281 - protein, 19 aa, Artificial Sequence
  Synthetic
MGWFRQAPGKECELVATIR

SEQ ID NO: 10282 - protein, 19 aa, Artificial Sequence
  Synthetic
MGWFRQAPGREREMIAVIT

SEQ ID NO: 10283 - protein, 19 aa, Artificial Sequence
  Synthetic
MAWYRQAPGKERVLVSSIT

SEQ ID NO: 10284 - protein, 19 aa, Artificial Sequence
  Synthetic
SGWFRQAPGKEREGVAAIG

SEQ ID NO: 10285 - protein, 19 aa, Artificial Sequence
  Synthetic
MAWFRQAPGKEREGVAVAD

SEQ ID NO: 10286 - protein, 19 aa, Artificial Sequence
  Synthetic
MGWFRQAPGGSQEGIAAVN

SEQ ID NO: 10287 - protein, 19 aa, Artificial Sequence
  Synthetic
MGWFRQVPGKEREEVAYIG

SEQ ID NO: 10288 - protein, 19 aa, Artificial Sequence
  Synthetic
LAWFRQAPGAEREGVAAIY

SEQ ID NO: 10289 - protein, 19 aa, Artificial Sequence
  Synthetic
MGWFRQTPEKERERVAAIS

SEQ ID NO: 10290 - protein, 19 aa, Artificial Sequence
  Synthetic
VAWFRQAPGKEQEAVAGLT

SEQ ID NO: 10291 - protein, 19 aa, Artificial Sequence
  Synthetic
MGWFRQTPGKEREGVAAIA

SEQ ID NO: 10292 - protein, 19 aa, Artificial Sequence
  Synthetic
MAWFRQGPGKEREGVAAID

SEQ ID NO: 10293 - protein, 19 aa, Artificial Sequence
  Synthetic
MGWFRQAPGKEREGVGSIA

SEQ ID NO: 10294 - protein, 19 aa, Artificial Sequence
  Synthetic
MAWFHQAPGKECELVSIIS

SEQ ID NO: 10295 - protein, 19 aa, Artificial Sequence
  Synthetic
MGWFRQVPGKEREGVATIN

SEQ ID NO: 10296 - protein, 19 aa, Artificial Sequence
  Synthetic
MSWYRQAPGKEREFVSAID

SEQ ID NO: 10297 - protein, 19 aa, Artificial Sequence
  Synthetic
MAWFRKAPGSRREGVASIY

SEQ ID NO: 10298 - protein, 19 aa, Artificial Sequence
  Synthetic
ISWFRQAPGKEREFVSSIN

SEQ ID NO: 10299 - protein, 19 aa, Artificial Sequence
  Synthetic
MAWFRQAPGKEREEVAAIY

SEQ ID NO: 10300 - protein, 19 aa, Artificial Sequence
  Synthetic
LGWFRQAPGKECELVATIS

SEQ ID NO: 10301 - protein, 19 aa, Artificial Sequence
  Synthetic
MGWFRQDPGKEREEVATIH

SEQ ID NO: 10302 - protein, 19 aa, Artificial Sequence
  Synthetic
MSWYRQAPGKEREFVSSFD

SEQ ID NO: 10303 - protein, 19 aa, Artificial Sequence
  Synthetic
VAWVRQGPGKEREGVAGIY

SEQ ID NO: 10304 - protein, 19 aa, Artificial Sequence
  Synthetic
MSWYRQTPGKEREFVSGID

SEQ ID NO: 10305 - protein, 19 aa, Artificial Sequence
  Synthetic
MGWFRQAPGKEREGVAAIH

SEQ ID NO: 10306 - protein, 19 aa, Artificial Sequence
  Synthetic
MGWFRQAPGKGCELVSSTI

SEQ ID NO: 10307 - protein, 19 aa, Artificial Sequence
  Synthetic
MSWYRQAPGKEREFVSTID

SEQ ID NO: 10308 - protein, 19 aa, Artificial Sequence
  Synthetic
MGWFRQAPGKEREGVAAIG

SEQ ID NO: 10309 - protein, 19 aa, Artificial Sequence
  Synthetic
MGWFRQAPGKEREIVARIN

SEQ ID NO: 10310 - protein, 19 aa, Artificial Sequence
  Synthetic
MAWYRQAAGKEREWISSIN

SEQ ID NO: 10311 - protein, 19 aa, Artificial Sequence
  Synthetic
MAWFRQTPGKKREGVARIY

SEQ ID NO: 10312 - protein, 19 aa, Artificial Sequence
  Synthetic
MGWFRQTTGEEREGLASIY

SEQ ID NO: 10313 - protein, 19 aa, Artificial Sequence
  Synthetic
MAWYIQPPGNECELVSTIN

SEQ ID NO: 10314 - protein, 19 aa, Artificial Sequence
  Synthetic
IAWFRQAPGKEREGVATIN

SEQ ID NO: 10315 - protein, 19 aa, Artificial Sequence
  Synthetic
VGWFRQAPGKEREGVAAIY

SEQ ID NO: 10316 - protein, 19 aa, Artificial Sequence
  Synthetic
MGWFRQAPGKECELVSTIF

SEQ ID NO: 10317 - protein, 19 aa, Artificial Sequence
  Synthetic
MAWFRQVPGKEREGVAGIL

SEQ ID NO: 10318 - protein, 19 aa, Artificial Sequence
  Synthetic
MTWYRQAPGKDREFVSGIE

SEQ ID NO: 10319 - protein, 19 aa, Artificial Sequence
  Synthetic
MSWYRQAPGKEREFVSSIH

SEQ ID NO: 10320 - protein, 19 aa, Artificial Sequence
  Synthetic
MGWFRQAPGKEREGVAVMT

SEQ ID NO: 10321 - protein, 19 aa, Artificial Sequence
  Synthetic
IGWFRQAPEKEREAVAAIN

SEQ ID NO: 10322 - protein, 19 aa, Artificial Sequence
  Synthetic
VAWFRQTPGKEREGVAVIF

SEQ ID NO: 10323 - protein, 19 aa, Artificial Sequence
  Synthetic
MGWFRQAPGKEREGVAVIS

SEQ ID NO: 10324 - protein, 19 aa, Artificial Sequence
  Synthetic
MAWFRQAPGKQREGVATVY

SEQ ID NO: 10325 - protein, 19 aa, Artificial Sequence
  Synthetic
MAWFRQAAGKEREGIAAAY

SEQ ID NO: 10326 - protein, 19 aa, Artificial Sequence
  Synthetic
MAWFRQAPGKQREGVATVY

SEQ ID NO: 10327 - protein, 19 aa, Artificial Sequence
  Synthetic
VGWFRLAPGKEREGVATIY

SEQ ID NO: 10328 - protein, 19 aa, Artificial Sequence
  Synthetic
IGWFRQAPGKEREGVAVIS

SEQ ID NO: 10329 - protein, 19 aa, Artificial Sequence
  Synthetic
ISWYRQAPGKEREFVAVIE

SEQ ID NO: 10330 - protein, 19 aa, Artificial Sequence
  Synthetic
TAWFRQTPGQEREGVATIY

SEQ ID NO: 10331 - protein, 19 aa, Artificial Sequence
  Synthetic
MAWFRQAPGKQREGVATVY

SEQ ID NO: 10332 - protein, 19 aa, Artificial Sequence
  Synthetic
MVWFRQAPGKEREGVATIY

SEQ ID NO: 10333 - protein, 19 aa, Artificial Sequence
  Synthetic
LGWFRQPPGKEREWVAAKD

SEQ ID NO: 10334 - protein, 19 aa, Artificial Sequence
  Synthetic
MAWFRQVPDKEREGVATAY

SEQ ID NO: 10335 - protein, 19 aa, Artificial Sequence
  Synthetic
TAWFRQAPGREREGVAVTY

SEQ ID NO: 10336 - protein, 19 aa, Artificial Sequence
  Synthetic
MKWYRQAPGKERELVSSIT

SEQ ID NO: 10337 - protein, 19 aa, Artificial Sequence
  Synthetic
MGWYRQAPGKEREGVAVIY

SEQ ID NO: 10338 - protein, 19 aa, Artificial Sequence
  Synthetic
VGWFRQVPGKERERVATIN

SEQ ID NO: 10339 - protein, 19 aa, Artificial Sequence
  Synthetic
MAWFRQAPGKEREGVATIY

SEQ ID NO: 10340 - protein, 19 aa, Artificial Sequence
  Synthetic
MAWFRQAPGSPREGVATIY

SEQ ID NO: 10341 - protein, 19 aa, Artificial Sequence
  Synthetic
MAWFRQAPGKEREGVATIY

SEQ ID NO: 10342 - protein, 19 aa, Artificial Sequence
  Synthetic
MAWFRQAPGKEREGLAAIY

SEQ ID NO: 10343 - protein, 19 aa, Artificial Sequence
  Synthetic
MGWFRQAPGKEREGVAATN

SEQ ID NO: 10344 - protein, 19 aa, Artificial Sequence
  Synthetic
MGWFRQAPGKEREGVAAIS

SEQ ID NO: 10345 - protein, 19 aa, Artificial Sequence
  Synthetic
LAWFRQVPGKEREGVARIY

SEQ ID NO: 10346 - protein, 19 aa, Artificial Sequence
  Synthetic
MNWFRQAPGKGLEWVSKIK

SEQ ID NO: 10347 - protein, 19 aa, Artificial Sequence
  Synthetic
MSWYRQAPGKEREFVSNID

SEQ ID NO: 10348 - protein, 19 aa, Artificial Sequence
  Synthetic
VGWFRQSPGKERELVSGIT

SEQ ID NO: 10349 - protein, 19 aa, Artificial Sequence
  Synthetic
MSWFRQAPGKGLEWVSGQH

SEQ ID NO: 10350 - protein, 19 aa, Artificial Sequence
  Synthetic
MSWFRQAPGKGLEWVSGIW

SEQ ID NO: 10351 - protein, 19 aa, Artificial Sequence
  Synthetic
MGWYRQRPGKQRELVAGIT

SEQ ID NO: 10352 - protein, 19 aa, Artificial Sequence
  Synthetic
VGWYRQAPGRQRELVANMN

SEQ ID NO: 10353 - protein, 19 aa, Artificial Sequence
  Synthetic
MGRFRQTPGKEREFVAAIS

SEQ ID NO: 10354 - protein, 19 aa, Artificial Sequence
  Synthetic
MGWYRQAPGNQRELVARIS

SEQ ID NO: 10355 - protein, 19 aa, Artificial Sequence
  Synthetic
MAWFRQAPGKEREFVAAIN

SEQ ID NO: 10356 - protein, 19 aa, Artificial Sequence
  Synthetic
AAWFRQAPGKEREFVAAIS

SEQ ID NO: 10357 - protein, 19 aa, Artificial Sequence
  Synthetic
VAWFRQAPGKEREFVAAIH

SEQ ID NO: 10358 - protein, 19 aa, Artificial Sequence
  Synthetic
VGWFRQAPGQGREFVATFS

SEQ ID NO: 10359 - protein, 19 aa, Artificial Sequence
  Synthetic
MGWYRQAPGKQRELVAIIT

SEQ ID NO: 10360 - protein, 19 aa, Artificial Sequence
  Synthetic
IGWYRQAPGKQRELVAGFA

SEQ ID NO: 10361 - protein, 19 aa, Artificial Sequence
  Synthetic
VGWFRQAPGQEREYIGTIS

SEQ ID NO: 10362 - protein, 19 aa, Artificial Sequence
  Synthetic
MGWFRQAPGKEREFVATIS

SEQ ID NO: 10363 - protein, 19 aa, Artificial Sequence
  Synthetic
LGWYRQAPGKEREFVAAII

SEQ ID NO: 10364 - protein, 19 aa, Artificial Sequence
  Synthetic
MGWYRQAPGSQREMVAFVS

SEQ ID NO: 10365 - protein, 19 aa, Artificial Sequence
  Synthetic
MGWYRQAPGKEREMVARIT

SEQ ID NO: 10366 - protein, 19 aa, Artificial Sequence
  Synthetic
MRWYRQAPGKQREWIATID

SEQ ID NO: 10367 - protein, 19 aa, Artificial Sequence
  Synthetic
WGWYRQAPGKGREPVAVID

SEQ ID NO: 10368 - protein, 19 aa, Artificial Sequence
  Synthetic
MGWYRQAPGKEREVVAVIS

SEQ ID NO: 10369 - protein, 19 aa, Artificial Sequence
  Synthetic
MGWFRQAPGKEREFVAAIS

SEQ ID NO: 10370 - protein, 19 aa, Artificial Sequence
  Synthetic
MGWYRQAPGKERELVTSAT

SEQ ID NO: 10371 - protein, 19 aa, Artificial Sequence
  Synthetic
MGWFRRAPGKEREFVASIT

SEQ ID NO: 10372 - protein, 19 aa, Artificial Sequence
  Synthetic
MSWYRQAPGKERELVARIG

SEQ ID NO: 10373 - protein, 19 aa, Artificial Sequence
  Synthetic
MSWYRQAPRKERELVARIG

SEQ ID NO: 10374 - protein, 19 aa, Artificial Sequence
  Synthetic
MGWYRQAPGKQRALVADIS

SEQ ID NO: 10375 - protein, 19 aa, Artificial Sequence
  Synthetic
MAWYRQAPGKQRDLVADIS

SEQ ID NO: 10376 - protein, 19 aa, Artificial Sequence
  Synthetic
MGWYRQAPGKQRDLVADIS

SEQ ID NO: 10377 - protein, 19 aa, Artificial Sequence
  Synthetic
MGWYRQTPGKQRDLVADIS

SEQ ID NO: 10378 - protein, 19 aa, Artificial Sequence
  Synthetic
MGWFRQAPGKQRELVAAIT

SEQ ID NO: 10379 - protein, 19 aa, Artificial Sequence
  Synthetic
MGWFRQAPGKEREFVAAIS

SEQ ID NO: 10380 - protein, 19 aa, Artificial Sequence
  Synthetic
MGWFRQAPGKEREFVAAIS

SEQ ID NO: 10381 - protein, 19 aa, Artificial Sequence
  Synthetic
MGWFRQAPGKEREFVAAIS

SEQ ID NO: 10382 - protein, 19 aa, Artificial Sequence
  Synthetic
WGWYRQAPGKQREMVALVG

SEQ ID NO: 10383 - protein, 19 aa, Artificial Sequence
  Synthetic
WGWYRQAPGKQREMVALVG

SEQ ID NO: 10384 - protein, 19 aa, Artificial Sequence
  Synthetic
IGWYRQGPGNQRDLVARIT

SEQ ID NO: 10385 - protein, 19 aa, Artificial Sequence
  Synthetic
VGWFRQAPGKEREFVAAIR

SEQ ID NO: 10386 - protein, 19 aa, Artificial Sequence
  Synthetic
VGWFRRPPGKERERVAAIS

SEQ ID NO: 10387 - protein, 19 aa, Artificial Sequence
  Synthetic
MGWFRQAPGKEREFVAVIS

SEQ ID NO: 10388 - protein, 19 aa, Artificial Sequence
  Synthetic
VGWFRQPPGKERERVAAIS

SEQ ID NO: 10389 - protein, 19 aa, Artificial Sequence
  Synthetic
MGWFRQAPGKVREFVASIS

SEQ ID NO: 10390 - protein, 19 aa, Artificial Sequence
  Synthetic
IAWFRQAPGKEREFVAQIS

SEQ ID NO: 10391 - protein, 19 aa, Artificial Sequence
  Synthetic
VGWFRRPPGKERERVAAIS

SEQ ID NO: 10392 - protein, 19 aa, Artificial Sequence
  Synthetic
MAWFRQAPGKEREFVAASS

SEQ ID NO: 10393 - protein, 19 aa, Artificial Sequence
  Synthetic
MGWFRQPPGKEREWVSTIS

SEQ ID NO: 10394 - protein, 19 aa, Artificial Sequence
  Synthetic
MAWFRQAPGKEREFVAAIS

SEQ ID NO: 10395 - protein, 19 aa, Artificial Sequence
  Synthetic
MGWYRQAPGKERESVAVIT

SEQ ID NO: 10396 - protein, 19 aa, Artificial Sequence
  Synthetic
MVWFRQAPGKEREFVAGII

SEQ ID NO: 10397 - protein, 19 aa, Artificial Sequence
  Synthetic
MGWFRQAPGKERELVAFIT

SEQ ID NO: 10398 - protein, 19 aa, Artificial Sequence
  Synthetic
MAWFRQAPGKERELVAMIT

SEQ ID NO: 10399 - protein, 19 aa, Artificial Sequence
  Synthetic
MAWFRQGPGQGREFVAAIS

SEQ ID NO: 10400 - protein, 19 aa, Artificial Sequence
  Synthetic
MGWYRQAPGKQRELVADIT

SEQ ID NO: 10401 - protein, 19 aa, Artificial Sequence
  Synthetic
MGWYRQAPGKQRELVADIT

SEQ ID NO: 10402 - protein, 19 aa, Artificial Sequence
  Synthetic
MAWFRQAPGKEREFVAAIT

SEQ ID NO: 10403 - protein, 19 aa, Artificial Sequence
  Synthetic
MAWFRQGPGQGREFVAAIH

SEQ ID NO: 10404 - protein, 19 aa, Artificial Sequence
  Synthetic
MGWFRQAPGKEREFVAAVS

SEQ ID NO: 10405 - protein, 19 aa, Artificial Sequence
  Synthetic
MGWFRQAPGKQREFVGYIS

SEQ ID NO: 10406 - protein, 19 aa, Artificial Sequence
  Synthetic
MGWYRQAPGSKREFVAHIT

SEQ ID NO: 10407 - protein, 19 aa, Artificial Sequence
  Synthetic
MGWFRQAPGKKREYVAAIS

SEQ ID NO: 10408 - protein, 19 aa, Artificial Sequence
  Synthetic
MGWFRQAPGKKREYVAAIS

SEQ ID NO: 10409 - protein, 19 aa, Artificial Sequence
  Synthetic
MGWYRQAPGKQRELVARIS

SEQ ID NO: 10410 - protein, 19 aa, Artificial Sequence
  Synthetic
MGWFRQAPGKERDVVAAIN

SEQ ID NO: 10411 - protein, 19 aa, Artificial Sequence
  Synthetic
MSWYRQAPGKERESVARIS

SEQ ID NO: 10412 - protein, 19 aa, Artificial Sequence
  Synthetic
MGWFRQAPGKEREFVAAVS

SEQ ID NO: 10413 - protein, 19 aa, Artificial Sequence
  Synthetic
MGWFRQAPGKEREFVAAVS

SEQ ID NO: 10414 - protein, 19 aa, Artificial Sequence
  Synthetic
MGWFRQAPGKEREFVAAVS

SEQ ID NO: 10415 - protein, 19 aa, Artificial Sequence
  Synthetic
MAWFRQVAGKEREVVAAIS

SEQ ID NO: 10416 - protein, 19 aa, Artificial Sequence
  Synthetic
LGWYRQAPGKARELVAAIG

SEQ ID NO: 10417 - protein, 19 aa, Artificial Sequence
  Synthetic
LGWFRQAPGKEREFVAAIS

SEQ ID NO: 10418 - protein, 19 aa, Artificial Sequence
  Synthetic
MGWYRQAPGKQRELVASIT

SEQ ID NO: 10419 - protein, 19 aa, Artificial Sequence
  Synthetic
MGWYRQAPGKQRELVASIT

SEQ ID NO: 10420 - protein, 19 aa, Artificial Sequence
  Synthetic
MGWFRQAPGKEREFVAAIN

SEQ ID NO: 10421 - protein, 19 aa, Artificial Sequence
  Synthetic
IGWFRQAPGKEREGVSCIS

SEQ ID NO: 10422 - protein, 19 aa, Artificial Sequence
  Synthetic
MAWYRQAPGKQREMVATVT

SEQ ID NO: 10423 - protein, 19 aa, Artificial Sequence
  Synthetic
MAWFRQAPGKEREFVATIS

SEQ ID NO: 10424 - protein, 19 aa, Artificial Sequence
  Synthetic
MGWFRQAPGKEREFVTAIS

SEQ ID NO: 10425 - protein, 19 aa, Artificial Sequence
  Synthetic
IGWFRQAPGKEREGVSYIS

SEQ ID NO: 10426 - protein, 19 aa, Artificial Sequence
  Synthetic
MGWYRQAPGRQRDLVALIR

SEQ ID NO: 10427 - protein, 19 aa, Artificial Sequence
  Synthetic
MGWFRQAPGRGREFVAAIA

SEQ ID NO: 10428 - protein, 19 aa, Artificial Sequence
  Synthetic
MAWFRQARGKEREFVASIT

SEQ ID NO: 10429 - protein, 19 aa, Artificial Sequence
  Synthetic
VGWFRQAPGKEREIVASIN

SEQ ID NO: 10430 - protein, 19 aa, Artificial Sequence
  Synthetic
MGWFCQAPGGEREFVAAIS

SEQ ID NO: 10431 - protein, 19 aa, Artificial Sequence
  Synthetic
MGWFRQAPGKEREFVAGIN

SEQ ID NO: 10432 - protein, 19 aa, Artificial Sequence
  Synthetic
MGWFRQAPGKERELVAAIN

SEQ ID NO: 10433 - protein, 19 aa, Artificial Sequence
  Synthetic
MGWFRQAPGQEREFVTSIS

SEQ ID NO: 10434 - protein, 19 aa, Artificial Sequence
  Synthetic
IGWFRQAPGKEREGVSCIS

SEQ ID NO: 10435 - protein, 19 aa, Artificial Sequence
  Synthetic
MGWFRQAPGKQREFVAAIS

SEQ ID NO: 10436 - protein, 19 aa, Artificial Sequence
  Synthetic
MGWFRQPPGKEREFVAAIS

SEQ ID NO: 10437 - protein, 19 aa, Artificial Sequence
  Synthetic
AGWFRQAPGKEREFVAGIS

SEQ ID NO: 10438 - protein, 19 aa, Artificial Sequence
  Synthetic
MGWFRQAPGKEREFVARIS

SEQ ID NO: 10439 - protein, 19 aa, Artificial Sequence
  Synthetic
MGWFRQAPGKEREFVAASR

SEQ ID NO: 10440 - protein, 19 aa, Artificial Sequence
  Synthetic
MGWFRQAAGKEREFVGVIS

SEQ ID NO: 10441 - protein, 19 aa, Artificial Sequence
  Synthetic
MGWFRQAPGKEREFVGVIS

SEQ ID NO: 10442 - protein, 19 aa, Artificial Sequence
  Synthetic
IGWFRRAPGKERERIGCIS

SEQ ID NO: 10443 - protein, 19 aa, Artificial Sequence
  Synthetic
MGWFRQAPGKEREFVAVIS

SEQ ID NO: 10444 - protein, 19 aa, Artificial Sequence
  Synthetic
MGWFRQAPGKEREFVATIS

SEQ ID NO: 10445 - protein, 19 aa, Artificial Sequence
  Synthetic
MGWIRQAPGKEREFVAGIR

SEQ ID NO: 10446 - protein, 19 aa, Artificial Sequence
  Synthetic
MNWYRQALGKQREYVAMIT

SEQ ID NO: 10447 - protein, 19 aa, Artificial Sequence
  Synthetic
MGWFRQAPGKEREFVAVIS

SEQ ID NO: 10448 - protein, 19 aa, Artificial Sequence
  Synthetic
MGWYRQAPGKQRELVASMV

SEQ ID NO: 10449 - protein, 19 aa, Artificial Sequence
  Synthetic
MGWFLQAPGKEREFVAGIN

SEQ ID NO: 10450 - protein, 19 aa, Artificial Sequence
  Synthetic
MGWFRQAPGKEREFVAAIS

SEQ ID NO: 10451 - protein, 19 aa, Artificial Sequence
  Synthetic
MYWYRQAPGKVREVVAMIT

SEQ ID NO: 10452 - protein, 19 aa, Artificial Sequence
  Synthetic
MGWFRQAPGKERELVAVDT

SEQ ID NO: 10453 - protein, 19 aa, Artificial Sequence
  Synthetic
MGWFRQAPGKEREFVAVIS

SEQ ID NO: 10454 - protein, 19 aa, Artificial Sequence
  Synthetic
MGWFRQALGKEREFVAAIS

SEQ ID NO: 10455 - protein, 19 aa, Artificial Sequence
  Synthetic
MGWFRQGPGKEREFVATIR

SEQ ID NO: 10456 - protein, 19 aa, Artificial Sequence
  Synthetic
LGWFRQAPGKEREFVAVIS

SEQ ID NO: 10457 - protein, 19 aa, Artificial Sequence
  Synthetic
MGWFRQAPGKEREFVASVS

SEQ ID NO: 10458 - protein, 19 aa, Artificial Sequence
  Synthetic
MGWFRQAPGKEREIVARIT

SEQ ID NO: 10459 - protein, 19 aa, Artificial Sequence
  Synthetic
MGWFRQVSGKEREFVAFIS

SEQ ID NO: 10460 - protein, 19 aa, Artificial Sequence
  Synthetic
MGWFRQATGKEREFVAAIR

SEQ ID NO: 10461 - protein, 19 aa, Artificial Sequence
  Synthetic
MGWYRQAPGNQRELVALIT

SEQ ID NO: 10462 - protein, 19 aa, Artificial Sequence
  Synthetic
VGWFRQPPGKEREFVSAVS

SEQ ID NO: 10463 - protein, 19 aa, Artificial Sequence
  Synthetic
MGWFRQAPGKEREFVAAIT

SEQ ID NO: 10464 - protein, 19 aa, Artificial Sequence
  Synthetic
MGWFRQAPGKQREFVAAIS

SEQ ID NO: 10465 - protein, 19 aa, Artificial Sequence
  Synthetic
MAWFRQAPGKERDVVATIN

SEQ ID NO: 10466 - protein, 19 aa, Artificial Sequence
  Synthetic
MGWFRQAPEKEREFVAVIS

SEQ ID NO: 10467 - protein, 19 aa, Artificial Sequence
  Synthetic
MGWFRQRPGEEREFVAVIS

SEQ ID NO: 10468 - protein, 19 aa, Artificial Sequence
  Synthetic
MTWVRQAPGKGREWVSTIG

SEQ ID NO: 10469 - protein, 19 aa, Artificial Sequence
  Synthetic
MGWYRRAPGNERELVAGIS

SEQ ID NO: 10470 - protein, 19 aa, Artificial Sequence
  Synthetic
VTWYRRAPGKQRELLAFIT

SEQ ID NO: 10471 - protein, 19 aa, Artificial Sequence
  Synthetic
MVWHRQAPGKQRELVAGIS

SEQ ID NO: 10472 - protein, 19 aa, Artificial Sequence
  Synthetic
VNWYRRAPGKPRELVASIS

SEQ ID NO: 10473 - protein, 19 aa, Artificial Sequence
  Synthetic
RRWYRQGSGKQRELVASID

SEQ ID NO: 10474 - protein, 19 aa, Artificial Sequence
  Synthetic
MAWYRQAPGKERDWVGTIF

SEQ ID NO: 10475 - protein, 19 aa, Artificial Sequence
  Synthetic
MSWYRRAPGKQREFVAIIS

SEQ ID NO: 10476 - protein, 19 aa, Artificial Sequence
  Synthetic
LGWYRRAPGKEREFVARIS

SEQ ID NO: 10477 - protein, 19 aa, Artificial Sequence
  Synthetic
MGWYRRAPGKQRELVASLT

SEQ ID NO: 10478 - protein, 19 aa, Artificial Sequence
  Synthetic
VGWFRQAPGKERELVALIA

SEQ ID NO: 10479 - protein, 19 aa, Artificial Sequence
  Synthetic
MGWFRQAPGKEREFVATIS

SEQ ID NO: 10480 - protein, 19 aa, Artificial Sequence
  Synthetic
MGWFRQAPGKEREFVATVS

SEQ ID NO: 10481 - protein, 19 aa, Artificial Sequence
  Synthetic
MGWFRQAPGKEREFVATVS

SEQ ID NO: 10482 - protein, 19 aa, Artificial Sequence
  Synthetic
MGWYRQAPGKERELVAAIT

SEQ ID NO: 10483 - protein, 19 aa, Artificial Sequence
  Synthetic
MAWFRQAPGKGREFVARSG

SEQ ID NO: 10484 - protein, 19 aa, Artificial Sequence
  Synthetic
MAWFRQAPGKDSEFVGVIS

SEQ ID NO: 10485 - protein, 19 aa, Artificial Sequence
  Synthetic
MGWFRQAPGKEREFVARIN

SEQ ID NO: 10486 - protein, 19 aa, Artificial Sequence
  Synthetic
MGWYRQAPGLLRELVARID

SEQ ID NO: 10487 - protein, 19 aa, Artificial Sequence
  Synthetic
MTWFRQAPGKEREFVAGVT

SEQ ID NO: 10488 - protein, 19 aa, Artificial Sequence
  Synthetic
MAWFRQAPGKEREFVARSG

SEQ ID NO: 10489 - protein, 19 aa, Artificial Sequence
  Synthetic
MGWFRQAPGKEREFVSGIG

SEQ ID NO: 10490 - protein, 19 aa, Artificial Sequence
  Synthetic
MAWFRQAPGKEREFVARSG

SEQ ID NO: 10491 - protein, 19 aa, Artificial Sequence
  Synthetic
LGWYRQAPGKERELVAAIT

SEQ ID NO: 10492 - protein, 19 aa, Artificial Sequence
  Synthetic
MGWYRQAPGKERELVAAIT

SEQ ID NO: 10493 - protein, 19 aa, Artificial Sequence
  Synthetic
MGWFRQAPGKELEFVAAIS

SEQ ID NO: 10494 - protein, 19 aa, Artificial Sequence
  Synthetic
MGWFRQAPGKEREFVSAIT

SEQ ID NO: 10495 - protein, 19 aa, Artificial Sequence
  Synthetic
MGWFRQAPGKEREFVAAIS

SEQ ID NO: 10496 - protein, 19 aa, Artificial Sequence
  Synthetic
MGWFRQAPGKEREFVAAIS

SEQ ID NO: 10497 - protein, 19 aa, Artificial Sequence
  Synthetic
MGWFRQAPGKEREFVAAIS

SEQ ID NO: 10498 - protein, 19 aa, Artificial Sequence
  Synthetic
TGWLRQAPGKDREFVASIS

SEQ ID NO: 10499 - protein, 19 aa, Artificial Sequence
  Synthetic
TGWFRQAPGKDREFVASIS

SEQ ID NO: 10500 - protein, 19 aa, Artificial Sequence
  Synthetic
LAWFRQAPGKEREFVAAIT

SEQ ID NO: 10501 - protein, 19 aa, Artificial Sequence
  Synthetic
VGWFRQAPGKEREFVAAIN

SEQ ID NO: 10502 - protein, 19 aa, Artificial Sequence
  Synthetic
MGWFRQAPGEEREFVAAIS

SEQ ID NO: 10503 - protein, 19 aa, Artificial Sequence
  Synthetic
MGWFRQAPGKEREFVAAIS

SEQ ID NO: 10504 - protein, 19 aa, Artificial Sequence
  Synthetic
MRWYRQAPGKQRELVAGIT

SEQ ID NO: 10505 - protein, 19 aa, Artificial Sequence
  Synthetic
MGWFRQAPGKEREFVAAIT

SEQ ID NO: 10506 - protein, 19 aa, Artificial Sequence
  Synthetic
MAWYRQAPGKQREMVAAIT

SEQ ID NO: 10507 - protein, 19 aa, Artificial Sequence
  Synthetic
MGWYRQTPGKQREFVAWIT

SEQ ID NO: 10508 - protein, 19 aa, Artificial Sequence
  Synthetic
MGWFRQAPGKEREFVAAIS

SEQ ID NO: 10509 - protein, 19 aa, Artificial Sequence
  Synthetic
MGWFRQAPGKEREFVAAIS

SEQ ID NO: 10510 - protein, 19 aa, Artificial Sequence
  Synthetic
TGWYRQAPGNQRELVARIS

SEQ ID NO: 10511 - protein, 19 aa, Artificial Sequence
  Synthetic
MGWYRQAPGKQRELVAEVT

SEQ ID NO: 10512 - protein, 19 aa, Artificial Sequence
  Synthetic
MGWYRQAPGKQRELVATIT

SEQ ID NO: 10513 - protein, 19 aa, Artificial Sequence
  Synthetic
VAWFRQAPGKEREFVSGIR

SEQ ID NO: 10514 - protein, 19 aa, Artificial Sequence
  Synthetic
MRWYRQAPGKQRELVAGVT

SEQ ID NO: 10515 - protein, 19 aa, Artificial Sequence
  Synthetic
MDWHRQAPGKKRELVARIS

SEQ ID NO: 10516 - protein, 19 aa, Artificial Sequence
  Synthetic
MGWYRQEPGKQREFVAGIS

SEQ ID NO: 10517 - protein, 19 aa, Artificial Sequence
  Synthetic
MGWFRQAPGKEREFVAGIS

SEQ ID NO: 10518 - protein, 19 aa, Artificial Sequence
  Synthetic
MGWFRQAPGKEREFVAGIS

SEQ ID NO: 10519 - protein, 19 aa, Artificial Sequence
  Synthetic
MGWFRQAPGKEREFVAAIS

SEQ ID NO: 10520 - protein, 19 aa, Artificial Sequence
  Synthetic
LGWFRQAPGKEREFVAAIS

SEQ ID NO: 10521 - protein, 19 aa, Artificial Sequence
  Synthetic
MGWFRQTPGKEREFVAAIG

SEQ ID NO: 10522 - protein, 19 aa, Artificial Sequence
  Synthetic
LAWFRQAPGKERMFVAAIS

SEQ ID NO: 10523 - protein, 19 aa, Artificial Sequence
  Synthetic
LAWFRQAPGKERELVATIG

SEQ ID NO: 10524 - protein, 19 aa, Artificial Sequence
  Synthetic
MGWFRQAPGKEREFVAAIS

SEQ ID NO: 10525 - protein, 19 aa, Artificial Sequence
  Synthetic
MGWFRQAPGKNREFVAAIS

SEQ ID NO: 10526 - protein, 19 aa, Artificial Sequence
  Synthetic
MGWFRQAPGKEREFVGAIS

SEQ ID NO: 10527 - protein, 19 aa, Artificial Sequence
  Synthetic
MGWFRQAPGKEREFVGSIS

SEQ ID NO: 10528 - protein, 19 aa, Artificial Sequence
  Synthetic
MGWFRQAPGKEREFVAAVD

SEQ ID NO: 10529 - protein, 19 aa, Artificial Sequence
  Synthetic
MGWFRQAPGGEREFVAAIT

SEQ ID NO: 10530 - protein, 19 aa, Artificial Sequence
  Synthetic
VGWFRQAPGNEREFVAAIS

SEQ ID NO: 10531 - protein, 19 aa, Artificial Sequence
  Synthetic
MGWFRQAPGKEREFVAAIV

SEQ ID NO: 10532 - protein, 19 aa, Artificial Sequence
  Synthetic
MGWFRQTPGKEPEFVAAIS

SEQ ID NO: 10533 - protein, 19 aa, Artificial Sequence
  Synthetic
MAWSRQAPGEQREFVARID

SEQ ID NO: 10534 - protein, 19 aa, Artificial Sequence
  Synthetic
MGWFRQAPGKKRAFVAAIS

SEQ ID NO: 10535 - protein, 19 aa, Artificial Sequence
  Synthetic
YGWFRQAPGKEREIVASIR

SEQ ID NO: 10536 - protein, 19 aa, Artificial Sequence
  Synthetic
VGWFRQAPGKGREFVGAIR

SEQ ID NO: 10537 - protein, 19 aa, Artificial Sequence
  Synthetic
MGWFRQAPGKEREFVAAIT

SEQ ID NO: 10538 - protein, 19 aa, Artificial Sequence
  Synthetic
MGWFRQAPGKEREFVAAID

SEQ ID NO: 10539 - protein, 19 aa, Artificial Sequence
  Synthetic
MGWYRQAPGKQRELVATIS

SEQ ID NO: 10540 - protein, 19 aa, Artificial Sequence
  Synthetic
LGWFRQAPGKEREFVAAIT

SEQ ID NO: 10541 - protein, 19 aa, Artificial Sequence
  Synthetic
MAWFRQAPGKEREFVSIIS

SEQ ID NO: 10542 - protein, 19 aa, Artificial Sequence
  Synthetic
MGWFRQAPGKEREFVAAIS

SEQ ID NO: 10543 - protein, 19 aa, Artificial Sequence
  Synthetic
MGWYRQAPGKQRELVATIS

SEQ ID NO: 10544 - protein, 19 aa, Artificial Sequence
  Synthetic
MGWFRQAPGKEREFVAVIG

SEQ ID NO: 10545 - protein, 19 aa, Artificial Sequence
  Synthetic
MGWFRQSPGKEREFVALTS

SEQ ID NO: 10546 - protein, 19 aa, Artificial Sequence
  Synthetic
MGWYRQGTGNERELIASIT

SEQ ID NO: 10547 - protein, 19 aa, Artificial Sequence
  Synthetic
MGWFRQAPGKGREFVAAVS

SEQ ID NO: 10548 - protein, 19 aa, Artificial Sequence
  Synthetic
MGWFRQAPGKEREFVADID

SEQ ID NO: 10549 - protein, 19 aa, Artificial Sequence
  Synthetic
MGWFRQAPGREREFVAAIT

SEQ ID NO: 10550 - protein, 19 aa, Artificial Sequence
  Synthetic
MAWFRQAPGKEREFVAKIS

SEQ ID NO: 10551 - protein, 19 aa, Artificial Sequence
  Synthetic
MGWFRQAPGKEREFVAAIS

SEQ ID NO: 10552 - protein, 19 aa, Artificial Sequence
  Synthetic
MAWFRQAPGKERVFVAALD

SEQ ID NO: 10553 - protein, 19 aa, Artificial Sequence
  Synthetic
IGWFRQAPGKEREFVGSII

SEQ ID NO: 10554 - protein, 19 aa, Artificial Sequence
  Synthetic
LGWFRQAPGKEREYVASIT

SEQ ID NO: 10555 - protein, 19 aa, Artificial Sequence
  Synthetic
MGWFRQAPGKEREFVAAIS

SEQ ID NO: 10556 - protein, 19 aa, Artificial Sequence
  Synthetic
MGWFRQAPGKERELVAAIN

SEQ ID NO: 10557 - protein, 19 aa, Artificial Sequence
  Synthetic
MGWFRQAPGKEREFVAAIS

SEQ ID NO: 10558 - protein, 19 aa, Artificial Sequence
  Synthetic
MGWFRQAPGKEREFVAAIS

SEQ ID NO: 10559 - protein, 19 aa, Artificial Sequence
  Synthetic
IAWYRQAPGKEREFLARIN

SEQ ID NO: 10560 - protein, 19 aa, Artificial Sequence
  Synthetic
MGWFRQAPGKGREFVAALD

SEQ ID NO: 10561 - protein, 19 aa, Artificial Sequence
  Synthetic
MGWFRQAPGKEREFVGTIN

SEQ ID NO: 10562 - protein, 19 aa, Artificial Sequence
  Synthetic
MGWFRQAPGKEQEFVAAIN

SEQ ID NO: 10563 - protein, 19 aa, Artificial Sequence
  Synthetic
MAWFRQAPGKEREFVGVVI

SEQ ID NO: 10564 - protein, 19 aa, Artificial Sequence
  Synthetic
MAWYRQAPGREREFVARIY

SEQ ID NO: 10565 - protein, 19 aa, Artificial Sequence
  Synthetic
MGWFRQAPGKERDLVARIE

SEQ ID NO: 10566 - protein, 19 aa, Artificial Sequence
  Synthetic
MSWYRQSPGKGREFVAAID

SEQ ID NO: 10567 - protein, 19 aa, Artificial Sequence
  Synthetic
IGWFRQAPGSGREAVACMT

SEQ ID NO: 10568 - protein, 19 aa, Artificial Sequence
  Synthetic
MAWYRQPPGKRRKGVATIS

SEQ ID NO: 10569 - protein, 19 aa, Artificial Sequence
  Synthetic
MGYYRQFPGQLRELVATIT

SEQ ID NO: 10570 - protein, 19 aa, Artificial Sequence
  Synthetic
VRWFRRPPGMEREFVARIN

SEQ ID NO: 10571 - protein, 19 aa, Artificial Sequence
  Synthetic
VGWYRQAPGSQRELVARIN

SEQ ID NO: 10572 - protein, 19 aa, Artificial Sequence
  Synthetic
MGWFRQAPGKQREGVAVIN

SEQ ID NO: 10573 - protein, 19 aa, Artificial Sequence
  Synthetic
LAWFRQASGKDRDFIAALH

SEQ ID NO: 10574 - protein, 19 aa, Artificial Sequence
  Synthetic
MAWFRQAPGKGREGVAVIA

SEQ ID NO: 10575 - protein, 19 aa, Artificial Sequence
  Synthetic
LGWFRQAPGEERERVATIY

SEQ ID NO: 10576 - protein, 19 aa, Artificial Sequence
  Synthetic
VGWFRQAPGKEREWVALIE

SEQ ID NO: 10577 - protein, 19 aa, Artificial Sequence
  Synthetic
MGWFRQSPGKEREGVAAID

SEQ ID NO: 10578 - protein, 19 aa, Artificial Sequence
  Synthetic
MAWYRQVTGKERELVSVIL

SEQ ID NO: 10579 - protein, 19 aa, Artificial Sequence
  Synthetic
MGWFRQAPGKEREGVAVIN

SEQ ID NO: 10580 - protein, 19 aa, Artificial Sequence
  Synthetic
MSWYCQAPGKEREFVSGID

SEQ ID NO: 10581 - protein, 19 aa, Artificial Sequence
  Synthetic
VAWFCQAPGKEREGVAAIY

SEQ ID NO: 10582 - protein, 19 aa, Artificial Sequence
  Synthetic
VGWFRQAPGKEREWVAGVY

SEQ ID NO: 10583 - protein, 19 aa, Artificial Sequence
  Synthetic
MGWFRQTPGKEREGVAVIS

SEQ ID NO: 10584 - protein, 19 aa, Artificial Sequence
  Synthetic
IGWFRQAPGKEREGVSCIG

SEQ ID NO: 10585 - protein, 19 aa, Artificial Sequence
  Synthetic
VAWFRQAPGKEREFVSVIS

SEQ ID NO: 10586 - protein, 19 aa, Artificial Sequence
  Synthetic
GGWFRQAPGKEREFVAAIS

SEQ ID NO: 10587 - protein, 19 aa, Artificial Sequence
  Synthetic
MGWFRQAPGKEREFVGGIG

SEQ ID NO: 10588 - protein, 19 aa, Artificial Sequence
  Synthetic
MAWFRQAPGKEREFVAGIG

SEQ ID NO: 10589 - protein, 19 aa, Artificial Sequence
  Synthetic
VGWFRQIPGKEREFVGGIA

SEQ ID NO: 10590 - protein, 19 aa, Artificial Sequence
  Synthetic
MGWYRQAPGKQRELVAAIT

SEQ ID NO: 10591 - protein, 19 aa, Artificial Sequence
  Synthetic
MGWFRRAPGKEREFVASIT

SEQ ID NO: 10592 - protein, 19 aa, Artificial Sequence
  Synthetic
MGWFRQDLGKEREFVAAIR

SEQ ID NO: 10593 - protein, 19 aa, Artificial Sequence
  Synthetic
MDWYRQAPGKQRDLVATSF

SEQ ID NO: 10594 - protein, 19 aa, Artificial Sequence
  Synthetic
MGWFRQAPGKEREFVATIN

SEQ ID NO: 10595 - protein, 19 aa, Artificial Sequence
  Synthetic
LAWFRQAPGKEREFVSGLR

SEQ ID NO: 10596 - protein, 19 aa, Artificial Sequence
  Synthetic
MGWFRQAPGKEREFVAAIS

SEQ ID NO: 10597 - protein, 19 aa, Artificial Sequence
  Synthetic
MGWFRQAPGKEREFVAANR

SEQ ID NO: 10598 - protein, 19 aa, Artificial Sequence
  Synthetic
MGWFRQAPGEGREFVATIS

SEQ ID NO: 10599 - protein, 19 aa, Artificial Sequence
  Synthetic
MGWFRQVPGREREFVATIR

SEQ ID NO: 10600 - protein, 19 aa, Artificial Sequence
  Synthetic
MGWYRQAPGKQRELVAVIS

SEQ ID NO: 10601 - protein, 19 aa, Artificial Sequence
  Synthetic
MGWFRQAPGKEREFVAHIN

SEQ ID NO: 10602 - protein, 19 aa, Artificial Sequence
  Synthetic
MGWFRQAPGKEREYIARIT

SEQ ID NO: 10603 - protein, 19 aa, Artificial Sequence
  Synthetic
MGWFRQAPGKEREFVGGIS

SEQ ID NO: 10604 - protein, 19 aa, Artificial Sequence
  Synthetic
MGWFRQAPGREREFVASIS

SEQ ID NO: 10605 - protein, 19 aa, Artificial Sequence
  Synthetic
IGWFRQAPGKEREFVAAIH

SEQ ID NO: 10606 - protein, 19 aa, Artificial Sequence
  Synthetic
IGWFRQAPGKEREFVAEIT

SEQ ID NO: 10607 - protein, 19 aa, Artificial Sequence
  Synthetic
MGWFRQAPGKEREFVASIS

SEQ ID NO: 10608 - protein, 19 aa, Artificial Sequence
  Synthetic
MGWYRQAPGKQRELVAAIH

SEQ ID NO: 10609 - protein, 19 aa, Artificial Sequence
  Synthetic
MGWYRQAPGKQRELVAAIH

SEQ ID NO: 10610 - protein, 19 aa, Artificial Sequence
  Synthetic
MGWFRQAPGKERESVAAIS

SEQ ID NO: 10611 - protein, 19 aa, Artificial Sequence
  Synthetic
MAWFRQAPGKEREFVAAVE

SEQ ID NO: 10612 - protein, 19 aa, Artificial Sequence
  Synthetic
MSWFRQAPGKGLEWVASIN

SEQ ID NO: 10613 - protein, 19 aa, Artificial Sequence
  Synthetic
MAWYRQTPGKERETVAFIT

SEQ ID NO: 10614 - protein, 19 aa, Artificial Sequence
  Synthetic
MGWYRQAPGKQRELVAAMS

SEQ ID NO: 10615 - protein, 19 aa, Artificial Sequence
  Synthetic
MGWFRQAPGKEREFVAHIS

SEQ ID NO: 10616 - protein, 19 aa, Artificial Sequence
  Synthetic
MGWFRQLAGKEPELVVALN

SEQ ID NO: 10617 - protein, 19 aa, Artificial Sequence
  Synthetic
MGWFRQLAGKEREFVVALN

SEQ ID NO: 10618 - protein, 19 aa, Artificial Sequence
  Synthetic
MGWFRQAPGTEREFVSSIK

SEQ ID NO: 10619 - protein, 19 aa, Artificial Sequence
  Synthetic
MGWFRQAPGKEREFVAAIR

SEQ ID NO: 10620 - protein, 19 aa, Artificial Sequence
  Synthetic
LGWYRQAPGKQRELVAWIT

SEQ ID NO: 10621 - protein, 19 aa, Artificial Sequence
  Synthetic
VGWFRQTPGKEREFVAGIN

SEQ ID NO: 10622 - protein, 19 aa, Artificial Sequence
  Synthetic
TGWFRQAPGKEREFVAAVT

SEQ ID NO: 10623 - protein, 19 aa, Artificial Sequence
  Synthetic
MGWFRQAPGKGREFVVGIG

SEQ ID NO: 10624 - protein, 19 aa, Artificial Sequence
  Synthetic
IGWWRQTPGKKREFVAGIS

SEQ ID NO: 10625 - protein, 19 aa, Artificial Sequence
  Synthetic
LGWFRRAPGKAREFVGAVS

SEQ ID NO: 10626 - protein, 19 aa, Artificial Sequence
  Synthetic
MGWFRQAPGKEREFVAAIN

SEQ ID NO: 10627 - protein, 19 aa, Artificial Sequence
  Synthetic
MGWFRQAPGKEREFIAAMT

SEQ ID NO: 10628 - protein, 19 aa, Artificial Sequence
  Synthetic
MGWFRRAPGKEREFVAAIS

SEQ ID NO: 10629 - protein, 19 aa, Artificial Sequence
  Synthetic
MGWYRQAPGNERELVAAIT

SEQ ID NO: 10630 - protein, 19 aa, Artificial Sequence
  Synthetic
MGWFRQAPGKEREFVAAIS

SEQ ID NO: 10631 - protein, 19 aa, Artificial Sequence
  Synthetic
MGWYRQAPGKEREFVAVIG

SEQ ID NO: 10632 - protein, 19 aa, Artificial Sequence
  Synthetic
MGWFRQAPGKEREFVAAIS

SEQ ID NO: 10633 - protein, 19 aa, Artificial Sequence
  Synthetic
MGWFRQTPGKDREFVSAIS

SEQ ID NO: 10634 - protein, 19 aa, Artificial Sequence
  Synthetic
MGWFRQAPGKEREFVAAIN

SEQ ID NO: 10635 - protein, 19 aa, Artificial Sequence
  Synthetic
TGWFRQAPGKEREFVGSIG

SEQ ID NO: 10636 - protein, 19 aa, Artificial Sequence
  Synthetic
IGWFRQAPGKGLEYVSHID

SEQ ID NO: 10637 - protein, 19 aa, Artificial Sequence
  Synthetic
IGWFRQAPGKGFESVSTID

SEQ ID NO: 10638 - protein, 19 aa, Artificial Sequence
  Synthetic
MGWFRQAPGKEREFVAAMR

SEQ ID NO: 10639 - protein, 19 aa, Artificial Sequence
  Synthetic
MAWFRQAPGKEREFVAAIN

SEQ ID NO: 10640 - protein, 19 aa, Artificial Sequence
  Synthetic
IGWYRQAPRKQRELVAGIS

SEQ ID NO: 10641 - protein, 19 aa, Artificial Sequence
  Synthetic
IGWYRQAPGKQRELVAVIS

SEQ ID NO: 10642 - protein, 19 aa, Artificial Sequence
  Synthetic
MAWFRQAPGKEREFVSAVT

SEQ ID NO: 10643 - protein, 19 aa, Artificial Sequence
  Synthetic
MGWFRQAPGKQRELIARIN

SEQ ID NO: 10644 - protein, 19 aa, Artificial Sequence
  Synthetic
MGWFRQAPGKEREFVASIN

SEQ ID NO: 10645 - protein, 19 aa, Artificial Sequence
  Synthetic
MAWFRQAPGKQRELVAVIT

SEQ ID NO: 10646 - protein, 19 aa, Artificial Sequence
  Synthetic
MGWFRQAPGKEREFVAAIN

SEQ ID NO: 10647 - protein, 19 aa, Artificial Sequence
  Synthetic
MGWFRQAPGKEREFVSRIT

SEQ ID NO: 10648 - protein, 19 aa, Artificial Sequence
  Synthetic
MGWFRQAPGKEREFVAGIN

SEQ ID NO: 10649 - protein, 19 aa, Artificial Sequence
  Synthetic
MGWFRQAPGKEREFVAAIN

SEQ ID NO: 10650 - protein, 19 aa, Artificial Sequence
  Synthetic
MSWFRQAPGKEQEFVARIR

SEQ ID NO: 10651 - protein, 19 aa, Artificial Sequence
  Synthetic
MGWFRQAPGTEREFVAGVR

SEQ ID NO: 10652 - protein, 19 aa, Artificial Sequence
  Synthetic
MGWFRQIPGKERELVAAIR

SEQ ID NO: 10653 - protein, 19 aa, Artificial Sequence
  Synthetic
MGWFRQVPGKEREFVAAIR

SEQ ID NO: 10654 - protein, 19 aa, Artificial Sequence
  Synthetic
MAWYRQAAGKQRELVAIAH

SEQ ID NO: 10655 - protein, 19 aa, Artificial Sequence
  Synthetic
MGWFRQVPGKEREFVAAIR

SEQ ID NO: 10656 - protein, 19 aa, Artificial Sequence
  Synthetic
MGWYRQAPGKQRELVATIN

SEQ ID NO: 10657 - protein, 19 aa, Artificial Sequence
  Synthetic
MGWFRQVPGKEREFVAAIR

SEQ ID NO: 10658 - protein, 19 aa, Artificial Sequence
  Synthetic
MGWYRQAPGKQRELVAQIT

SEQ ID NO: 10659 - protein, 19 aa, Artificial Sequence
  Synthetic
MAWYRQAPGKERELVAHYT

SEQ ID NO: 10660 - protein, 19 aa, Artificial Sequence
  Synthetic
MGWYRQAPGKQRELVAGVN

SEQ ID NO: 10661 - protein, 19 aa, Artificial Sequence
  Synthetic
MGWYRQAPGKQRELVAQFT

SEQ ID NO: 10662 - protein, 19 aa, Artificial Sequence
  Synthetic
MGWYRQAPGKERELVASIS

SEQ ID NO: 10663 - protein, 19 aa, Artificial Sequence
  Synthetic
MGWYRQAPGEQRELVATWT

SEQ ID NO: 10664 - protein, 19 aa, Artificial Sequence
  Synthetic
MAWYRQFPGKQRELVAARN

SEQ ID NO: 10665 - protein, 19 aa, Artificial Sequence
  Synthetic
MGWYRAAPGRQRELVASIT

SEQ ID NO: 10666 - protein, 19 aa, Artificial Sequence
  Synthetic
IGWYRQAPGKQRELIAAIT

SEQ ID NO: 10667 - protein, 19 aa, Artificial Sequence
  Synthetic
MVWYRQAPGKQREWVATIT

SEQ ID NO: 10668 - protein, 19 aa, Artificial Sequence
  Synthetic
MGWFRQAPGKGREFVAALS

SEQ ID NO: 10669 - protein, 19 aa, Artificial Sequence
  Synthetic
SGWSRQAPGKQLDFIARIR

SEQ ID NO: 10670 - protein, 19 aa, Artificial Sequence
  Synthetic
MGWHRQAPGKEREYVANIG

SEQ ID NO: 10671 - protein, 19 aa, Artificial Sequence
  Synthetic
MGWFRQAPGNQREFLAAIT

SEQ ID NO: 10672 - protein, 19 aa, Artificial Sequence
  Synthetic
MGWYRQAPGKLRERVAVVM

SEQ ID NO: 10673 - protein, 19 aa, Artificial Sequence
  Synthetic
MGWYRQAPGQQRELVATIT

SEQ ID NO: 10674 - protein, 19 aa, Artificial Sequence
  Synthetic
VAWFRQFPGKERELIAVIN

SEQ ID NO: 10675 - protein, 19 aa, Artificial Sequence
  Synthetic
VSWFRQPPGDEREFVAAIT

SEQ ID NO: 10676 - protein, 19 aa, Artificial Sequence
  Synthetic
IGWFRQAPGKEREVVSCIS

SEQ ID NO: 10677 - protein, 19 aa, Artificial Sequence
  Synthetic
IIWFRQAPGKEREAVSCIS

SEQ ID NO: 10678 - protein, 19 aa, Artificial Sequence
  Synthetic
MGWFREAPGKGREFVGSIS

SEQ ID NO: 10679 - protein, 19 aa, Artificial Sequence
  Synthetic
MGWFRQAPGKEREYVGSIT

SEQ ID NO: 10680 - protein, 19 aa, Artificial Sequence
  Synthetic
MAWFRQAPGNQRVFVAVIN

SEQ ID NO: 10681 - protein, 19 aa, Artificial Sequence
  Synthetic
MEWHRQVPGKEREFVVILS

SEQ ID NO: 10682 - protein, 19 aa, Artificial Sequence
  Synthetic
MSWYRQVPGAQREFVATIT

SEQ ID NO: 10683 - protein, 19 aa, Artificial Sequence
  Synthetic
ICWFRQAPGKGREGVSCIS

SEQ ID NO: 10684 - protein, 19 aa, Artificial Sequence
  Synthetic
MGWYRQAPGKQREFVAHIS

SEQ ID NO: 10685 - protein, 19 aa, Artificial Sequence
  Synthetic
MGWYRQAPGKQRELVASIT

SEQ ID NO: 10686 - protein, 19 aa, Artificial Sequence
  Synthetic
MGWFRQAPGKEREFVAGIS

SEQ ID NO: 10687 - protein, 19 aa, Artificial Sequence
  Synthetic
MGWYRQAPGKQRELVAVIL

SEQ ID NO: 10688 - protein, 19 aa, Artificial Sequence
  Synthetic
MRWYRQAPGKHRELVATIT

SEQ ID NO: 10689 - protein, 19 aa, Artificial Sequence
  Synthetic
MAWYRQAPGKQRELVAAIA

SEQ ID NO: 10690 - protein, 19 aa, Artificial Sequence
  Synthetic
MAWIRQAPGKGREFIGRIT

SEQ ID NO: 10691 - protein, 19 aa, Artificial Sequence
  Synthetic
MRWYVQTPGNEREMVASIT

SEQ ID NO: 10692 - protein, 19 aa, Artificial Sequence
  Synthetic
MAWYRQIPGKEREQVAIIH

SEQ ID NO: 10693 - protein, 19 aa, Artificial Sequence
  Synthetic
MGWFRQTPEKQREFVAFIH

SEQ ID NO: 10694 - protein, 19 aa, Artificial Sequence
  Synthetic
IGWFRQAPGKDREEVACIS

SEQ ID NO: 10695 - protein, 19 aa, Artificial Sequence
  Synthetic
MGWYRQAPGKQRELVALIH

SEQ ID NO: 10696 - protein, 19 aa, Artificial Sequence
  Synthetic
MGWFRHFPGKDREFVAVVK

SEQ ID NO: 10697 - protein, 19 aa, Artificial Sequence
  Synthetic
MGWYREAPGKQRELVARIS

SEQ ID NO: 10698 - protein, 19 aa, Artificial Sequence
  Synthetic
MGWFRQAAGTEREFVSAIS

SEQ ID NO: 10699 - protein, 19 aa, Artificial Sequence
  Synthetic
LAWYRQAPGKPRELVAGYT

SEQ ID NO: 10700 - protein, 19 aa, Artificial Sequence
  Synthetic
LGWFRQAPGKEREFVASMM

SEQ ID NO: 10701 - protein, 19 aa, Artificial Sequence
  Synthetic
MAWYRQAPGKGREYVAHIT

SEQ ID NO: 10702 - protein, 19 aa, Artificial Sequence
  Synthetic
VSWYRQAPGNQRELVASIR

SEQ ID NO: 10703 - protein, 19 aa, Artificial Sequence
  Synthetic
MGWYRQAPGKRRELVAAIT

SEQ ID NO: 10704 - protein, 19 aa, Artificial Sequence
  Synthetic
MGWYRQAPGKQRELVALMG

SEQ ID NO: 10705 - protein, 19 aa, Artificial Sequence
  Synthetic
VAWFRQAPGKQREFVAHIT

SEQ ID NO: 10706 - protein, 19 aa, Artificial Sequence
  Synthetic
MGWYRQAPGKQRELVAQIS

SEQ ID NO: 10707 - protein, 19 aa, Artificial Sequence
  Synthetic
LGWYRQAPGKQRELVALIA

SEQ ID NO: 10708 - protein, 19 aa, Artificial Sequence
  Synthetic
MGWYRQAPGKQRELVVSVQ

SEQ ID NO: 10709 - protein, 19 aa, Artificial Sequence
  Synthetic
MGWWRQAVGKQREFVAWIN

SEQ ID NO: 10710 - protein, 19 aa, Artificial Sequence
  Synthetic
MAWYRQTPGKRRELVASIT

SEQ ID NO: 10711 - protein, 19 aa, Artificial Sequence
  Synthetic
MGWYRQAPGKQREFVADIY

SEQ ID NO: 10712 - protein, 19 aa, Artificial Sequence
  Synthetic
MGWYRQAPGKQRELVASIS

SEQ ID NO: 10713 - protein, 19 aa, Artificial Sequence
  Synthetic
IGWFRQAPGKQRELVASIS

SEQ ID NO: 10714 - protein, 19 aa, Artificial Sequence
  Synthetic
MGWYRQAPGKQREFVAVIS

SEQ ID NO: 10715 - protein, 19 aa, Artificial Sequence
  Synthetic
MAWYRQIPGNQREFLAAET

SEQ ID NO: 10716 - protein, 19 aa, Artificial Sequence
  Synthetic
MAWFRQVPGKEREFVAVVT

SEQ ID NO: 10717 - protein, 19 aa, Artificial Sequence
  Synthetic
MNWYRQAPGKERELVASIT

SEQ ID NO: 10718 - protein, 19 aa, Artificial Sequence
  Synthetic
MAWFRQAPGKEREFVALIN

SEQ ID NO: 10719 - protein, 19 aa, Artificial Sequence
  Synthetic
IGWYRQAPGKGREGVSCIS

SEQ ID NO: 10720 - protein, 19 aa, Artificial Sequence
  Synthetic
MAWYRRVPGKDREMVARIT

SEQ ID NO: 10721 - protein, 19 aa, Artificial Sequence
  Synthetic
MDWFRQAPGKERERVAAIS

SEQ ID NO: 10722 - protein, 19 aa, Artificial Sequence
  Synthetic
IGWFRQAPGKKREWVSCIS

SEQ ID NO: 10723 - protein, 19 aa, Artificial Sequence
  Synthetic
AGWVRQAPGKERELVGDIN

SEQ ID NO: 10724 - protein, 19 aa, Artificial Sequence
  Synthetic
IAWFRQAPGKGREWVSCAA

SEQ ID NO: 10725 - protein, 19 aa, Artificial Sequence
  Synthetic
MRWYRQAPGKQRELVARIT

SEQ ID NO: 10726 - protein, 19 aa, Artificial Sequence
  Synthetic
VGWFRQAPGKEREQVSCIN

SEQ ID NO: 10727 - protein, 19 aa, Artificial Sequence
  Synthetic
MGWFRQAPGKEREFVATIS

SEQ ID NO: 10728 - protein, 19 aa, Artificial Sequence
  Synthetic
MGWYRQAPGKQREWVATIV

SEQ ID NO: 10729 - protein, 19 aa, Artificial Sequence
  Synthetic
MGWFRQVPGKEREFVAQIN

SEQ ID NO: 10730 - protein, 19 aa, Artificial Sequence
  Synthetic
MGFYRQSPGKQRELVAIHN

SEQ ID NO: 10731 - protein, 19 aa, Artificial Sequence
  Synthetic
VGWFRQAPGNEREFVAAIS

SEQ ID NO: 10732 - protein, 19 aa, Artificial Sequence
  Synthetic
MGWFRQGPGKEREFVAALL

SEQ ID NO: 10733 - protein, 19 aa, Artificial Sequence
  Synthetic
IGWFRQAPGKGREGIACIR

SEQ ID NO: 10734 - protein, 19 aa, Artificial Sequence
  Synthetic
MGWYRQAPGKEREALASIT

SEQ ID NO: 10735 - protein, 19 aa, Artificial Sequence
  Synthetic
IGWLRQAPGKDREWVACIT

SEQ ID NO: 10736 - protein, 19 aa, Artificial Sequence
  Synthetic
IGWFRQAPGKGREAVSCIS

SEQ ID NO: 10737 - protein, 19 aa, Artificial Sequence
  Synthetic
MAWFRQAPGEEREFVAAIN

SEQ ID NO: 10738 - protein, 19 aa, Artificial Sequence
  Synthetic
IGWFRQAPGKEREGVSCIK

SEQ ID NO: 10739 - protein, 19 aa, Artificial Sequence
  Synthetic
IGWFRQDPGKEREFVAAVS

SEQ ID NO: 10740 - protein, 19 aa, Artificial Sequence
  Synthetic
MGWFRQAPGKEREFVAAIN

SEQ ID NO: 10741 - protein, 19 aa, Artificial Sequence
  Synthetic
MGWFRQAPGKEREFVAAIH

SEQ ID NO: 10742 - protein, 19 aa, Artificial Sequence
  Synthetic
VGWFRQASGKEREFVAAIN

SEQ ID NO: 10743 - protein, 19 aa, Artificial Sequence
  Synthetic
ISWYRQAPGKQRELVAKVP

SEQ ID NO: 10744 - protein, 19 aa, Artificial Sequence
  Synthetic
IGWFRQAPGKKREGVACIS

SEQ ID NO: 10745 - protein, 19 aa, Artificial Sequence
  Synthetic
MGWFRQAPGKEREFVASIS

SEQ ID NO: 10746 - protein, 19 aa, Artificial Sequence
  Synthetic
MGWFRQAPGKEREFVAAIH

SEQ ID NO: 10747 - protein, 19 aa, Artificial Sequence
  Synthetic
MGWFRQAPGKEREFVAAIR

SEQ ID NO: 10748 - protein, 19 aa, Artificial Sequence
  Synthetic
MGWFRQAPGQEREAVAAIN

SEQ ID NO: 10749 - protein, 19 aa, Artificial Sequence
  Synthetic
IGWFRQAPGKERERVGCIS

SEQ ID NO: 10750 - protein, 19 aa, Artificial Sequence
  Synthetic
IGWFRQAPGKEREGVSCIT

SEQ ID NO: 10751 - protein, 19 aa, Artificial Sequence
  Synthetic
MGWFRQAPGKEREFVAVIT

SEQ ID NO: 10752 - protein, 19 aa, Artificial Sequence
  Synthetic
MGWFRQFPGKEREFVAAIS

SEQ ID NO: 10753 - protein, 19 aa, Artificial Sequence
  Synthetic
IGWFRQAPGKERECVSYIE

SEQ ID NO: 10754 - protein, 19 aa, Artificial Sequence
  Synthetic
MGWFRQGPGKEREFVAAIS

SEQ ID NO: 10755 - protein, 19 aa, Artificial Sequence
  Synthetic
IGWFRQAPGKEREWVSFIS

SEQ ID NO: 10756 - protein, 19 aa, Artificial Sequence
  Synthetic
AGWFRQAPGKNREFVAGIN

SEQ ID NO: 10757 - protein, 19 aa, Artificial Sequence
  Synthetic
MGWFRQAPGKEREFVAAIN

SEQ ID NO: 10758 - protein, 19 aa, Artificial Sequence
  Synthetic
MMWYRQAPGKERDMVARID

SEQ ID NO: 10759 - protein, 19 aa, Artificial Sequence
  Synthetic
MYWFRQAPGKGLEWVSSAS

SEQ ID NO: 10760 - protein, 19 aa, Artificial Sequence
  Synthetic
MTWFRQAPGKEREFVAAIN

SEQ ID NO: 10761 - protein, 19 aa, Artificial Sequence
  Synthetic
MGWFRQAPGKEREGVAGIY

SEQ ID NO: 10762 - protein, 19 aa, Artificial Sequence
  Synthetic
MGWFRQAPGKEREFVAAIS

SEQ ID NO: 10763 - protein, 19 aa, Artificial Sequence
  Synthetic
MGWYRQAPGNQRELVASIS

SEQ ID NO: 10764 - protein, 19 aa, Artificial Sequence
  Synthetic
MGWYRQAPGKQRELVASIN

SEQ ID NO: 10765 - protein, 19 aa, Artificial Sequence
  Synthetic
MGWYRQAPGKQRELVADIS

SEQ ID NO: 10766 - protein, 19 aa, Artificial Sequence
  Synthetic
MGWYRQAPGKQRELVALIS

SEQ ID NO: 10767 - protein, 19 aa, Artificial Sequence
  Synthetic
MAWYRQAPGKQRELVALIT

SEQ ID NO: 10768 - protein, 19 aa, Artificial Sequence
  Synthetic
MDWYRQVPGKEREWVATIT

SEQ ID NO: 10769 - protein, 19 aa, Artificial Sequence
  Synthetic
MGWYRQAPGKSREFVAGIT

SEQ ID NO: 10770 - protein, 19 aa, Artificial Sequence
  Synthetic
TAWFRQVPGKEREFVATIS

SEQ ID NO: 10771 - protein, 19 aa, Artificial Sequence
  Synthetic
MGWYRQTPGNQRELVALQS

SEQ ID NO: 10772 - protein, 19 aa, Artificial Sequence
  Synthetic
IDWLRQAPGKEREFVGSIS

SEQ ID NO: 10773 - protein, 19 aa, Artificial Sequence
  Synthetic
MDWYRQVPGKEREVVARIS

SEQ ID NO: 10774 - protein, 19 aa, Artificial Sequence
  Synthetic
ARWYRQAPGKQRELVAAIS

SEQ ID NO: 10775 - protein, 19 aa, Artificial Sequence
  Synthetic
MGWFRQAAGKEREFVAHMT

SEQ ID NO: 10776 - protein, 19 aa, Artificial Sequence
  Synthetic
MGWFRQAPGKERERVATIN

SEQ ID NO: 10777 - protein, 19 aa, Artificial Sequence
  Synthetic
IRWYRQAPGKQRELVAAIS

SEQ ID NO: 10778 - protein, 19 aa, Artificial Sequence
  Synthetic
MGWFRQAPGKEREFVAHIT

SEQ ID NO: 10779 - protein, 19 aa, Artificial Sequence
  Synthetic
MGWFRQAAGKEREFVAHMT

SEQ ID NO: 10780 - protein, 19 aa, Artificial Sequence
  Synthetic
MGWGRQAPGKQREYVATIS

SEQ ID NO: 10781 - protein, 19 aa, Artificial Sequence
  Synthetic
MTWFRQAPGKEREFVASVS

SEQ ID NO: 10782 - protein, 19 aa, Artificial Sequence
  Synthetic
THWFRQAPGKEREFVAAIS

SEQ ID NO: 10783 - protein, 19 aa, Artificial Sequence
  Synthetic
IHWFRQAPGKEREFVAAIS

SEQ ID NO: 10784 - protein, 19 aa, Artificial Sequence
  Synthetic
IHWFRQAPGKEREFVAAIS

SEQ ID NO: 10785 - protein, 19 aa, Artificial Sequence
  Synthetic
MGWFRQAPGKEREIVGALS

SEQ ID NO: 10786 - protein, 19 aa, Artificial Sequence
  Synthetic
AGWYRQAPGKQRELVAYMS

SEQ ID NO: 10787 - protein, 19 aa, Artificial Sequence
  Synthetic
MAWYRQTPGTQRELVAQIP

SEQ ID NO: 10788 - protein, 19 aa, Artificial Sequence
  Synthetic
MGWFRQVPGREREFVGAIG

SEQ ID NO: 10789 - protein, 19 aa, Artificial Sequence
  Synthetic
MGWFRQVPGREREFVGAIG

SEQ ID NO: 10790 - protein, 19 aa, Artificial Sequence
  Synthetic
MTWFRQAPGKEREFVASIS

SEQ ID NO: 10791 - protein, 19 aa, Artificial Sequence
  Synthetic
IHWFRQAPGKEREFVAAIS

SEQ ID NO: 10792 - protein, 19 aa, Artificial Sequence
  Synthetic
MGWYRQAPGKQRELVAYIT

SEQ ID NO: 10793 - protein, 19 aa, Artificial Sequence
  Synthetic
MAWFRQAPGKQRELVATIT

SEQ ID NO: 10794 - protein, 19 aa, Artificial Sequence
  Synthetic
MGWFRQAPGKQRELVATIT

SEQ ID NO: 10795 - protein, 19 aa, Artificial Sequence
  Synthetic
MGWFRQAPGKQRELVATIT

SEQ ID NO: 10796 - protein, 19 aa, Artificial Sequence
  Synthetic
MGWFRQAAGKEREFVATIS

SEQ ID NO: 10797 - protein, 19 aa, Artificial Sequence
  Synthetic
MGWFRQAPGKEREFVATVS

SEQ ID NO: 10798 - protein, 19 aa, Artificial Sequence
  Synthetic
MGWFRQAPGKEREFVATVS

SEQ ID NO: 10799 - protein, 19 aa, Artificial Sequence
  Synthetic
MGWFRQAPGKERESVAAIN

SEQ ID NO: 10800 - protein, 19 aa, Artificial Sequence
  Synthetic
MGWFRQVPGKEREFVAAIR

SEQ ID NO: 10801 - protein, 19 aa, Artificial Sequence
  Synthetic
MGWFRQAPGKERESVAAIN

SEQ ID NO: 10802 - protein, 19 aa, Artificial Sequence
  Synthetic
MGWYRQAPGTQRELVAAIT

SEQ ID NO: 10803 - protein, 19 aa, Artificial Sequence
  Synthetic
VGWFRQAPGKEREFVGYFG

SEQ ID NO: 10804 - protein, 19 aa, Artificial Sequence
  Synthetic
MGWFRQAPGKEREFVGTMV

SEQ ID NO: 10805 - protein, 19 aa, Artificial Sequence
  Synthetic
MGWFRQAPGKEREFVASIS

SEQ ID NO: 10806 - protein, 19 aa, Artificial Sequence
  Synthetic
MGWFRQAPGKEREFVATIS

SEQ ID NO: 10807 - protein, 19 aa, Artificial Sequence
  Synthetic
MGWFRQAPGKEREFVAAIS

SEQ ID NO: 10808 - protein, 19 aa, Artificial Sequence
  Synthetic
MDWDRQAPGKQRELVATIT

SEQ ID NO: 10809 - protein, 19 aa, Artificial Sequence
  Synthetic
MGWFRQAPGKEREFVAAIS

SEQ ID NO: 10810 - protein, 19 aa, Artificial Sequence
  Synthetic
MGWFRQAPGKERAFVAAIS

SEQ ID NO: 10811 - protein, 19 aa, Artificial Sequence
  Synthetic
WGWYRRAPGKQRELIAAIN

SEQ ID NO: 10812 - protein, 19 aa, Artificial Sequence
  Synthetic
MGWFRQAPGKEREFVAAIS

SEQ ID NO: 10813 - protein, 19 aa, Artificial Sequence
  Synthetic
MGWFRQAPGKEREFVAAIN

SEQ ID NO: 10814 - protein, 19 aa, Artificial Sequence
  Synthetic
MGWFRQAPGKEREFVAGIS

SEQ ID NO: 10815 - protein, 19 aa, Artificial Sequence
  Synthetic
MGWFRQAPGAEREGVACIH

SEQ ID NO: 10816 - protein, 19 aa, Artificial Sequence
  Synthetic
MAWYRQTPGKQRERIAIIT

SEQ ID NO: 10817 - protein, 19 aa, Artificial Sequence
  Synthetic
MGWFRQAPGKEREFVAAIS

SEQ ID NO: 10818 - protein, 19 aa, Artificial Sequence
  Synthetic
MTWYRQAPGKERELVALIT

SEQ ID NO: 10819 - protein, 19 aa, Artificial Sequence
  Synthetic
MGWFRQTPGKEREFVAAIT

SEQ ID NO: 10820 - protein, 19 aa, Artificial Sequence
  Synthetic
MGWFRQAPGKERDFVAVIS

SEQ ID NO: 10821 - protein, 19 aa, Artificial Sequence
  Synthetic
MGWFRQAPGQEREFVAGIT

SEQ ID NO: 10822 - protein, 19 aa, Artificial Sequence
  Synthetic
IGWFRQAPGKEREGVSCVS

SEQ ID NO: 10823 - protein, 19 aa, Artificial Sequence
  Synthetic
VGWFRQAPGKEREFVAAIR

SEQ ID NO: 10824 - protein, 19 aa, Artificial Sequence
  Synthetic
MGWFRQAPGPEREFVATIS

SEQ ID NO: 10825 - protein, 19 aa, Artificial Sequence
  Synthetic
IGWFRQAPGKEREFVAAIS

SEQ ID NO: 10826 - protein, 19 aa, Artificial Sequence
  Synthetic
IGWFRQAPGKEREFVAAIS

SEQ ID NO: 10827 - protein, 19 aa, Artificial Sequence
  Synthetic
MGWYRRAPGKQREWVASLT

SEQ ID NO: 10828 - protein, 19 aa, Artificial Sequence
  Synthetic
MGWFRQAPGKGREFVASIT

SEQ ID NO: 10829 - protein, 19 aa, Artificial Sequence
  Synthetic
MGWFRQAPGKEREFVSGIS

SEQ ID NO: 10830 - protein, 19 aa, Artificial Sequence
  Synthetic
MGWFRQAPGKQREFVAAIR

SEQ ID NO: 10831 - protein, 19 aa, Artificial Sequence
  Synthetic
MGWFRQAPGKEREFVVAIN

SEQ ID NO: 10832 - protein, 19 aa, Artificial Sequence
  Synthetic
IGWFRQAPGKEREGVSCIS

SEQ ID NO: 10833 - protein, 19 aa, Artificial Sequence
  Synthetic
MGWYRQDPGKGRELVALIN

SEQ ID NO: 10834 - protein, 19 aa, Artificial Sequence
  Synthetic
MGWFRQAPGKEREFVAAIS

SEQ ID NO: 10835 - protein, 19 aa, Artificial Sequence
  Synthetic
MAWFRQPPGKEREFVAAGS

SEQ ID NO: 10836 - protein, 19 aa, Artificial Sequence
  Synthetic
VAWFRQAPGAEREFVAVIS

SEQ ID NO: 10837 - protein, 19 aa, Artificial Sequence
  Synthetic
MGWFRQAPGKEREFVAAIT

SEQ ID NO: 10838 - protein, 19 aa, Artificial Sequence
  Synthetic
MAWFRQAPGKEREFVATIR

SEQ ID NO: 10839 - protein, 19 aa, Artificial Sequence
  Synthetic
MAWLRQAPGKRREWVALIT

SEQ ID NO: 10840 - protein, 19 aa, Artificial Sequence
  Synthetic
MGWYRQAPGKQREFVASIT

SEQ ID NO: 10841 - protein, 19 aa, Artificial Sequence
  Synthetic
MDWYRQAPGKERELVAGIT

SEQ ID NO: 10842 - protein, 19 aa, Artificial Sequence
  Synthetic
MGWFRQAPGKEREGVAAMD

SEQ ID NO: 10843 - protein, 19 aa, Artificial Sequence
  Synthetic
LGWFRQAPGKDREFVAAIS

SEQ ID NO: 10844 - protein, 19 aa, Artificial Sequence
  Synthetic
MGWFRQAPGREREFLAQIN

SEQ ID NO: 10845 - protein, 19 aa, Artificial Sequence
  Synthetic
MGWFRQAPGKEREFVAAIS

SEQ ID NO: 10846 - protein, 19 aa, Artificial Sequence
  Synthetic
MGWFRQAPGKEREGVACID

SEQ ID NO: 10847 - protein, 19 aa, Artificial Sequence
  Synthetic
MAWFRQVPGKEREGVASIN

SEQ ID NO: 10848 - protein, 19 aa, Artificial Sequence
  Synthetic
ANWYRQPPGMQRELVATIT

SEQ ID NO: 10849 - protein, 19 aa, Artificial Sequence
  Synthetic
MGWYRQAPGKQRELVASIS

SEQ ID NO: 10850 - protein, 19 aa, Artificial Sequence
  Synthetic
MGWYRQAPGKQRDLVAIIS

SEQ ID NO: 10851 - protein, 19 aa, Artificial Sequence
  Synthetic
MGWFRQAPGKEREFVAASS

SEQ ID NO: 10852 - protein, 19 aa, Artificial Sequence
  Synthetic
MGWFRQAPGKEREFVAAVT

SEQ ID NO: 10853 - protein, 19 aa, Artificial Sequence
  Synthetic
MGWYRQAPGKQRELVAVMT

SEQ ID NO: 10854 - protein, 19 aa, Artificial Sequence
  Synthetic
MAWFRQAPGKEREFVAGIT

SEQ ID NO: 10855 - protein, 19 aa, Artificial Sequence
  Synthetic
MGWFRQAPGKEREFVAAIS

SEQ ID NO: 10856 - protein, 19 aa, Artificial Sequence
  Synthetic
MGWYRQAPGKLREWVAAIT

SEQ ID NO: 10857 - protein, 19 aa, Artificial Sequence
  Synthetic
MGWYRQAPGKEHELVATIS

SEQ ID NO: 10858 - protein, 19 aa, Artificial Sequence
  Synthetic
MGWYRQAPGKQRELVAAIT

SEQ ID NO: 10859 - protein, 19 aa, Artificial Sequence
  Synthetic
AGWFRQAPGKQREPVATIL

SEQ ID NO: 10860 - protein, 19 aa, Artificial Sequence
  Synthetic
WAWYRQAPGQQRDLVASLS

SEQ ID NO: 10861 - protein, 19 aa, Artificial Sequence
  Synthetic
IGWFRQAPGKEREGVSCIS

SEQ ID NO: 10862 - protein, 19 aa, Artificial Sequence
  Synthetic
MRWYRQAPGEEREFVAFIS

SEQ ID NO: 10863 - protein, 19 aa, Artificial Sequence
  Synthetic
MGWYRQAPGKLRELVAAIT

SEQ ID NO: 10864 - protein, 19 aa, Artificial Sequence
  Synthetic
MGWFRKAPGKEREFVAAIT

SEQ ID NO: 10865 - protein, 19 aa, Artificial Sequence
  Synthetic
MGWFRQAPGKERELLGNIS

SEQ ID NO: 10866 - protein, 19 aa, Artificial Sequence
  Synthetic
IGWFRQAPGKEREFVARIY

SEQ ID NO: 10867 - protein, 19 aa, Artificial Sequence
  Synthetic
MAWYRQAPGKQRELVASIT

SEQ ID NO: 10868 - protein, 19 aa, Artificial Sequence
  Synthetic
MGWFRQGPGKEREGVASIY

SEQ ID NO: 10869 - protein, 19 aa, Artificial Sequence
  Synthetic
MAWYRQAPGKQRELVATEI

SEQ ID NO: 10870 - protein, 19 aa, Artificial Sequence
  Synthetic
IGWFRQAPGKGLEGVSCIS

SEQ ID NO: 10871 - protein, 19 aa, Artificial Sequence
  Synthetic
MGWWRQAPGKEREFVARIV

SEQ ID NO: 10872 - protein, 19 aa, Artificial Sequence
  Synthetic
MGWFRQAPGKEREFVGAIS

SEQ ID NO: 10873 - protein, 19 aa, Artificial Sequence
  Synthetic
MGWFRQAPGKEREFVAGIT

SEQ ID NO: 10874 - protein, 19 aa, Artificial Sequence
  Synthetic
MAWYRQAPGKARELIAAIR

SEQ ID NO: 10875 - protein, 19 aa, Artificial Sequence
  Synthetic
IGWFRQAPGKEHEWLVCNR

SEQ ID NO: 10876 - protein, 19 aa, Artificial Sequence
  Synthetic
TCWYRQGTGKQRELVAAIT

SEQ ID NO: 10877 - protein, 19 aa, Artificial Sequence
  Synthetic
MAWFRQAPGKEREFVASIN

SEQ ID NO: 10878 - protein, 19 aa, Artificial Sequence
  Synthetic
MGWYRQAPGKERELVATIT

SEQ ID NO: 10879 - protein, 19 aa, Artificial Sequence
  Synthetic
MGWFRQAPGKEREFVAAIN

SEQ ID NO: 10880 - protein, 19 aa, Artificial Sequence
  Synthetic
VGWFRQAPGLEREFVATIS

SEQ ID NO: 10881 - protein, 19 aa, Artificial Sequence
  Synthetic
MAWYRQGPGEQRELVAVIT

SEQ ID NO: 10882 - protein, 19 aa, Artificial Sequence
  Synthetic
MGWYRQAPGKQRELVARIT

SEQ ID NO: 10883 - protein, 19 aa, Artificial Sequence
  Synthetic
MGWFRQAPGKEREFVASIV

SEQ ID NO: 10884 - protein, 19 aa, Artificial Sequence
  Synthetic
MAWFRQAPGKEREFVAGIN

SEQ ID NO: 10885 - protein, 19 aa, Artificial Sequence
  Synthetic
MGWFRQAPGKEREFVAAIR

SEQ ID NO: 10886 - protein, 19 aa, Artificial Sequence
  Synthetic
MGWYRQAPGKERELVAART

SEQ ID NO: 10887 - protein, 19 aa, Artificial Sequence
  Synthetic
MGWYRQAPGKQRELVAAIT

SEQ ID NO: 10888 - protein, 19 aa, Artificial Sequence
  Synthetic
MGWYRQAPGKQRELVAAIT

SEQ ID NO: 10889 - protein, 19 aa, Artificial Sequence
  Synthetic
IGWFRQAPGKEREGLSSIS

SEQ ID NO: 10890 - protein, 19 aa, Artificial Sequence
  Synthetic
AGWFRQAPGKEREWVACIS

SEQ ID NO: 10891 - protein, 19 aa, Artificial Sequence
  Synthetic
MGWFRQAPGKEREFVAAIS

SEQ ID NO: 10892 - protein, 19 aa, Artificial Sequence
  Synthetic
MGWFRQAPGKEREFVAAIG

SEQ ID NO: 10893 - protein, 19 aa, Artificial Sequence
  Synthetic
MRWYRQAPGKERELVAAIT

SEQ ID NO: 10894 - protein, 19 aa, Artificial Sequence
  Synthetic
VGWYRQAPEKQRELVAQIN

SEQ ID NO: 10895 - protein, 19 aa, Artificial Sequence
  Synthetic
MGWYRQTPGNQRELVATIT

SEQ ID NO: 10896 - protein, 19 aa, Artificial Sequence
  Synthetic
IGWFRQAPGKEREGVSCIS

SEQ ID NO: 10897 - protein, 19 aa, Artificial Sequence
  Synthetic
IDWYRQAPGKQRELVASIA

SEQ ID NO: 10898 - protein, 19 aa, Artificial Sequence
  Synthetic
VGWYRQAPGNQRELVASIT

SEQ ID NO: 10899 - protein, 19 aa, Artificial Sequence
  Synthetic
MGWYRQAPGKERELVASIY

SEQ ID NO: 10900 - protein, 19 aa, Artificial Sequence
  Synthetic
VAWFRQAPGKERDFVASIN

SEQ ID NO: 10901 - protein, 19 aa, Artificial Sequence
  Synthetic
QGWFRQPPGKEREFVASLR

SEQ ID NO: 10902 - protein, 19 aa, Artificial Sequence
  Synthetic
LGWFRQAPGKEREFVAAIN

SEQ ID NO: 10903 - protein, 19 aa, Artificial Sequence
  Synthetic
MNWYRQAPGKERELVARIY

SEQ ID NO: 10904 - protein, 19 aa, Artificial Sequence
  Synthetic
MGWYRQAPGKQRELVASID

SEQ ID NO: 10905 - protein, 19 aa, Artificial Sequence
  Synthetic
LAWFRQAPGKEREFVAAIM

SEQ ID NO: 10906 - protein, 19 aa, Artificial Sequence
  Synthetic
SGWFRQAPGKEREFLASIR

SEQ ID NO: 10907 - protein, 19 aa, Artificial Sequence
  Synthetic
MAWFRQAPGKEREFVSGMR

SEQ ID NO: 10908 - protein, 19 aa, Artificial Sequence
  Synthetic
MGWYRQAPGKERELVATIS

SEQ ID NO: 10909 - protein, 19 aa, Artificial Sequence
  Synthetic
MGWFRQAPGKEREFVAVVN

SEQ ID NO: 10910 - protein, 19 aa, Artificial Sequence
  Synthetic
VAWFRQAPGKEREGVSCIN

SEQ ID NO: 10911 - protein, 19 aa, Artificial Sequence
  Synthetic
MGWYRQSPEKEREFVASIN

SEQ ID NO: 10912 - protein, 19 aa, Artificial Sequence
  Synthetic
MGWYRQPPGKERELVAGIT

SEQ ID NO: 10913 - protein, 19 aa, Artificial Sequence
  Synthetic
LGWYRQAPGKERAWVGRIH

SEQ ID NO: 10914 - protein, 19 aa, Artificial Sequence
  Synthetic
VRYYRQAPGKECELVAGIA

SEQ ID NO: 10915 - protein, 19 aa, Artificial Sequence
  Synthetic
MGWFRQAPGSERELVAQIS

SEQ ID NO: 10916 - protein, 19 aa, Artificial Sequence
  Synthetic
IAWFRRAPGKEREGVSCMS

SEQ ID NO: 10917 - protein, 19 aa, Artificial Sequence
  Synthetic
IGWFRQAPGKEREGVSCIG

SEQ ID NO: 10918 - protein, 19 aa, Artificial Sequence
  Synthetic
MGWFRQAPGKEREAVSCIS

SEQ ID NO: 10919 - protein, 19 aa, Artificial Sequence
  Synthetic
IGWFRQVPGKEREGISCIS

SEQ ID NO: 10920 - protein, 19 aa, Artificial Sequence
  Synthetic
VAWFRQVPGKEREGISCIG

SEQ ID NO: 10921 - protein, 19 aa, Artificial Sequence
  Synthetic
IGWFRQAPGKERELVSCTG

SEQ ID NO: 10922 - protein, 19 aa, Artificial Sequence
  Synthetic
LGWFRQAPGKEREWVSCVD

SEQ ID NO: 10923 - protein, 19 aa, Artificial Sequence
  Synthetic
IGWFRQAPGKEREGVSCIN

SEQ ID NO: 10924 - protein, 19 aa, Artificial Sequence
  Synthetic
IGWFRQAPGKEREGVSCIN

SEQ ID NO: 10925 - protein, 19 aa, Artificial Sequence
  Synthetic
VGWFRQSPGNSREGISCIS

SEQ ID NO: 10926 - protein, 19 aa, Artificial Sequence
  Synthetic
VGWFRQVPGRKREWVACIS

SEQ ID NO: 10927 - protein, 19 aa, Artificial Sequence
  Synthetic
IGWFRQAYGTEREGISCTS

SEQ ID NO: 10928 - protein, 19 aa, Artificial Sequence
  Synthetic
IGWFRQAPGKGREAVACIS

SEQ ID NO: 10929 - protein, 19 aa, Artificial Sequence
  Synthetic
MGWYRQAPGKQRELVAAIS

SEQ ID NO: 10930 - protein, 19 aa, Artificial Sequence
  Synthetic
TAWYRQTPGNLRELVASIT

SEQ ID NO: 10931 - protein, 19 aa, Artificial Sequence
  Synthetic
IGWFRQAPGKGREGVACMN

SEQ ID NO: 10932 - protein, 19 aa, Artificial Sequence
  Synthetic
MGWYRQAPGKERELVAAIS

SEQ ID NO: 10933 - protein, 19 aa, Artificial Sequence
  Synthetic
IGWFRQAPGKEREGVSCIS

SEQ ID NO: 10934 - protein, 19 aa, Artificial Sequence
  Synthetic
VGWYRQAPGKQREMVASIG

SEQ ID NO: 10935 - protein, 19 aa, Artificial Sequence
  Synthetic
MSWFRQAPGKEREFVASIT

SEQ ID NO: 10936 - protein, 19 aa, Artificial Sequence
  Synthetic
MGWYRQAPGKRREMVADIF

SEQ ID NO: 10937 - protein, 19 aa, Artificial Sequence
  Synthetic
IGWVRQAPGKEREGVSCIS

SEQ ID NO: 10938 - protein, 19 aa, Artificial Sequence
  Synthetic
LAWFRQGPGKEREFVAAIG

SEQ ID NO: 10939 - protein, 19 aa, Artificial Sequence
  Synthetic
MGWFRQAPGKEREFVAALR

SEQ ID NO: 10940 - protein, 19 aa, Artificial Sequence
  Synthetic
MSWYRQGPGKERELVAGIT

SEQ ID NO: 10941 - protein, 19 aa, Artificial Sequence
  Synthetic
MGWFRQAPGKEREFVARIS

SEQ ID NO: 10942 - protein, 19 aa, Artificial Sequence
  Synthetic
MAWYRQAPGKQRELVARIT

SEQ ID NO: 10943 - protein, 19 aa, Artificial Sequence
  Synthetic
MGYFRQAPGKEREFVAAIT

SEQ ID NO: 10944 - protein, 19 aa, Artificial Sequence
  Synthetic
MSWYRQAPGKERELVAAIT

SEQ ID NO: 10945 - protein, 19 aa, Artificial Sequence
  Synthetic
MGWIRQAPGEEREFVASIS

SEQ ID NO: 10946 - protein, 19 aa, Artificial Sequence
  Synthetic
MGWFRQAPGEEREFVAVNS

SEQ ID NO: 10947 - protein, 19 aa, Artificial Sequence
  Synthetic
TVWFRQAPGKSREGVSCIS

SEQ ID NO: 10948 - protein, 19 aa, Artificial Sequence
  Synthetic
MAWFRQAPGKEREVVARIT

SEQ ID NO: 10949 - protein, 19 aa, Artificial Sequence
  Synthetic
IGWFRQVPGKEREGVACVK

SEQ ID NO: 10950 - protein, 19 aa, Artificial Sequence
  Synthetic
MGWFRQAPGKEREFVAAIR

SEQ ID NO: 10951 - protein, 19 aa, Artificial Sequence
  Synthetic
MGWFRQAPGKEREFVAAVD

SEQ ID NO: 10952 - protein, 19 aa, Artificial Sequence
  Synthetic
VGWYRQAPGKQRELLAAIT

SEQ ID NO: 10953 - protein, 19 aa, Artificial Sequence
  Synthetic
MAWYRQAPGEQRKWVAGIM

SEQ ID NO: 10954 - protein, 19 aa, Artificial Sequence
  Synthetic
ITWYRQPPGKQREWVASLR

SEQ ID NO: 10955 - protein, 19 aa, Artificial Sequence
  Synthetic
ISWHRQAPGKQREWIAGIS

SEQ ID NO: 10956 - protein, 19 aa, Artificial Sequence
  Synthetic
MAWYRQAPGNQRELVAGIL

SEQ ID NO: 10957 - protein, 19 aa, Artificial Sequence
  Synthetic
MGWFRQAPGKEREFVAAIS

SEQ ID NO: 10958 - protein, 19 aa, Artificial Sequence
  Synthetic
MGWFRQAPGKEREFVATIG

SEQ ID NO: 10959 - protein, 19 aa, Artificial Sequence
  Synthetic
MRWYRQAPGKQRELVANIN

SEQ ID NO: 10960 - protein, 19 aa, Artificial Sequence
  Synthetic
MRWHRQAPGKERELVATIT

SEQ ID NO: 10961 - protein, 19 aa, Artificial Sequence
  Synthetic
MGWYRQAPGKQRELVAAIP

SEQ ID NO: 10962 - protein, 19 aa, Artificial Sequence
  Synthetic
MAWYRQAPGKERELVASIT

SEQ ID NO: 10963 - protein, 19 aa, Artificial Sequence
  Synthetic
MAWFRQAPGKEREFVARIS

SEQ ID NO: 10964 - protein, 19 aa, Artificial Sequence
  Synthetic
MNWYRQAPGKQRELVAGMT

SEQ ID NO: 10965 - protein, 19 aa, Artificial Sequence
  Synthetic
MAWYRQAPGKQRERVATIT

SEQ ID NO: 10966 - protein, 19 aa, Artificial Sequence
  Synthetic
MGWYRQAPGKQRELVAQIS

SEQ ID NO: 10967 - protein, 19 aa, Artificial Sequence
  Synthetic
MSWYRQAAGKERDVVATIT

SEQ ID NO: 10968 - protein, 19 aa, Artificial Sequence
  Synthetic
MGWFRQAPGKEREFVAAIG

SEQ ID NO: 10969 - protein, 19 aa, Artificial Sequence
  Synthetic
MGWFRQAPGKEREFVATIS

SEQ ID NO: 10970 - protein, 19 aa, Artificial Sequence
  Synthetic
MGWFRQAPGKEREFVASIS

SEQ ID NO: 10971 - protein, 19 aa, Artificial Sequence
  Synthetic
MGWFRQAPGKEREFVADIS

SEQ ID NO: 10972 - protein, 19 aa, Artificial Sequence
  Synthetic
IGWFRQEPGKEREFVASIG

SEQ ID NO: 10973 - protein, 19 aa, Artificial Sequence
  Synthetic
VDWYRQAPGKERELVATIT

SEQ ID NO: 10974 - protein, 19 aa, Artificial Sequence
  Synthetic
MAWYRQAPGKQRERVATIS

SEQ ID NO: 10975 - protein, 19 aa, Artificial Sequence
  Synthetic
MGWFRQAPGKEREFVAAIS

SEQ ID NO: 10976 - protein, 19 aa, Artificial Sequence
  Synthetic
MGWFRQAPGKEREFVSGIG

SEQ ID NO: 10977 - protein, 19 aa, Artificial Sequence
  Synthetic
MAWFRQAPGKEREFVASIG

SEQ ID NO: 10978 - protein, 19 aa, Artificial Sequence
  Synthetic
MGWFRQVPGKEREFVAGMS

SEQ ID NO: 10979 - protein, 19 aa, Artificial Sequence
  Synthetic
MGWFRQTPGKERDFVAAIT

SEQ ID NO: 10980 - protein, 19 aa, Artificial Sequence
  Synthetic
MGWFRQAPGKEREFVAGIG

SEQ ID NO: 10981 - protein, 19 aa, Artificial Sequence
  Synthetic
MGWYRQAPGKQREPVATLT

SEQ ID NO: 10982 - protein, 19 aa, Artificial Sequence
  Synthetic
MGWYRQGPGKQRELVARFT

SEQ ID NO: 10983 - protein, 19 aa, Artificial Sequence
  Synthetic
MAWFRQTPGKEREFVASID

SEQ ID NO: 10984 - protein, 19 aa, Artificial Sequence
  Synthetic
MGWYRQGPGTLRELVASIT

SEQ ID NO: 10985 - protein, 19 aa, Artificial Sequence
  Synthetic
MGWYRQAQGNQRELVAIAS

SEQ ID NO: 10986 - protein, 19 aa, Artificial Sequence
  Synthetic
MGWFRQTPGKEREFVAGIN

SEQ ID NO: 10987 - protein, 19 aa, Artificial Sequence
  Synthetic
VGWYRQVPGGHRAWVAGIS

SEQ ID NO: 10988 - protein, 19 aa, Artificial Sequence
  Synthetic
MSWYRQAPGKEREWVATSF

SEQ ID NO: 10989 - protein, 19 aa, Artificial Sequence
  Synthetic
MGWYRQAPGTQREWVARIS

SEQ ID NO: 10990 - protein, 19 aa, Artificial Sequence
  Synthetic
MGWYSQAPGKQRELVATLT

SEQ ID NO: 10991 - protein, 19 aa, Artificial Sequence
  Synthetic
ITWYRQPPGKQREWVASIT

SEQ ID NO: 10992 - protein, 19 aa, Artificial Sequence
  Synthetic
VGWYRQALGKQRELVALLN

SEQ ID NO: 10993 - protein, 19 aa, Artificial Sequence
  Synthetic
TGWYRQAPEKEREWVSCIS

SEQ ID NO: 10994 - protein, 19 aa, Artificial Sequence
  Synthetic
LGWFRQAPGKEREFVASIS

SEQ ID NO: 10995 - protein, 19 aa, Artificial Sequence
  Synthetic
MGWYRQAPGKPRELVAEIS

SEQ ID NO: 10996 - protein, 19 aa, Artificial Sequence
  Synthetic
MNWFRQAPGKEREFVAGVG

SEQ ID NO: 10997 - protein, 19 aa, Artificial Sequence
  Synthetic
MSWFRQAPGKEREFVANVG

SEQ ID NO: 10998 - protein, 19 aa, Artificial Sequence
  Synthetic
LGWFRQAPGKEREFVGSIS

SEQ ID NO: 10999 - protein, 19 aa, Artificial Sequence
  Synthetic
IGWHRQDPGKEREFVGAVN

SEQ ID NO: 11000 - protein, 19 aa, Artificial Sequence
  Synthetic
MAWFRQAPGKEREFVARIN

SEQ ID NO: 11001 - protein, 19 aa, Artificial Sequence
  Synthetic
MSWYRQAPGKERELVAYIS

SEQ ID NO: 11002 - protein, 19 aa, Artificial Sequence
  Synthetic
MGWFRQAPGKEREFVAAVS

SEQ ID NO: 11003 - protein, 19 aa, Artificial Sequence
  Synthetic
MGWYRQASGKEREQVAVST

SEQ ID NO: 11004 - protein, 19 aa, Artificial Sequence
  Synthetic
ITWYRQPPGKQRELVAAIT

SEQ ID NO: 11005 - protein, 19 aa, Artificial Sequence
  Synthetic
MGWFRQAPGKERDFVAGIS

SEQ ID NO: 11006 - protein, 19 aa, Artificial Sequence
  Synthetic
MSWYRQAPGKEREWVALIT

SEQ ID NO: 11007 - protein, 19 aa, Artificial Sequence
  Synthetic
MSWYRQAPGKERELVASIG

SEQ ID NO: 11008 - protein, 19 aa, Artificial Sequence
  Synthetic
MGWFRQAAGKEREFVASVG

SEQ ID NO: 11009 - protein, 19 aa, Artificial Sequence
  Synthetic
MGWFRQPPGKEREFVAAIS

SEQ ID NO: 11010 - protein, 19 aa, Artificial Sequence
  Synthetic
IGWFRQAPGKEREGVSCTS

SEQ ID NO: 11011 - protein, 19 aa, Artificial Sequence
  Synthetic
MGWFRQAPGKEREFVAAIR

SEQ ID NO: 11012 - protein, 19 aa, Artificial Sequence
  Synthetic
MDWHRQAPGKQREWVARLT

SEQ ID NO: 11013 - protein, 19 aa, Artificial Sequence
  Synthetic
MSWYRQAPGKQREWVSTIS

SEQ ID NO: 11014 - protein, 19 aa, Artificial Sequence
  Synthetic
IGWFRQAPGKEREGVSCIS

SEQ ID NO: 11015 - protein, 19 aa, Artificial Sequence
  Synthetic
MGWYRQAPGKQRELVAAIT

SEQ ID NO: 11016 - protein, 19 aa, Artificial Sequence
  Synthetic
MGWFRQAPGKEREFVAAIS

SEQ ID NO: 11017 - protein, 19 aa, Artificial Sequence
  Synthetic
MGWFRQAPGKEREFVAAIS

SEQ ID NO: 11018 - protein, 19 aa, Artificial Sequence
  Synthetic
MGWYRQAPGKEREFVAAIS

SEQ ID NO: 11019 - protein, 19 aa, Artificial Sequence
  Synthetic
MGWFRQAPGKEREFVAAIS

SEQ ID NO: 11020 - protein, 19 aa, Artificial Sequence
  Synthetic
IGWFRQAPGKEREGVSCIS

SEQ ID NO: 11021 - protein, 5 aa, Artificial Sequence
  Synthetic
QSGMR

SEQ ID NO: 11022 - protein, 5 aa, Artificial Sequence
  Synthetic
LRKGW

SEQ ID NO: 11023 - protein, 5 aa, Artificial Sequence
  Synthetic
SGRDI

SEQ ID NO: 11024 - protein, 5 aa, Artificial Sequence
  Synthetic
SHGDR

SEQ ID NO: 11025 - protein, 5 aa, Artificial Sequence
  Synthetic
TSSTT

SEQ ID NO: 11026 - protein, 5 aa, Artificial Sequence
  Synthetic
WNGGS

SEQ ID NO: 11027 - protein, 5 aa, Artificial Sequence
  Synthetic
TTSGS

SEQ ID NO: 11028 - protein, 5 aa, Artificial Sequence
  Synthetic
WSSGI

SEQ ID NO: 11029 - protein, 5 aa, Artificial Sequence
  Synthetic
VGGSS

SEQ ID NO: 11030 - protein, 5 aa, Artificial Sequence
  Synthetic
WSGGN

SEQ ID NO: 11031 - protein, 5 aa, Artificial Sequence
  Synthetic
WNGGS

SEQ ID NO: 11032 - protein, 5 aa, Artificial Sequence
  Synthetic
WTGSS

SEQ ID NO: 11033 - protein, 4 aa, Artificial Sequence
  Synthetic
SGGS

SEQ ID NO: 11034 - protein, 4 aa, Artificial Sequence
  Synthetic
RSGN

SEQ ID NO: 11035 - protein, 4 aa, Artificial Sequence
  Synthetic
SGGS

SEQ ID NO: 11036 - protein, 4 aa, Artificial Sequence
  Synthetic
SGGS

SEQ ID NO: 11037 - protein, 5 aa, Artificial Sequence
  Synthetic
WSGTT

SEQ ID NO: 11038 - protein, 5 aa, Artificial Sequence
  Synthetic
WSGTR

SEQ ID NO: 11039 - protein, 4 aa, Artificial Sequence
  Synthetic
SGGR

SEQ ID NO: 11040 - protein, 4 aa, Artificial Sequence
  Synthetic
WSGG

SEQ ID NO: 11041 - protein, 5 aa, Artificial Sequence
  Synthetic
RGTGD

SEQ ID NO: 11042 - protein, 5 aa, Artificial Sequence
  Synthetic
RGGNN

SEQ ID NO: 11043 - protein, 5 aa, Artificial Sequence
  Synthetic
RGGSM

SEQ ID NO: 11044 - protein, 8 aa, Artificial Sequence
  Synthetic
RIDRAGGR

SEQ ID NO: 11045 - protein, 4 aa, Artificial Sequence
  Synthetic
SPGT

SEQ ID NO: 11046 - protein, 5 aa, Artificial Sequence
  Synthetic
VGVGD

SEQ ID NO: 11047 - protein, 5 aa, Artificial Sequence
  Synthetic
ASGGE

SEQ ID NO: 11048 - protein, 5 aa, Artificial Sequence
  Synthetic
IGGGS

SEQ ID NO: 11049 - protein, 5 aa, Artificial Sequence
  Synthetic
TGSSS

SEQ ID NO: 11050 - protein, 4 aa, Artificial Sequence
  Synthetic
TDGN

SEQ ID NO: 11051 - protein, 5 aa, Artificial Sequence
  Synthetic
IGSRN

SEQ ID NO: 11052 - protein, 6 aa, Artificial Sequence
  Synthetic
GIGSTA

SEQ ID NO: 11053 - protein, 4 aa, Artificial Sequence
  Synthetic
GFGQ

SEQ ID NO: 11054 - protein, 4 aa, Artificial Sequence
  Synthetic
RPGT

SEQ ID NO: 11055 - protein, 5 aa, Artificial Sequence
  Synthetic
TGDGR

SEQ ID NO: 11056 - protein, 5 aa, Artificial Sequence
  Synthetic
TGSGA

SEQ ID NO: 11057 - protein, 5 aa, Artificial Sequence
  Synthetic
TGGSN

SEQ ID NO: 11058 - protein, 5 aa, Artificial Sequence
  Synthetic
TAEGK

SEQ ID NO: 11059 - protein, 5 aa, Artificial Sequence
  Synthetic
GEWQG

SEQ ID NO: 11060 - protein, 4 aa, Artificial Sequence
  Synthetic
VSGK

SEQ ID NO: 11061 - protein, 4 aa, Artificial Sequence
  Synthetic
SRGI

SEQ ID NO: 11062 - protein, 5 aa, Artificial Sequence
  Synthetic
TGDSR

SEQ ID NO: 11063 - protein, 5 aa, Artificial Sequence
  Synthetic
ADDGT

SEQ ID NO: 11064 - protein, 5 aa, Artificial Sequence
  Synthetic
TGRGD

SEQ ID NO: 11065 - protein, 5 aa, Artificial Sequence
  Synthetic
TASGI

SEQ ID NO: 11066 - protein, 6 aa, Artificial Sequence
  Synthetic
TNGGGS

SEQ ID NO: 11067 - protein, 5 aa, Artificial Sequence
  Synthetic
NGRAI

SEQ ID NO: 11068 - protein, 5 aa, Artificial Sequence
  Synthetic
DVGGS

SEQ ID NO: 11069 - protein, 5 aa, Artificial Sequence
  Synthetic
TGGRR

SEQ ID NO: 11070 - protein, 4 aa, Artificial Sequence
  Synthetic
SGNR

SEQ ID NO: 11071 - protein, 5 aa, Artificial Sequence
  Synthetic
TDINK

SEQ ID NO: 11072 - protein, 5 aa, Artificial Sequence
  Synthetic
IPGGS

SEQ ID NO: 11073 - protein, 5 aa, Artificial Sequence
  Synthetic
AGGGW

SEQ ID NO: 11074 - protein, 5 aa, Artificial Sequence
  Synthetic
IGSGS

SEQ ID NO: 11075 - protein, 5 aa, Artificial Sequence
  Synthetic
TGSGR

SEQ ID NO: 11076 - protein, 5 aa, Artificial Sequence
  Synthetic
SGGGS

SEQ ID NO: 11077 - protein, 5 aa, Artificial Sequence
  Synthetic
TGGRS

SEQ ID NO: 11078 - protein, 9 aa, Artificial Sequence
  Synthetic
RGGLRGGGR

SEQ ID NO: 11079 - protein, 4 aa, Artificial Sequence
  Synthetic
SDGT

SEQ ID NO: 11080 - protein, 4 aa, Artificial Sequence
  Synthetic
SDGR

SEQ ID NO: 11081 - protein, 4 aa, Artificial Sequence
  Synthetic
GDGS

SEQ ID NO: 11082 - protein, 5 aa, Artificial Sequence
  Synthetic
TGGGT

SEQ ID NO: 11083 - protein, 5 aa, Artificial Sequence
  Synthetic
TVGGS

SEQ ID NO: 11084 - protein, 4 aa, Artificial Sequence
  Synthetic
RVDT

SEQ ID NO: 11085 - protein, 4 aa, Artificial Sequence
  Synthetic
SDGS

SEQ ID NO: 11086 - protein, 5 aa, Artificial Sequence
  Synthetic
TGGGI

SEQ ID NO: 11087 - protein, 4 aa, Artificial Sequence
  Synthetic
SAGN

SEQ ID NO: 11088 - protein, 4 aa, Artificial Sequence
  Synthetic
SDGS

SEQ ID NO: 11089 - protein, 4 aa, Artificial Sequence
  Synthetic
SDGS

SEQ ID NO: 11090 - protein, 5 aa, Artificial Sequence
  Synthetic
TGGGS

SEQ ID NO: 11091 - protein, 4 aa, Artificial Sequence
  Synthetic
SDGS

SEQ ID NO: 11092 - protein, 4 aa, Artificial Sequence
  Synthetic
SDGS

SEQ ID NO: 11093 - protein, 4 aa, Artificial Sequence
  Synthetic
SDGT

SEQ ID NO: 11094 - protein, 9 aa, Artificial Sequence
  Synthetic
WSGSMSGST

SEQ ID NO: 11095 - protein, 9 aa, Artificial Sequence
  Synthetic
WSGSTSGST

SEQ ID NO: 11096 - protein, 5 aa, Artificial Sequence
  Synthetic
TDGYS

SEQ ID NO: 11097 - protein, 4 aa, Artificial Sequence
  Synthetic
SVDT

SEQ ID NO: 11098 - protein, 5 aa, Artificial Sequence
  Synthetic
YDGST

SEQ ID NO: 11099 - protein, 4 aa, Artificial Sequence
  Synthetic
GGKR

SEQ ID NO: 11100 - protein, 5 aa, Artificial Sequence
  Synthetic
NGGLI

SEQ ID NO: 11101 - protein, 4 aa, Artificial Sequence
  Synthetic
RDGS

SEQ ID NO: 11102 - protein, 5 aa, Artificial Sequence
  Synthetic
VVIGT

SEQ ID NO: 11103 - protein, 4 aa, Artificial Sequence
  Synthetic
YVGL

SEQ ID NO: 11104 - protein, 4 aa, Artificial Sequence
  Synthetic
TDGN

SEQ ID NO: 11105 - protein, 5 aa, Artificial Sequence
  Synthetic
TGRGS

SEQ ID NO: 11106 - protein, 7 aa, Artificial Sequence
  Synthetic
TSTSMRT

SEQ ID NO: 11107 - protein, 9 aa, Artificial Sequence
  Synthetic
SLVSGVAYY

SEQ ID NO: 11108 - protein, 4 aa, Artificial Sequence
  Synthetic
SDGS

SEQ ID NO: 11109 - protein, 4 aa, Artificial Sequence
  Synthetic
SDGT

SEQ ID NO: 11110 - skipped

SEQ ID NO: 11111 - protein, 4 aa, Artificial Sequence
  Synthetic
IDGT

SEQ ID NO: 11112 - protein, 4 aa, Artificial Sequence
  Synthetic
SAGN

SEQ ID NO: 11113 - protein, 4 aa, Artificial Sequence
  Synthetic
SDSY

SEQ ID NO: 11114 - protein, 4 aa, Artificial Sequence
  Synthetic
RNGN

SEQ ID NO: 11115 - protein, 5 aa, Artificial Sequence
  Synthetic
SKRHT

SEQ ID NO: 11116 - protein, 5 aa, Artificial Sequence
  Synthetic
SVDGR

SEQ ID NO: 11117 - protein, 4 aa, Artificial Sequence
  Synthetic
SAGT

SEQ ID NO: 11118 - protein, 5 aa, Artificial Sequence
  Synthetic
AKGST

SEQ ID NO: 11119 - protein, 5 aa, Artificial Sequence
  Synthetic
GGGGA

SEQ ID NO: 11120 - protein, 5 aa, Artificial Sequence
  Synthetic
FRGDS

SEQ ID NO: 11121 - protein, 5 aa, Artificial Sequence
  Synthetic
NGGSS

SEQ ID NO: 11122 - protein, 5 aa, Artificial Sequence
  Synthetic
TRTGS

SEQ ID NO: 11123 - protein, 5 aa, Artificial Sequence
  Synthetic
KSGGS

SEQ ID NO: 11124 - protein, 5 aa, Artificial Sequence
  Synthetic
TGDDT

SEQ ID NO: 11125 - protein, 5 aa, Artificial Sequence
  Synthetic
VDSGS

SEQ ID NO: 11126 - protein, 5 aa, Artificial Sequence
  Synthetic
KIGTD

SEQ ID NO: 11127 - protein, 5 aa, Artificial Sequence
  Synthetic
PAGTV

SEQ ID NO: 11128 - protein, 4 aa, Artificial Sequence
  Synthetic
SDGT

SEQ ID NO: 11129 - protein, 4 aa, Artificial Sequence
  Synthetic
DDGS

SEQ ID NO: 11130 - protein, 4 aa, Artificial Sequence
  Synthetic
DFGS

SEQ ID NO: 11131 - protein, 6 aa, Artificial Sequence
  Synthetic
GRPGTT

SEQ ID NO: 11132 - protein, 4 aa, Artificial Sequence
  Synthetic
VDGT

SEQ ID NO: 11133 - protein, 5 aa, Artificial Sequence
  Synthetic
SGGGN

SEQ ID NO: 11134 - protein, 5 aa, Artificial Sequence
  Synthetic
SGGFN

SEQ ID NO: 11135 - protein, 4 aa, Artificial Sequence
  Synthetic
LDGR

SEQ ID NO: 11136 - protein, 5 aa, Artificial Sequence
  Synthetic
SGGGK

SEQ ID NO: 11137 - protein, 5 aa, Artificial Sequence
  Synthetic
TDQNG

SEQ ID NO: 11138 - protein, 5 aa, Artificial Sequence
  Synthetic
SRGID

SEQ ID NO: 11139 - protein, 5 aa, Artificial Sequence
  Synthetic
RDGSS

SEQ ID NO: 11140 - protein, 4 aa, Artificial Sequence
  Synthetic
TYDG

SEQ ID NO: 11141 - protein, 5 aa, Artificial Sequence
  Synthetic
TVGVT

SEQ ID NO: 11142 - protein, 5 aa, Artificial Sequence
  Synthetic
TYGDV

SEQ ID NO: 11143 - protein, 5 aa, Artificial Sequence
  Synthetic
TRAGT

SEQ ID NO: 11144 - protein, 4 aa, Artificial Sequence
  Synthetic
ASGS

SEQ ID NO: 11145 - protein, 6 aa, Artificial Sequence
  Synthetic
LGGGHS

SEQ ID NO: 11146 - protein, 5 aa, Artificial Sequence
  Synthetic
SGSGT

SEQ ID NO: 11147 - protein, 5 aa, Artificial Sequence
  Synthetic
TGGGS

SEQ ID NO: 11148 - protein, 5 aa, Artificial Sequence
  Synthetic
SGGDS

SEQ ID NO: 11149 - protein, 4 aa, Artificial Sequence
  Synthetic
PDGT

SEQ ID NO: 11150 - protein, 5 aa, Artificial Sequence
  Synthetic
PFGPK

SEQ ID NO: 11151 - protein, 5 aa, Artificial Sequence
  Synthetic
SGGDS

SEQ ID NO: 11152 - protein, 5 aa, Artificial Sequence
  Synthetic
TRRSI

SEQ ID NO: 11153 - protein, 4 aa, Artificial Sequence
  Synthetic
SDGS

SEQ ID NO: 11154 - protein, 5 aa, Artificial Sequence
  Synthetic
ADGGN

SEQ ID NO: 11155 - protein, 4 aa, Artificial Sequence
  Synthetic
NGGS

SEQ ID NO: 11156 - protein, 4 aa, Artificial Sequence
  Synthetic
RGTT

SEQ ID NO: 11157 - protein, 4 aa, Artificial Sequence
  Synthetic
SKGN

SEQ ID NO: 11158 - protein, 5 aa, Artificial Sequence
  Synthetic
ADTGT

SEQ ID NO: 11159 - protein, 4 aa, Artificial Sequence
  Synthetic
IKHG

SEQ ID NO: 11160 - protein, 6 aa, Artificial Sequence
  Synthetic
TGSGSS

SEQ ID NO: 11161 - protein, 5 aa, Artificial Sequence
  Synthetic
TRGES

SEQ ID NO: 11162 - protein, 5 aa, Artificial Sequence
  Synthetic
SGGGS

SEQ ID NO: 11163 - protein, 4 aa, Artificial Sequence
  Synthetic
SDGS

SEQ ID NO: 11164 - protein, 5 aa, Artificial Sequence
  Synthetic
TGAGL

SEQ ID NO: 11165 - protein, 5 aa, Artificial Sequence
  Synthetic
PSSGA

SEQ ID NO: 11166 - protein, 4 aa, Artificial Sequence
  Synthetic
TGGN

SEQ ID NO: 11167 - protein, 4 aa, Artificial Sequence
  Synthetic
SDGT

SEQ ID NO: 11168 - protein, 4 aa, Artificial Sequence
  Synthetic
KNSR

SEQ ID NO: 11169 - protein, 5 aa, Artificial Sequence
  Synthetic
GAGMP

SEQ ID NO: 11170 - protein, 4 aa, Artificial Sequence
  Synthetic
SDGD

SEQ ID NO: 11171 - protein, 5 aa, Artificial Sequence
  Synthetic
TVGGN

SEQ ID NO: 11172 - protein, 5 aa, Artificial Sequence
  Synthetic
TGLGF

SEQ ID NO: 11173 - protein, 9 aa, Artificial Sequence
  Synthetic
LVSYTTTIK

SEQ ID NO: 11174 - protein, 6 aa, Artificial Sequence
  Synthetic
IGSSHI

SEQ ID NO: 11175 - protein, 5 aa, Artificial Sequence
  Synthetic
RDSGS

SEQ ID NO: 11176 - protein, 4 aa, Artificial Sequence
  Synthetic
SDGN

SEQ ID NO: 11177 - protein, 5 aa, Artificial Sequence
  Synthetic
TGDGF

SEQ ID NO: 11178 - protein, 5 aa, Artificial Sequence
  Synthetic
TSDGS

SEQ ID NO: 11179 - protein, 5 aa, Artificial Sequence
  Synthetic
TSGGT

SEQ ID NO: 11180 - protein, 5 aa, Artificial Sequence
  Synthetic
RGSLK

SEQ ID NO: 11181 - protein, 5 aa, Artificial Sequence
  Synthetic
TGGGV

SEQ ID NO: 11182 - protein, 8 aa, Artificial Sequence
  Synthetic
ISNGVGGR

SEQ ID NO: 11183 - protein, 5 aa, Artificial Sequence
  Synthetic
VHDGS

SEQ ID NO: 11184 - protein, 7 aa, Artificial Sequence
  Synthetic
GGGGSSE

SEQ ID NO: 11185 - protein, 5 aa, Artificial Sequence
  Synthetic
SGGYN

SEQ ID NO: 11186 - protein, 4 aa, Artificial Sequence
  Synthetic
SAGI

SEQ ID NO: 11187 - protein, 8 aa, Artificial Sequence
  Synthetic
TGAGSSIQ

SEQ ID NO: 11188 - protein, 5 aa, Artificial Sequence
  Synthetic
STAIS

SEQ ID NO: 11189 - protein, 4 aa, Artificial Sequence
  Synthetic
SDGS

SEQ ID NO: 11190 - protein, 4 aa, Artificial Sequence
  Synthetic
LDGR

SEQ ID NO: 11191 - protein, 5 aa, Artificial Sequence
  Synthetic
SGGGS

SEQ ID NO: 11192 - protein, 4 aa, Artificial Sequence
  Synthetic
SGGR

SEQ ID NO: 11193 - protein, 5 aa, Artificial Sequence
  Synthetic
SGGGN

SEQ ID NO: 11194 - protein, 5 aa, Artificial Sequence
  Synthetic
RGGGN

SEQ ID NO: 11195 - protein, 10 aa, Artificial Sequence
  Synthetic
AGGPSTYDAT

SEQ ID NO: 11196 - protein, 4 aa, Artificial Sequence
  Synthetic
DDGS

SEQ ID NO: 11197 - protein, 4 aa, Artificial Sequence
  Synthetic
SSGE

SEQ ID NO: 11198 - protein, 4 aa, Artificial Sequence
  Synthetic
SDGG

SEQ ID NO: 11199 - protein, 5 aa, Artificial Sequence
  Synthetic
TAGGG

SEQ ID NO: 11200 - protein, 5 aa, Artificial Sequence
  Synthetic
GELGS

SEQ ID NO: 11201 - protein, 4 aa, Artificial Sequence
  Synthetic
IDGT

SEQ ID NO: 11202 - protein, 5 aa, Artificial Sequence
  Synthetic
FDGDI

SEQ ID NO: 11203 - protein, 5 aa, Artificial Sequence
  Synthetic
SGGGA

SEQ ID NO: 11204 - protein, 5 aa, Artificial Sequence
  Synthetic
RHGDS

SEQ ID NO: 11205 - protein, 5 aa, Artificial Sequence
  Synthetic
SGGGT

SEQ ID NO: 11206 - protein, 5 aa, Artificial Sequence
  Synthetic
TGGGV

SEQ ID NO: 11207 - protein, 4 aa, Artificial Sequence
  Synthetic
SGRA

SEQ ID NO: 11208 - protein, 5 aa, Artificial Sequence
  Synthetic
YSDDG

SEQ ID NO: 11209 - protein, 5 aa, Artificial Sequence
  Synthetic
IPGGS

SEQ ID NO: 11210 - protein, 5 aa, Artificial Sequence
  Synthetic
GRDDR

SEQ ID NO: 11211 - protein, 5 aa, Artificial Sequence
  Synthetic
SRGGT

SEQ ID NO: 11212 - protein, 4 aa, Artificial Sequence
  Synthetic
YSGS

SEQ ID NO: 11213 - protein, 4 aa, Artificial Sequence
  Synthetic
DDRS

SEQ ID NO: 11214 - protein, 4 aa, Artificial Sequence
  Synthetic
PDGN

SEQ ID NO: 11215 - protein, 4 aa, Artificial Sequence
  Synthetic
SNGR

SEQ ID NO: 11216 - protein, 9 aa, Artificial Sequence
  Synthetic
SGGGRTYYN

SEQ ID NO: 11217 - protein, 5 aa, Artificial Sequence
  Synthetic
NGGTN

SEQ ID NO: 11218 - protein, 4 aa, Artificial Sequence
  Synthetic
PDGM

SEQ ID NO: 11219 - protein, 5 aa, Artificial Sequence
  Synthetic
GGRDV

SEQ ID NO: 11220 - protein, 5 aa, Artificial Sequence
  Synthetic
TGATS

SEQ ID NO: 11221 - protein, 5 aa, Artificial Sequence
  Synthetic
SAGGN

SEQ ID NO: 11222 - protein, 8 aa, Artificial Sequence
  Synthetic
VVRSDTRL

SEQ ID NO: 11223 - protein, 5 aa, Artificial Sequence
  Synthetic
FGDGG

SEQ ID NO: 11224 - protein, 5 aa, Artificial Sequence
  Synthetic
TKDGK

SEQ ID NO: 11225 - protein, 5 aa, Artificial Sequence
  Synthetic
TDGSV

SEQ ID NO: 11226 - protein, 4 aa, Artificial Sequence
  Synthetic
IDGK

SEQ ID NO: 11227 - protein, 4 aa, Artificial Sequence
  Synthetic
TDAS

SEQ ID NO: 11228 - protein, 4 aa, Artificial Sequence
  Synthetic
NDGT

SEQ ID NO: 11229 - protein, 4 aa, Artificial Sequence
  Synthetic
SDGS

SEQ ID NO: 11230 - protein, 4 aa, Artificial Sequence
  Synthetic
GDGR

SEQ ID NO: 11231 - protein, 4 aa, Artificial Sequence
  Synthetic
NDGT

SEQ ID NO: 11232 - protein, 5 aa, Artificial Sequence
  Synthetic
RRTGY

SEQ ID NO: 11233 - protein, 5 aa, Artificial Sequence
  Synthetic
IDGGR

SEQ ID NO: 11234 - protein, 5 aa, Artificial Sequence
  Synthetic
SGSVT

SEQ ID NO: 11235 - protein, 4 aa, Artificial Sequence
  Synthetic
RSSS

SEQ ID NO: 11236 - protein, 5 aa, Artificial Sequence
  Synthetic
SGGGG

SEQ ID NO: 11237 - protein, 5 aa, Artificial Sequence
  Synthetic
IDNGN

SEQ ID NO: 11238 - protein, 5 aa, Artificial Sequence
  Synthetic
SSDGT

SEQ ID NO: 11239 - protein, 4 aa, Artificial Sequence
  Synthetic
SSGR

SEQ ID NO: 11240 - protein, 5 aa, Artificial Sequence
  Synthetic
MGGGI

SEQ ID NO: 11241 - protein, 5 aa, Artificial Sequence
  Synthetic
SDGGI

SEQ ID NO: 11242 - protein, 5 aa, Artificial Sequence
  Synthetic
THTGN

SEQ ID NO: 11243 - protein, 5 aa, Artificial Sequence
  Synthetic
SGGGG

SEQ ID NO: 11244 - protein, 5 aa, Artificial Sequence
  Synthetic
SMGGL

SEQ ID NO: 11245 - protein, 4 aa, Artificial Sequence
  Synthetic
RDGT

SEQ ID NO: 11246 - protein, 5 aa, Artificial Sequence
  Synthetic
RFFGT

SEQ ID NO: 11247 - protein, 5 aa, Artificial Sequence
  Synthetic
TSGVS

SEQ ID NO: 11248 - protein, 5 aa, Artificial Sequence
  Synthetic
TYNGA

SEQ ID NO: 11249 - protein, 4 aa, Artificial Sequence
  Synthetic
RGGY

SEQ ID NO: 11250 - protein, 5 aa, Artificial Sequence
  Synthetic
SAGDR

SEQ ID NO: 11251 - protein, 5 aa, Artificial Sequence
  Synthetic
SGGGG

SEQ ID NO: 11252 - protein, 5 aa, Artificial Sequence
  Synthetic
SRDGS

SEQ ID NO: 11253 - protein, 4 aa, Artificial Sequence
  Synthetic
SDGS

SEQ ID NO: 11254 - protein, 5 aa, Artificial Sequence
  Synthetic
TNSGR

SEQ ID NO: 11255 - protein, 5 aa, Artificial Sequence
  Synthetic
SSGVD

SEQ ID NO: 11256 - protein, 5 aa, Artificial Sequence
  Synthetic
RLGGY

SEQ ID NO: 11257 - protein, 4 aa, Artificial Sequence
  Synthetic
GDGD

SEQ ID NO: 11258 - protein, 4 aa, Artificial Sequence
  Synthetic
SDGS

SEQ ID NO: 11259 - protein, 4 aa, Artificial Sequence
  Synthetic
SDGT

SEQ ID NO: 11260 - protein, 4 aa, Artificial Sequence
  Synthetic
SDGS

SEQ ID NO: 11261 - protein, 4 aa, Artificial Sequence
  Synthetic
RGGK

SEQ ID NO: 11262 - protein, 4 aa, Artificial Sequence
  Synthetic
EGRL

SEQ ID NO: 11263 - protein, 5 aa, Artificial Sequence
  Synthetic
TDGVT

SEQ ID NO: 11264 - protein, 5 aa, Artificial Sequence
  Synthetic
PGGTG

SEQ ID NO: 11265 - protein, 5 aa, Artificial Sequence
  Synthetic
SGGSS

SEQ ID NO: 11266 - protein, 4 aa, Artificial Sequence
  Synthetic
NDGT

SEQ ID NO: 11267 - protein, 4 aa, Artificial Sequence
  Synthetic
TDGT

SEQ ID NO: 11268 - protein, 5 aa, Artificial Sequence
  Synthetic
RDGRT

SEQ ID NO: 11269 - protein, 5 aa, Artificial Sequence
  Synthetic
CGRGT

SEQ ID NO: 11270 - protein, 5 aa, Artificial Sequence
  Synthetic
TDDDT

SEQ ID NO: 11271 - protein, 5 aa, Artificial Sequence
  Synthetic
STGGS

SEQ ID NO: 11272 - protein, 4 aa, Artificial Sequence
  Synthetic
SDGS

SEQ ID NO: 11273 - protein, 4 aa, Artificial Sequence
  Synthetic
SDGS

SEQ ID NO: 11274 - protein, 4 aa, Artificial Sequence
  Synthetic
SDGL

SEQ ID NO: 11275 - protein, 4 aa, Artificial Sequence
  Synthetic
SDGS

SEQ ID NO: 11276 - protein, 5 aa, Artificial Sequence
  Synthetic
SDGSN

SEQ ID NO: 11277 - protein, 4 aa, Artificial Sequence
  Synthetic
SNGN

SEQ ID NO: 11278 - protein, 5 aa, Artificial Sequence
  Synthetic
TRRCS

SEQ ID NO: 11279 - protein, 4 aa, Artificial Sequence
  Synthetic
SDGS

SEQ ID NO: 11280 - protein, 4 aa, Artificial Sequence
  Synthetic
SDGS

SEQ ID NO: 11281 - protein, 5 aa, Artificial Sequence
  Synthetic
SGGGR

SEQ ID NO: 11282 - protein, 4 aa, Artificial Sequence
  Synthetic
SDGT

SEQ ID NO: 11283 - protein, 4 aa, Artificial Sequence
  Synthetic
TDGS

SEQ ID NO: 11284 - protein, 5 aa, Artificial Sequence
  Synthetic
SRAGA

SEQ ID NO: 11285 - protein, 5 aa, Artificial Sequence
  Synthetic
SGGGS

SEQ ID NO: 11286 - protein, 5 aa, Artificial Sequence
  Synthetic
TGGRS

SEQ ID NO: 11287 - protein, 4 aa, Artificial Sequence
  Synthetic
LDGT

SEQ ID NO: 11288 - protein, 4 aa, Artificial Sequence
  Synthetic
SDGS

SEQ ID NO: 11289 - protein, 4 aa, Artificial Sequence
  Synthetic
SDSS

SEQ ID NO: 11290 - protein, 4 aa, Artificial Sequence
  Synthetic
RDGR

SEQ ID NO: 11291 - protein, 5 aa, Artificial Sequence
  Synthetic
SGSVF

SEQ ID NO: 11292 - protein, 5 aa, Artificial Sequence
  Synthetic
SEDGR

SEQ ID NO: 11293 - protein, 4 aa, Artificial Sequence
  Synthetic
RDGG

SEQ ID NO: 11294 - protein, 8 aa, Artificial Sequence
  Synthetic
SGDSGGGT

SEQ ID NO: 11295 - protein, 5 aa, Artificial Sequence
  Synthetic
TGGGS

SEQ ID NO: 11296 - protein, 4 aa, Artificial Sequence
  Synthetic
SSGG

SEQ ID NO: 11297 - protein, 5 aa, Artificial Sequence
  Synthetic
TDGRS

SEQ ID NO: 11298 - protein, 4 aa, Artificial Sequence
  Synthetic
PDGS

SEQ ID NO: 11299 - protein, 4 aa, Artificial Sequence
  Synthetic
SGNQ

SEQ ID NO: 11300 - protein, 5 aa, Artificial Sequence
  Synthetic
KGIGG

SEQ ID NO: 11301 - protein, 5 aa, Artificial Sequence
  Synthetic
SFGGS

SEQ ID NO: 11302 - protein, 4 aa, Artificial Sequence
  Synthetic
SDGR

SEQ ID NO: 11303 - protein, 4 aa, Artificial Sequence
  Synthetic
GDGS

SEQ ID NO: 11304 - protein, 5 aa, Artificial Sequence
  Synthetic
LGGPG

SEQ ID NO: 11305 - protein, 4 aa, Artificial Sequence
  Synthetic
TDGS

SEQ ID NO: 11306 - protein, 4 aa, Artificial Sequence
  Synthetic
SDGD

SEQ ID NO: 11307 - protein, 4 aa, Artificial Sequence
  Synthetic
SHGD

SEQ ID NO: 11308 - protein, 5 aa, Artificial Sequence
  Synthetic
RRGGT

SEQ ID NO: 11309 - protein, 4 aa, Artificial Sequence
  Synthetic
ADGG

SEQ ID NO: 11310 - protein, 5 aa, Artificial Sequence
  Synthetic
RRGIS

SEQ ID NO: 11311 - protein, 8 aa, Artificial Sequence
  Synthetic
PRYFRRDN

SEQ ID NO: 11312 - protein, 5 aa, Artificial Sequence
  Synthetic
SGGAS

SEQ ID NO: 11313 - protein, 6 aa, Artificial Sequence
  Synthetic
KVGGGK

SEQ ID NO: 11314 - protein, 4 aa, Artificial Sequence
  Synthetic
ADGA

SEQ ID NO: 11315 - protein, 5 aa, Artificial Sequence
  Synthetic
SGGGT

SEQ ID NO: 11316 - protein, 9 aa, Artificial Sequence
  Synthetic
IDIYNNARP

SEQ ID NO: 11317 - protein, 4 aa, Artificial Sequence
  Synthetic
LDGT

SEQ ID NO: 11318 - protein, 5 aa, Artificial Sequence
  Synthetic
TFGGT

SEQ ID NO: 11319 - protein, 4 aa, Artificial Sequence
  Synthetic
GDSS

SEQ ID NO: 11320 - protein, 5 aa, Artificial Sequence
  Synthetic
TVDDS

SEQ ID NO: 11321 - protein, 4 aa, Artificial Sequence
  Synthetic
RDGI

SEQ ID NO: 11322 - protein, 5 aa, Artificial Sequence
  Synthetic
TPVSS

SEQ ID NO: 11323 - protein, 4 aa, Artificial Sequence
  Synthetic
RDGF

SEQ ID NO: 11324 - protein, 5 aa, Artificial Sequence
  Synthetic
PPVDT

SEQ ID NO: 11325 - protein, 4 aa, Artificial Sequence
  Synthetic
SDGS

SEQ ID NO: 11326 - protein, 4 aa, Artificial Sequence
  Synthetic
TYGS

SEQ ID NO: 11327 - protein, 4 aa, Artificial Sequence
  Synthetic
SDGS

SEQ ID NO: 11328 - protein, 4 aa, Artificial Sequence
  Synthetic
GTSI

SEQ ID NO: 11329 - protein, 4 aa, Artificial Sequence
  Synthetic
SDGD

SEQ ID NO: 11330 - protein, 4 aa, Artificial Sequence
  Synthetic
SDDM

SEQ ID NO: 11331 - protein, 5 aa, Artificial Sequence
  Synthetic
RESGT

SEQ ID NO: 11332 - protein, 4 aa, Artificial Sequence
  Synthetic
TDGG

SEQ ID NO: 11333 - protein, 5 aa, Artificial Sequence
  Synthetic
TSSGR

SEQ ID NO: 11334 - protein, 5 aa, Artificial Sequence
  Synthetic
TGAGE

SEQ ID NO: 11335 - protein, 4 aa, Artificial Sequence
  Synthetic
SEGV

SEQ ID NO: 11336 - protein, 5 aa, Artificial Sequence
  Synthetic
SSGGS

SEQ ID NO: 11337 - protein, 9 aa, Artificial Sequence
  Synthetic
TTYPTGGGA

SEQ ID NO: 11338 - protein, 4 aa, Artificial Sequence
  Synthetic
SDGR

SEQ ID NO: 11339 - protein, 5 aa, Artificial Sequence
  Synthetic
TTNSY

SEQ ID NO: 11340 - protein, 4 aa, Artificial Sequence
  Synthetic
SDGS

SEQ ID NO: 11341 - protein, 4 aa, Artificial Sequence
  Synthetic
WDGS

SEQ ID NO: 11342 - protein, 5 aa, Artificial Sequence
  Synthetic
IGGTI

SEQ ID NO: 11343 - protein, 4 aa, Artificial Sequence
  Synthetic
TGGM

SEQ ID NO: 11344 - protein, 5 aa, Artificial Sequence
  Synthetic
TNHRV

SEQ ID NO: 11345 - protein, 5 aa, Artificial Sequence
  Synthetic
APSNS

SEQ ID NO: 11346 - protein, 5 aa, Artificial Sequence
  Synthetic
LGSII

SEQ ID NO: 11347 - protein, 9 aa, Artificial Sequence
  Synthetic
RDIYTGHTN

SEQ ID NO: 11348 - protein, 5 aa, Artificial Sequence
  Synthetic
PGSII

SEQ ID NO: 11349 - protein, 5 aa, Artificial Sequence
  Synthetic
RGSFI

SEQ ID NO: 11350 - protein, 5 aa, Artificial Sequence
  Synthetic
SPSNW

SEQ ID NO: 11351 - protein, 10 aa, Artificial Sequence
  Synthetic
TTGRTSVDGR

SEQ ID NO: 11352 - protein, 5 aa, Artificial Sequence
  Synthetic
RDVGI

SEQ ID NO: 11353 - protein, 5 aa, Artificial Sequence
  Synthetic
PGSRI

SEQ ID NO: 11354 - protein, 5 aa, Artificial Sequence
  Synthetic
RDFDI

SEQ ID NO: 11355 - protein, 4 aa, Artificial Sequence
  Synthetic
SGGP

SEQ ID NO: 11356 - protein, 5 aa, Artificial Sequence
  Synthetic
TEASI

SEQ ID NO: 11357 - protein, 5 aa, Artificial Sequence
  Synthetic
SVPGI

SEQ ID NO: 11358 - protein, 7 aa, Artificial Sequence
  Synthetic
SAANTYY

SEQ ID NO: 11359 - protein, 4 aa, Artificial Sequence
  Synthetic
PDYN

SEQ ID NO: 11360 - protein, 5 aa, Artificial Sequence
  Synthetic
SGGGS

SEQ ID NO: 11361 - protein, 5 aa, Artificial Sequence
  Synthetic
TDYNL

SEQ ID NO: 11362 - protein, 5 aa, Artificial Sequence
  Synthetic
AVADI

SEQ ID NO: 11363 - protein, 6 aa, Artificial Sequence
  Synthetic
TDVPGV

SEQ ID NO: 11364 - protein, 5 aa, Artificial Sequence
  Synthetic
TGSGS

SEQ ID NO: 11365 - protein, 5 aa, Artificial Sequence
  Synthetic
TGAGT

SEQ ID NO: 11366 - protein, 5 aa, Artificial Sequence
  Synthetic
TGGLR

SEQ ID NO: 11367 - protein, 5 aa, Artificial Sequence
  Synthetic
TTSGD

SEQ ID NO: 11368 - protein, 5 aa, Artificial Sequence
  Synthetic
GDGSR

SEQ ID NO: 11369 - protein, 5 aa, Artificial Sequence
  Synthetic
VGGGT

SEQ ID NO: 11370 - protein, 5 aa, Artificial Sequence
  Synthetic
SDGAA

SEQ ID NO: 11371 - protein, 5 aa, Artificial Sequence
  Synthetic
TDGGN

SEQ ID NO: 11372 - protein, 5 aa, Artificial Sequence
  Synthetic
NRGSV

SEQ ID NO: 11373 - protein, 4 aa, Artificial Sequence
  Synthetic
EGGG

SEQ ID NO: 11374 - protein, 4 aa, Artificial Sequence
  Synthetic
SGGS

SEQ ID NO: 11375 - protein, 5 aa, Artificial Sequence
  Synthetic
WSGGN

SEQ ID NO: 11376 - protein, 4 aa, Artificial Sequence
  Synthetic
VGGT

SEQ ID NO: 11377 - protein, 5 aa, Artificial Sequence
  Synthetic
WSGNT

SEQ ID NO: 11378 - protein, 5 aa, Artificial Sequence
  Synthetic
RSGGG

SEQ ID NO: 11379 - protein, 4 aa, Artificial Sequence
  Synthetic
WRGS

SEQ ID NO: 11380 - protein, 5 aa, Artificial Sequence
  Synthetic
SSGGD

SEQ ID NO: 11381 - protein, 4 aa, Artificial Sequence
  Synthetic
SSGG

SEQ ID NO: 11382 - protein, 4 aa, Artificial Sequence
  Synthetic
GGGS

SEQ ID NO: 11383 - protein, 5 aa, Artificial Sequence
  Synthetic
WSGYS

SEQ ID NO: 11384 - protein, 5 aa, Artificial Sequence
  Synthetic
WSGVS

SEQ ID NO: 11385 - protein, 5 aa, Artificial Sequence
  Synthetic
RGGHA

SEQ ID NO: 11386 - protein, 4 aa, Artificial Sequence
  Synthetic
RDHS

SEQ ID NO: 11387 - protein, 4 aa, Artificial Sequence
  Synthetic
SRDD

SEQ ID NO: 11388 - protein, 4 aa, Artificial Sequence
  Synthetic
SGGN

SEQ ID NO: 11389 - protein, 5 aa, Artificial Sequence
  Synthetic
WTGGS

SEQ ID NO: 11390 - protein, 5 aa, Artificial Sequence
  Synthetic
SSGSS

SEQ ID NO: 11391 - protein, 5 aa, Artificial Sequence
  Synthetic
WSGGS

SEQ ID NO: 11392 - protein, 4 aa, Artificial Sequence
  Synthetic
PGGD

SEQ ID NO: 11393 - protein, 5 aa, Artificial Sequence
  Synthetic
WSGRD

SEQ ID NO: 11394 - protein, 4 aa, Artificial Sequence
  Synthetic
SDDR

SEQ ID NO: 11395 - protein, 4 aa, Artificial Sequence
  Synthetic
TDDE

SEQ ID NO: 11396 - protein, 5 aa, Artificial Sequence
  Synthetic
TGGSR

SEQ ID NO: 11397 - protein, 6 aa, Artificial Sequence
  Synthetic
SGDGRT

SEQ ID NO: 11398 - protein, 6 aa, Artificial Sequence
  Synthetic
GGDGRT

SEQ ID NO: 11399 - protein, 6 aa, Artificial Sequence
  Synthetic
PGDGST

SEQ ID NO: 11400 - protein, 4 aa, Artificial Sequence
  Synthetic
SADT

SEQ ID NO: 11401 - protein, 5 aa, Artificial Sequence
  Synthetic
RNGLT

SEQ ID NO: 11402 - protein, 5 aa, Artificial Sequence
  Synthetic
RNGIT

SEQ ID NO: 11403 - protein, 5 aa, Artificial Sequence
  Synthetic
GRSSI

SEQ ID NO: 11404 - protein, 4 aa, Artificial Sequence
  Synthetic
SDGS

SEQ ID NO: 11405 - protein, 4 aa, Artificial Sequence
  Synthetic
STGS

SEQ ID NO: 11406 - protein, 4 aa, Artificial Sequence
  Synthetic
SDGR

SEQ ID NO: 11407 - protein, 5 aa, Artificial Sequence
  Synthetic
RSDDR

SEQ ID NO: 11408 - protein, 5 aa, Artificial Sequence
  Synthetic
WSGGM

SEQ ID NO: 11409 - protein, 5 aa, Artificial Sequence
  Synthetic
RSGTV

SEQ ID NO: 11410 - protein, 5 aa, Artificial Sequence
  Synthetic
WSGGM

SEQ ID NO: 11411 - protein, 5 aa, Artificial Sequence
  Synthetic
WSGTS

SEQ ID NO: 11412 - protein, 5 aa, Artificial Sequence
  Synthetic
ASGLG

SEQ ID NO: 11413 - protein, 5 aa, Artificial Sequence
  Synthetic
WSGGM

SEQ ID NO: 11414 - protein, 4 aa, Artificial Sequence
  Synthetic
WGGD

SEQ ID NO: 11415 - protein, 4 aa, Artificial Sequence
  Synthetic
RSGS

SEQ ID NO: 11416 - protein, 5 aa, Artificial Sequence
  Synthetic
WSGAN

SEQ ID NO: 11417 - protein, 4 aa, Artificial Sequence
  Synthetic
SDGN

SEQ ID NO: 11418 - protein, 5 aa, Artificial Sequence
  Synthetic
WTSSL

SEQ ID NO: 11419 - protein, 4 aa, Artificial Sequence
  Synthetic
DDGG

SEQ ID NO: 11420 - protein, 4 aa, Artificial Sequence
  Synthetic
DDGG

SEQ ID NO: 11421 - protein, 5 aa, Artificial Sequence
  Synthetic
LSHST

SEQ ID NO: 11422 - protein, 4 aa, Artificial Sequence
  Synthetic
SQGS

SEQ ID NO: 11423 - protein, 4 aa, Artificial Sequence
  Synthetic
RLAS

SEQ ID NO: 11424 - protein, 5 aa, Artificial Sequence
  Synthetic
YTGGT

SEQ ID NO: 11425 - protein, 5 aa, Artificial Sequence
  Synthetic
LSSST

SEQ ID NO: 11426 - protein, 5 aa, Artificial Sequence
  Synthetic
WSAGS

SEQ ID NO: 11427 - protein, 4 aa, Artificial Sequence
  Synthetic
EGGI

SEQ ID NO: 11428 - protein, 4 aa, Artificial Sequence
  Synthetic
NTGV

SEQ ID NO: 11429 - protein, 5 aa, Artificial Sequence
  Synthetic
WTGIS

SEQ ID NO: 11430 - protein, 5 aa, Artificial Sequence
  Synthetic
WTGIS

SEQ ID NO: 11431 - protein, 4 aa, Artificial Sequence
  Synthetic
SGGR

SEQ ID NO: 11432 - protein, 5 aa, Artificial Sequence
  Synthetic
LNGGR

SEQ ID NO: 11433 - protein, 5 aa, Artificial Sequence
  Synthetic
SGGGT

SEQ ID NO: 11434 - protein, 5 aa, Artificial Sequence
  Synthetic
WSVGT

SEQ ID NO: 11435 - protein, 5 aa, Artificial Sequence
  Synthetic
WSVGT

SEQ ID NO: 11436 - protein, 5 aa, Artificial Sequence
  Synthetic
WTPGT

SEQ ID NO: 11437 - protein, 5 aa, Artificial Sequence
  Synthetic
WSRDR

SEQ ID NO: 11438 - protein, 4 aa, Artificial Sequence
  Synthetic
SDGT

SEQ ID NO: 11439 - protein, 5 aa, Artificial Sequence
  Synthetic
WLGGR

SEQ ID NO: 11440 - protein, 4 aa, Artificial Sequence
  Synthetic
RGGI

SEQ ID NO: 11441 - protein, 4 aa, Artificial Sequence
  Synthetic
RGGI

SEQ ID NO: 11442 - protein, 5 aa, Artificial Sequence
  Synthetic
WGRGS

SEQ ID NO: 11443 - protein, 4 aa, Artificial Sequence
  Synthetic
SGGW

SEQ ID NO: 11444 - protein, 4 aa, Artificial Sequence
  Synthetic
SGGS

SEQ ID NO: 11445 - protein, 5 aa, Artificial Sequence
  Synthetic
RGGIT

SEQ ID NO: 11446 - protein, 5 aa, Artificial Sequence
  Synthetic
SSGGS

SEQ ID NO: 11447 - protein, 5 aa, Artificial Sequence
  Synthetic
STSLT

SEQ ID NO: 11448 - protein, 4 aa, Artificial Sequence
  Synthetic
RDRT

SEQ ID NO: 11449 - protein, 6 aa, Artificial Sequence
  Synthetic
ENGDIL

SEQ ID NO: 11450 - protein, 5 aa, Artificial Sequence
  Synthetic
WIGGS

SEQ ID NO: 11451 - protein, 6 aa, Artificial Sequence
  Synthetic
NRNGAS

SEQ ID NO: 11452 - protein, 5 aa, Artificial Sequence
  Synthetic
RSGAS

SEQ ID NO: 11453 - protein, 5 aa, Artificial Sequence
  Synthetic
WNGGR

SEQ ID NO: 11454 - protein, 5 aa, Artificial Sequence
  Synthetic
WNGGR

SEQ ID NO: 11455 - protein, 5 aa, Artificial Sequence
  Synthetic
RSGGS

SEQ ID NO: 11456 - protein, 5 aa, Artificial Sequence
  Synthetic
SSDGS

SEQ ID NO: 11457 - protein, 5 aa, Artificial Sequence
  Synthetic
WDGDS

SEQ ID NO: 11458 - protein, 5 aa, Artificial Sequence
  Synthetic
ASGAT

SEQ ID NO: 11459 - protein, 5 aa, Artificial Sequence
  Synthetic
AKGGV

SEQ ID NO: 11460 - protein, 5 aa, Artificial Sequence
  Synthetic
ASGGS

SEQ ID NO: 11461 - protein, 5 aa, Artificial Sequence
  Synthetic
WSGGG

SEQ ID NO: 11462 - protein, 5 aa, Artificial Sequence
  Synthetic
WGGRH

SEQ ID NO: 11463 - protein, 5 aa, Artificial Sequence
  Synthetic
KSGGS

SEQ ID NO: 11464 - protein, 5 aa, Artificial Sequence
  Synthetic
SSSGT

SEQ ID NO: 11465 - protein, 5 aa, Artificial Sequence
  Synthetic
RSGGS

SEQ ID NO: 11466 - protein, 5 aa, Artificial Sequence
  Synthetic
RRGAI

SEQ ID NO: 11467 - protein, 5 aa, Artificial Sequence
  Synthetic
WSESS

SEQ ID NO: 11468 - protein, 4 aa, Artificial Sequence
  Synthetic
NDGS

SEQ ID NO: 11469 - protein, 5 aa, Artificial Sequence
  Synthetic
ASGGS

SEQ ID NO: 11470 - protein, 4 aa, Artificial Sequence
  Synthetic
SGRS

SEQ ID NO: 11471 - protein, 5 aa, Artificial Sequence
  Synthetic
WSSRS

SEQ ID NO: 11472 - protein, 5 aa, Artificial Sequence
  Synthetic
ASGGS

SEQ ID NO: 11473 - protein, 4 aa, Artificial Sequence
  Synthetic
SAGA

SEQ ID NO: 11474 - protein, 4 aa, Artificial Sequence
  Synthetic
AGRS

SEQ ID NO: 11475 - protein, 5 aa, Artificial Sequence
  Synthetic
GRGGV

SEQ ID NO: 11476 - protein, 5 aa, Artificial Sequence
  Synthetic
SGGGL

SEQ ID NO: 11477 - protein, 5 aa, Artificial Sequence
  Synthetic
PDDGS

SEQ ID NO: 11478 - protein, 5 aa, Artificial Sequence
  Synthetic
GRGGT

SEQ ID NO: 11479 - protein, 5 aa, Artificial Sequence
  Synthetic
WSGQN

SEQ ID NO: 11480 - protein, 4 aa, Artificial Sequence
  Synthetic
WNRR

SEQ ID NO: 11481 - protein, 5 aa, Artificial Sequence
  Synthetic
ASGGS

SEQ ID NO: 11482 - protein, 5 aa, Artificial Sequence
  Synthetic
WSGTR

SEQ ID NO: 11483 - protein, 4 aa, Artificial Sequence
  Synthetic
STRS

SEQ ID NO: 11484 - protein, 5 aa, Artificial Sequence
  Synthetic
KSGGS

SEQ ID NO: 11485 - protein, 5 aa, Artificial Sequence
  Synthetic
RSGAT

SEQ ID NO: 11486 - protein, 5 aa, Artificial Sequence
  Synthetic
WDGDS

SEQ ID NO: 11487 - protein, 5 aa, Artificial Sequence
  Synthetic
WSGSW

SEQ ID NO: 11488 - protein, 5 aa, Artificial Sequence
  Synthetic
WAGTT

SEQ ID NO: 11489 - protein, 5 aa, Artificial Sequence
  Synthetic
WNGAM

SEQ ID NO: 11490 - protein, 5 aa, Artificial Sequence
  Synthetic
SDGSI

SEQ ID NO: 11491 - protein, 4 aa, Artificial Sequence
  Synthetic
RNGR

SEQ ID NO: 11492 - protein, 4 aa, Artificial Sequence
  Synthetic
GGGT

SEQ ID NO: 11493 - protein, 4 aa, Artificial Sequence
  Synthetic
SGGS

SEQ ID NO: 11494 - protein, 4 aa, Artificial Sequence
  Synthetic
SGGG

SEQ ID NO: 11495 - protein, 4 aa, Artificial Sequence
  Synthetic
SWGT

SEQ ID NO: 11496 - protein, 4 aa, Artificial Sequence
  Synthetic
SAGA

SEQ ID NO: 11497 - protein, 4 aa, Artificial Sequence
  Synthetic
SGGT

SEQ ID NO: 11498 - protein, 4 aa, Artificial Sequence
  Synthetic
SGGI

SEQ ID NO: 11499 - protein, 4 aa, Artificial Sequence
  Synthetic
TTGT

SEQ ID NO: 11500 - protein, 4 aa, Artificial Sequence
  Synthetic
VGGT

SEQ ID NO: 11501 - protein, 5 aa, Artificial Sequence
  Synthetic
RGGGS

SEQ ID NO: 11502 - protein, 5 aa, Artificial Sequence
  Synthetic
RGGGS

SEQ ID NO: 11503 - protein, 5 aa, Artificial Sequence
  Synthetic
RGGGS

SEQ ID NO: 11504 - protein, 4 aa, Artificial Sequence
  Synthetic
SDGT

SEQ ID NO: 11505 - protein, 4 aa, Artificial Sequence
  Synthetic
WGGG

SEQ ID NO: 11506 - protein, 5 aa, Artificial Sequence
  Synthetic
WSGGS

SEQ ID NO: 11507 - protein, 4 aa, Artificial Sequence
  Synthetic
YSGH

SEQ ID NO: 11508 - protein, 8 aa, Artificial Sequence
  Synthetic
WGGWSGGT

SEQ ID NO: 11509 - protein, 4 aa, Artificial Sequence
  Synthetic
ADGT

SEQ ID NO: 11510 - protein, 4 aa, Artificial Sequence
  Synthetic
SDGE

SEQ ID NO: 11511 - protein, 6 aa, Artificial Sequence
  Synthetic
WWSGSR

SEQ ID NO: 11512 - protein, 5 aa, Artificial Sequence
  Synthetic
WTGSS

SEQ ID NO: 11513 - protein, 5 aa, Artificial Sequence
  Synthetic
WYDGS

SEQ ID NO: 11514 - protein, 5 aa, Artificial Sequence
  Synthetic
WSGGF

SEQ ID NO: 11515 - protein, 5 aa, Artificial Sequence
  Synthetic
WSGGN

SEQ ID NO: 11516 - protein, 5 aa, Artificial Sequence
  Synthetic
RSGIS

SEQ ID NO: 11517 - protein, 5 aa, Artificial Sequence
  Synthetic
RSGVS

SEQ ID NO: 11518 - protein, 5 aa, Artificial Sequence
  Synthetic
WTGGS

SEQ ID NO: 11519 - protein, 5 aa, Artificial Sequence
  Synthetic
WSGGY

SEQ ID NO: 11520 - protein, 5 aa, Artificial Sequence
  Synthetic
WSGGY

SEQ ID NO: 11521 - protein, 5 aa, Artificial Sequence
  Synthetic
WSGGN

SEQ ID NO: 11522 - protein, 4 aa, Artificial Sequence
  Synthetic
FNGA

SEQ ID NO: 11523 - protein, 10 aa, Artificial Sequence
  Synthetic
RSGISWKGAM

SEQ ID NO: 11524 - protein, 4 aa, Artificial Sequence
  Synthetic
SRGS

SEQ ID NO: 11525 - protein, 4 aa, Artificial Sequence
  Synthetic
SDLS

SEQ ID NO: 11526 - protein, 10 aa, Artificial Sequence
  Synthetic
RSADSWNGAM

SEQ ID NO: 11527 - protein, 10 aa, Artificial Sequence
  Synthetic
RSAISWKGAS

SEQ ID NO: 11528 - protein, 4 aa, Artificial Sequence
  Synthetic
DGGS

SEQ ID NO: 11529 - protein, 4 aa, Artificial Sequence
  Synthetic
FTGT

SEQ ID NO: 11530 - protein, 4 aa, Artificial Sequence
  Synthetic
RAGT

SEQ ID NO: 11531 - protein, 5 aa, Artificial Sequence
  Synthetic
WIGSS

SEQ ID NO: 11532 - protein, 4 aa, Artificial Sequence
  Synthetic
FIGT

SEQ ID NO: 11533 - protein, 4 aa, Artificial Sequence
  Synthetic
RGDV

SEQ ID NO: 11534 - protein, 5 aa, Artificial Sequence
  Synthetic
SGGTT

SEQ ID NO: 11535 - protein, 4 aa, Artificial Sequence
  Synthetic
WSGW

SEQ ID NO: 11536 - protein, 4 aa, Artificial Sequence
  Synthetic
WSGW

SEQ ID NO: 11537 - protein, 5 aa, Artificial Sequence
  Synthetic
WYDGS

SEQ ID NO: 11538 - protein, 5 aa, Artificial Sequence
  Synthetic
WYDGS

SEQ ID NO: 11539 - protein, 5 aa, Artificial Sequence
  Synthetic
WYDDS

SEQ ID NO: 11540 - protein, 5 aa, Artificial Sequence
  Synthetic
WYDGS

SEQ ID NO: 11541 - protein, 5 aa, Artificial Sequence
  Synthetic
WYDYS

SEQ ID NO: 11542 - protein, 5 aa, Artificial Sequence
  Synthetic
WYDAS

SEQ ID NO: 11543 - protein, 5 aa, Artificial Sequence
  Synthetic
WYDHS

SEQ ID NO: 11544 - protein, 5 aa, Artificial Sequence
  Synthetic
FGGHS

SEQ ID NO: 11545 - protein, 5 aa, Artificial Sequence
  Synthetic
WGGHS

SEQ ID NO: 11546 - skipped

SEQ ID NO: 11547 - protein, 5 aa, Artificial Sequence
  Synthetic
SNGDS

SEQ ID NO: 11548 - protein, 5 aa, Artificial Sequence
  Synthetic
WSGSS

SEQ ID NO: 11549 - protein, 5 aa, Artificial Sequence
  Synthetic
GSGSS

SEQ ID NO: 11550 - protein, 6 aa, Artificial Sequence
  Synthetic
WWSGSR

SEQ ID NO: 11551 - protein, 4 aa, Artificial Sequence
  Synthetic
SGGN

SEQ ID NO: 11552 - protein, 5 aa, Artificial Sequence
  Synthetic
WGGGS

SEQ ID NO: 11553 - protein, 5 aa, Artificial Sequence
  Synthetic
WSSGS

SEQ ID NO: 11554 - protein, 5 aa, Artificial Sequence
  Synthetic
RSGGS

SEQ ID NO: 11555 - protein, 5 aa, Artificial Sequence
  Synthetic
RRGGR

SEQ ID NO: 11556 - protein, 6 aa, Artificial Sequence
  Synthetic
WRSGSK

SEQ ID NO: 11557 - protein, 4 aa, Artificial Sequence
  Synthetic
SRGS

SEQ ID NO: 11558 - protein, 5 aa, Artificial Sequence
  Synthetic
WTGGV

SEQ ID NO: 11559 - protein, 5 aa, Artificial Sequence
  Synthetic
WSDGN

SEQ ID NO: 11560 - protein, 5 aa, Artificial Sequence
  Synthetic
WSGHS

SEQ ID NO: 11561 - protein, 8 aa, Artificial Sequence
  Synthetic
WSGWSGGN

SEQ ID NO: 11562 - protein, 5 aa, Artificial Sequence
  Synthetic
WYDSS

SEQ ID NO: 11563 - protein, 4 aa, Artificial Sequence
  Synthetic
NSGS

SEQ ID NO: 11564 - protein, 5 aa, Artificial Sequence
  Synthetic
RGGGS

SEQ ID NO: 11565 - protein, 5 aa, Artificial Sequence
  Synthetic
WNGSV

SEQ ID NO: 11566 - protein, 5 aa, Artificial Sequence
  Synthetic
WNGGN

SEQ ID NO: 11567 - protein, 5 aa, Artificial Sequence
  Synthetic
GDGRL

SEQ ID NO: 11568 - protein, 5 aa, Artificial Sequence
  Synthetic
QIGNN

SEQ ID NO: 11569 - protein, 5 aa, Artificial Sequence
  Synthetic
RSSGR

SEQ ID NO: 11570 - protein, 5 aa, Artificial Sequence
  Synthetic
WSTGR

SEQ ID NO: 11571 - protein, 5 aa, Artificial Sequence
  Synthetic
WSTGR

SEQ ID NO: 11572 - protein, 5 aa, Artificial Sequence
  Synthetic
QIGNN

SEQ ID NO: 11573 - protein, 5 aa, Artificial Sequence
  Synthetic
WSGET

SEQ ID NO: 11574 - protein, 5 aa, Artificial Sequence
  Synthetic
QIGNN

SEQ ID NO: 11575 - protein, 5 aa, Artificial Sequence
  Synthetic
QIGNN

SEQ ID NO: 11576 - protein, 4 aa, Artificial Sequence
  Synthetic
SVGR

SEQ ID NO: 11577 - protein, 5 aa, Artificial Sequence
  Synthetic
RSSDS

SEQ ID NO: 11578 - protein, 5 aa, Artificial Sequence
  Synthetic
WSGGS

SEQ ID NO: 11579 - protein, 5 aa, Artificial Sequence
  Synthetic
WSGNS

SEQ ID NO: 11580 - protein, 5 aa, Artificial Sequence
  Synthetic
GNGGE

SEQ ID NO: 11581 - protein, 5 aa, Artificial Sequence
  Synthetic
RSGDI

SEQ ID NO: 11582 - protein, 5 aa, Artificial Sequence
  Synthetic
WSGDN

SEQ ID NO: 11583 - protein, 4 aa, Artificial Sequence
  Synthetic
GASN

SEQ ID NO: 11584 - protein, 5 aa, Artificial Sequence
  Synthetic
REKEE

SEQ ID NO: 11585 - protein, 4 aa, Artificial Sequence
  Synthetic
TDGS

SEQ ID NO: 11586 - protein, 4 aa, Artificial Sequence
  Synthetic
RAGF

SEQ ID NO: 11587 - protein, 4 aa, Artificial Sequence
  Synthetic
SGGV

SEQ ID NO: 11588 - protein, 4 aa, Artificial Sequence
  Synthetic
SDSN

SEQ ID NO: 11589 - protein, 5 aa, Artificial Sequence
  Synthetic
SGSGS

SEQ ID NO: 11590 - protein, 5 aa, Artificial Sequence
  Synthetic
TGRHN

SEQ ID NO: 11591 - protein, 5 aa, Artificial Sequence
  Synthetic
PVDNS

SEQ ID NO: 11592 - protein, 4 aa, Artificial Sequence
  Synthetic
DARI

SEQ ID NO: 11593 - protein, 5 aa, Artificial Sequence
  Synthetic
RSGGS

SEQ ID NO: 11594 - protein, 5 aa, Artificial Sequence
  Synthetic
GFGRS

SEQ ID NO: 11595 - protein, 4 aa, Artificial Sequence
  Synthetic
VDGT

SEQ ID NO: 11596 - protein, 5 aa, Artificial Sequence
  Synthetic
AGGGS

SEQ ID NO: 11597 - protein, 4 aa, Artificial Sequence
  Synthetic
SDEG

SEQ ID NO: 11598 - protein, 5 aa, Artificial Sequence
  Synthetic
TLDDR

SEQ ID NO: 11599 - protein, 5 aa, Artificial Sequence
  Synthetic
IGAES

SEQ ID NO: 11600 - protein, 5 aa, Artificial Sequence
  Synthetic
IGFGS

SEQ ID NO: 11601 - protein, 5 aa, Artificial Sequence
  Synthetic
SSGDS

SEQ ID NO: 11602 - protein, 5 aa, Artificial Sequence
  Synthetic
RSTII

SEQ ID NO: 11603 - protein, 5 aa, Artificial Sequence
  Synthetic
WSGGT

SEQ ID NO: 11604 - protein, 5 aa, Artificial Sequence
  Synthetic
GVAAT

SEQ ID NO: 11605 - protein, 5 aa, Artificial Sequence
  Synthetic
GIDGT

SEQ ID NO: 11606 - protein, 5 aa, Artificial Sequence
  Synthetic
WSSSD

SEQ ID NO: 11607 - protein, 4 aa, Artificial Sequence
  Synthetic
RGGR

SEQ ID NO: 11608 - protein, 5 aa, Artificial Sequence
  Synthetic
WSGID

SEQ ID NO: 11609 - protein, 5 aa, Artificial Sequence
  Synthetic
WTGGR

SEQ ID NO: 11610 - protein, 4 aa, Artificial Sequence
  Synthetic
RDGS

SEQ ID NO: 11611 - protein, 5 aa, Artificial Sequence
  Synthetic
RSGGR

SEQ ID NO: 11612 - protein, 4 aa, Artificial Sequence
  Synthetic
RGGS

SEQ ID NO: 11613 - protein, 5 aa, Artificial Sequence
  Synthetic
RSDNS

SEQ ID NO: 11614 - protein, 5 aa, Artificial Sequence
  Synthetic
GRGLS

SEQ ID NO: 11615 - protein, 5 aa, Artificial Sequence
  Synthetic
WSGSY

SEQ ID NO: 11616 - protein, 5 aa, Artificial Sequence
  Synthetic
DSDAS

SEQ ID NO: 11617 - protein, 4 aa, Artificial Sequence
  Synthetic
SGGS

SEQ ID NO: 11618 - protein, 5 aa, Artificial Sequence
  Synthetic
ALGTR

SEQ ID NO: 11619 - protein, 5 aa, Artificial Sequence
  Synthetic
GSGSN

SEQ ID NO: 11620 - protein, 5 aa, Artificial Sequence
  Synthetic
WTGRS

SEQ ID NO: 11621 - protein, 5 aa, Artificial Sequence
  Synthetic
WSGDR

SEQ ID NO: 11622 - protein, 5 aa, Artificial Sequence
  Synthetic
WDGGQ

SEQ ID NO: 11623 - protein, 5 aa, Artificial Sequence
  Synthetic
WSGGS

SEQ ID NO: 11624 - protein, 5 aa, Artificial Sequence
  Synthetic
RSGSV

SEQ ID NO: 11625 - protein, 4 aa, Artificial Sequence
  Synthetic
SGGS

SEQ ID NO: 11626 - protein, 4 aa, Artificial Sequence
  Synthetic
SGGT

SEQ ID NO: 11627 - protein, 5 aa, Artificial Sequence
  Synthetic
SSGGS

SEQ ID NO: 11628 - protein, 4 aa, Artificial Sequence
  Synthetic
YIFN

SEQ ID NO: 11629 - protein, 6 aa, Artificial Sequence
  Synthetic
SSGGGI

SEQ ID NO: 11630 - protein, 4 aa, Artificial Sequence
  Synthetic
SGGS

SEQ ID NO: 11631 - protein, 5 aa, Artificial Sequence
  Synthetic
EGGDR

SEQ ID NO: 11632 - protein, 5 aa, Artificial Sequence
  Synthetic
RTGSN

SEQ ID NO: 11633 - protein, 5 aa, Artificial Sequence
  Synthetic
FDYDM

SEQ ID NO: 11634 - protein, 5 aa, Artificial Sequence
  Synthetic
LDYDI

SEQ ID NO: 11635 - protein, 5 aa, Artificial Sequence
  Synthetic
WSGGN

SEQ ID NO: 11636 - protein, 5 aa, Artificial Sequence
  Synthetic
WSDGN

SEQ ID NO: 11637 - protein, 4 aa, Artificial Sequence
  Synthetic
SGGA

SEQ ID NO: 11638 - protein, 5 aa, Artificial Sequence
  Synthetic
WNGVK

SEQ ID NO: 11639 - protein, 5 aa, Artificial Sequence
  Synthetic
WSGYS

SEQ ID NO: 11640 - protein, 5 aa, Artificial Sequence
  Synthetic
WSGGR

SEQ ID NO: 11641 - protein, 5 aa, Artificial Sequence
  Synthetic
WTSGT

SEQ ID NO: 11642 - protein, 5 aa, Artificial Sequence
  Synthetic
RTGET

SEQ ID NO: 11643 - protein, 5 aa, Artificial Sequence
  Synthetic
WRGVS

SEQ ID NO: 11644 - protein, 5 aa, Artificial Sequence
  Synthetic
RNSGS

SEQ ID NO: 11645 - protein, 5 aa, Artificial Sequence
  Synthetic
WSGGT

SEQ ID NO: 11646 - protein, 4 aa, Artificial Sequence
  Synthetic
LDGR

SEQ ID NO: 11647 - protein, 5 aa, Artificial Sequence
  Synthetic
WSGGS

SEQ ID NO: 11648 - protein, 4 aa, Artificial Sequence
  Synthetic
GGGN

SEQ ID NO: 11649 - protein, 5 aa, Artificial Sequence
  Synthetic
RNSVG

SEQ ID NO: 11650 - protein, 5 aa, Artificial Sequence
  Synthetic
ASGGN

SEQ ID NO: 11651 - protein, 5 aa, Artificial Sequence
  Synthetic
WGGYS

SEQ ID NO: 11652 - protein, 4 aa, Artificial Sequence
  Synthetic
TGGS

SEQ ID NO: 11653 - protein, 5 aa, Artificial Sequence
  Synthetic
IGGGR

SEQ ID NO: 11654 - protein, 5 aa, Artificial Sequence
  Synthetic
ESGAD

SEQ ID NO: 11655 - protein, 5 aa, Artificial Sequence
  Synthetic
WRSSV

SEQ ID NO: 11656 - protein, 4 aa, Artificial Sequence
  Synthetic
GGGS

SEQ ID NO: 11657 - protein, 4 aa, Artificial Sequence
  Synthetic
DGGY

SEQ ID NO: 11658 - protein, 5 aa, Artificial Sequence
  Synthetic
PSGGA

SEQ ID NO: 11659 - protein, 4 aa, Artificial Sequence
  Synthetic
SAGR

SEQ ID NO: 11660 - protein, 5 aa, Artificial Sequence
  Synthetic
WRGSS

SEQ ID NO: 11661 - protein, 4 aa, Artificial Sequence
  Synthetic
RGGT

SEQ ID NO: 11662 - protein, 5 aa, Artificial Sequence
  Synthetic
WSGDT

SEQ ID NO: 11663 - protein, 5 aa, Artificial Sequence
  Synthetic
WGGDN

SEQ ID NO: 11664 - protein, 5 aa, Artificial Sequence
  Synthetic
RSGDV

SEQ ID NO: 11665 - protein, 5 aa, Artificial Sequence
  Synthetic
RGGKI

SEQ ID NO: 11666 - protein, 5 aa, Artificial Sequence
  Synthetic
WSGGT

SEQ ID NO: 11667 - protein, 5 aa, Artificial Sequence
  Synthetic
WSDAY

SEQ ID NO: 11668 - protein, 5 aa, Artificial Sequence
  Synthetic
WSGRN

SEQ ID NO: 11669 - protein, 5 aa, Artificial Sequence
  Synthetic
WSGKE

SEQ ID NO: 11670 - protein, 4 aa, Artificial Sequence
  Synthetic
LSGL

SEQ ID NO: 11671 - protein, 5 aa, Artificial Sequence
  Synthetic
WSGVT

SEQ ID NO: 11672 - protein, 4 aa, Artificial Sequence
  Synthetic
SRGI

SEQ ID NO: 11673 - protein, 5 aa, Artificial Sequence
  Synthetic
WSGKE

SEQ ID NO: 11674 - protein, 4 aa, Artificial Sequence
  Synthetic
RGGS

SEQ ID NO: 11675 - protein, 4 aa, Artificial Sequence
  Synthetic
SGGS

SEQ ID NO: 11676 - protein, 4 aa, Artificial Sequence
  Synthetic
SNGY

SEQ ID NO: 11677 - protein, 4 aa, Artificial Sequence
  Synthetic
PGGS

SEQ ID NO: 11678 - protein, 4 aa, Artificial Sequence
  Synthetic
RFGR

SEQ ID NO: 11679 - protein, 4 aa, Artificial Sequence
  Synthetic
SRGI

SEQ ID NO: 11680 - protein, 4 aa, Artificial Sequence
  Synthetic
SGGN

SEQ ID NO: 11681 - protein, 4 aa, Artificial Sequence
  Synthetic
SGGS

SEQ ID NO: 11682 - protein, 4 aa, Artificial Sequence
  Synthetic
DGGT

SEQ ID NO: 11683 - protein, 4 aa, Artificial Sequence
  Synthetic
RIFS

SEQ ID NO: 11684 - protein, 5 aa, Artificial Sequence
  Synthetic
WAGDI

SEQ ID NO: 11685 - protein, 4 aa, Artificial Sequence
  Synthetic
SGGT

SEQ ID NO: 11686 - protein, 4 aa, Artificial Sequence
  Synthetic
SLGT

SEQ ID NO: 11687 - protein, 4 aa, Artificial Sequence
  Synthetic
PRGT

SEQ ID NO: 11688 - protein, 4 aa, Artificial Sequence
  Synthetic
SGGS

SEQ ID NO: 11689 - protein, 5 aa, Artificial Sequence
  Synthetic
WSGDR

SEQ ID NO: 11690 - protein, 5 aa, Artificial Sequence
  Synthetic
YSSSS

SEQ ID NO: 11691 - protein, 5 aa, Artificial Sequence
  Synthetic
SSDGS

SEQ ID NO: 11692 - protein, 5 aa, Artificial Sequence
  Synthetic
SSDGT

SEQ ID NO: 11693 - protein, 5 aa, Artificial Sequence
  Synthetic
RSGET

SEQ ID NO: 11694 - protein, 5 aa, Artificial Sequence
  Synthetic
WRGGN

SEQ ID NO: 11695 - protein, 5 aa, Artificial Sequence
  Synthetic
WSRGS

SEQ ID NO: 11696 - protein, 5 aa, Artificial Sequence
  Synthetic
WSDGA

SEQ ID NO: 11697 - protein, 4 aa, Artificial Sequence
  Synthetic
EGGA

SEQ ID NO: 11698 - protein, 5 aa, Artificial Sequence
  Synthetic
KEYAK

SEQ ID NO: 11699 - protein, 4 aa, Artificial Sequence
  Synthetic
TGGA

SEQ ID NO: 11700 - protein, 4 aa, Artificial Sequence
  Synthetic
YLGR

SEQ ID NO: 11701 - protein, 5 aa, Artificial Sequence
  Synthetic
RSGTM

SEQ ID NO: 11702 - protein, 4 aa, Artificial Sequence
  Synthetic
RGGS

SEQ ID NO: 11703 - protein, 4 aa, Artificial Sequence
  Synthetic
SGGS

SEQ ID NO: 11704 - protein, 4 aa, Artificial Sequence
  Synthetic
VGGG

SEQ ID NO: 11705 - protein, 5 aa, Artificial Sequence
  Synthetic
WTDGS

SEQ ID NO: 11706 - protein, 4 aa, Artificial Sequence
  Synthetic
SRKI

SEQ ID NO: 11707 - protein, 4 aa, Artificial Sequence
  Synthetic
NDGR

SEQ ID NO: 11708 - protein, 5 aa, Artificial Sequence
  Synthetic
RSGTS

SEQ ID NO: 11709 - protein, 5 aa, Artificial Sequence
  Synthetic
TDVDS

SEQ ID NO: 11710 - protein, 4 aa, Artificial Sequence
  Synthetic
TGGG

SEQ ID NO: 11711 - protein, 5 aa, Artificial Sequence
  Synthetic
WSGGR

SEQ ID NO: 11712 - protein, 4 aa, Artificial Sequence
  Synthetic
KVGD

SEQ ID NO: 11713 - protein, 5 aa, Artificial Sequence
  Synthetic
ERGSL

SEQ ID NO: 11714 - protein, 4 aa, Artificial Sequence
  Synthetic
NNGG

SEQ ID NO: 11715 - protein, 4 aa, Artificial Sequence
  Synthetic
WSGG

SEQ ID NO: 11716 - protein, 4 aa, Artificial Sequence
  Synthetic
AGGL

SEQ ID NO: 11717 - protein, 4 aa, Artificial Sequence
  Synthetic
GDGR

SEQ ID NO: 11718 - protein, 4 aa, Artificial Sequence
  Synthetic
RTGS

SEQ ID NO: 11719 - protein, 4 aa, Artificial Sequence
  Synthetic
NDGS

SEQ ID NO: 11720 - protein, 4 aa, Artificial Sequence
  Synthetic
YSGS

SEQ ID NO: 11721 - protein, 4 aa, Artificial Sequence
  Synthetic
RGSS

SEQ ID NO: 11722 - protein, 4 aa, Artificial Sequence
  Synthetic
SNGN

SEQ ID NO: 11723 - protein, 4 aa, Artificial Sequence
  Synthetic
NGIY

SEQ ID NO: 11724 - protein, 4 aa, Artificial Sequence
  Synthetic
NRGT

SEQ ID NO: 11725 - protein, 4 aa, Artificial Sequence
  Synthetic
SDDR

SEQ ID NO: 11726 - protein, 7 aa, Artificial Sequence
  Synthetic
TSTTTNY

SEQ ID NO: 11727 - protein, 5 aa, Artificial Sequence
  Synthetic
FLGHT

SEQ ID NO: 11728 - protein, 4 aa, Artificial Sequence
  Synthetic
SSSS

SEQ ID NO: 11729 - protein, 4 aa, Artificial Sequence
  Synthetic
NKGS

SEQ ID NO: 11730 - protein, 4 aa, Artificial Sequence
  Synthetic
WNGN

SEQ ID NO: 11731 - protein, 4 aa, Artificial Sequence
  Synthetic
NDRR

SEQ ID NO: 11732 - protein, 5 aa, Artificial Sequence
  Synthetic
RSGRG

SEQ ID NO: 11733 - protein, 5 aa, Artificial Sequence
  Synthetic
SSGGA

SEQ ID NO: 11734 - protein, 4 aa, Artificial Sequence
  Synthetic
SGGS

SEQ ID NO: 11735 - protein, 4 aa, Artificial Sequence
  Synthetic
SAGI

SEQ ID NO: 11736 - protein, 5 aa, Artificial Sequence
  Synthetic
SSDGT

SEQ ID NO: 11737 - protein, 5 aa, Artificial Sequence
  Synthetic
WSGGF

SEQ ID NO: 11738 - protein, 4 aa, Artificial Sequence
  Synthetic
VDGG

SEQ ID NO: 11739 - protein, 4 aa, Artificial Sequence
  Synthetic
SGGA

SEQ ID NO: 11740 - protein, 5 aa, Artificial Sequence
  Synthetic
DNGGI

SEQ ID NO: 11741 - protein, 5 aa, Artificial Sequence
  Synthetic
WSGGT

SEQ ID NO: 11742 - protein, 8 aa, Artificial Sequence
  Synthetic
HSGGHSGG

SEQ ID NO: 11743 - protein, 5 aa, Artificial Sequence
  Synthetic
RHGDT

SEQ ID NO: 11744 - protein, 5 aa, Artificial Sequence
  Synthetic
TYRAN

SEQ ID NO: 11745 - protein, 5 aa, Artificial Sequence
  Synthetic
YNVGS

SEQ ID NO: 11746 - protein, 5 aa, Artificial Sequence
  Synthetic
WSGGR

SEQ ID NO: 11747 - protein, 5 aa, Artificial Sequence
  Synthetic
WHDSH

SEQ ID NO: 11748 - protein, 4 aa, Artificial Sequence
  Synthetic
SGGI

SEQ ID NO: 11749 - protein, 5 aa, Artificial Sequence
  Synthetic
ATAGR

SEQ ID NO: 11750 - protein, 5 aa, Artificial Sequence
  Synthetic
GEDDT

SEQ ID NO: 11751 - protein, 5 aa, Artificial Sequence
  Synthetic
RDSRF

SEQ ID NO: 11752 - protein, 5 aa, Artificial Sequence
  Synthetic
TSDGY

SEQ ID NO: 11753 - protein, 5 aa, Artificial Sequence
  Synthetic
GTTRS

SEQ ID NO: 11754 - protein, 5 aa, Artificial Sequence
  Synthetic
RGGKI

SEQ ID NO: 11755 - protein, 5 aa, Artificial Sequence
  Synthetic
WSGDS

SEQ ID NO: 11756 - protein, 5 aa, Artificial Sequence
  Synthetic
WSGGS

SEQ ID NO: 11757 - protein, 4 aa, Artificial Sequence
  Synthetic
RSGL

SEQ ID NO: 11758 - protein, 5 aa, Artificial Sequence
  Synthetic
SRDGS

SEQ ID NO: 11759 - protein, 5 aa, Artificial Sequence
  Synthetic
RSGGS

SEQ ID NO: 11760 - protein, 5 aa, Artificial Sequence
  Synthetic
WSGSS

SEQ ID NO: 11761 - protein, 4 aa, Artificial Sequence
  Synthetic
WNDG

SEQ ID NO: 11762 - protein, 5 aa, Artificial Sequence
  Synthetic
VDGTS

SEQ ID NO: 11763 - protein, 5 aa, Artificial Sequence
  Synthetic
GSDGR

SEQ ID NO: 11764 - protein, 4 aa, Artificial Sequence
  Synthetic
NDGS

SEQ ID NO: 11765 - protein, 5 aa, Artificial Sequence
  Synthetic
WDGGM

SEQ ID NO: 11766 - protein, 5 aa, Artificial Sequence
  Synthetic
ASGRR

SEQ ID NO: 11767 - protein, 5 aa, Artificial Sequence
  Synthetic
NGEGN

SEQ ID NO: 11768 - protein, 5 aa, Artificial Sequence
  Synthetic
RSGGG

SEQ ID NO: 11769 - protein, 5 aa, Artificial Sequence
  Synthetic
NNDGR

SEQ ID NO: 11770 - protein, 5 aa, Artificial Sequence
  Synthetic
WSNEN

SEQ ID NO: 11771 - protein, 5 aa, Artificial Sequence
  Synthetic
WSDSS

SEQ ID NO: 11772 - protein, 4 aa, Artificial Sequence
  Synthetic
SDGS

SEQ ID NO: 11773 - protein, 8 aa, Artificial Sequence
  Synthetic
PGNGITFN

SEQ ID NO: 11774 - protein, 5 aa, Artificial Sequence
  Synthetic
WMDDR

SEQ ID NO: 11775 - protein, 5 aa, Artificial Sequence
  Synthetic
SGGGS

SEQ ID NO: 11776 - protein, 5 aa, Artificial Sequence
  Synthetic
WSGTI

SEQ ID NO: 11777 - protein, 4 aa, Artificial Sequence
  Synthetic
SGGS

SEQ ID NO: 11778 - protein, 4 aa, Artificial Sequence
  Synthetic
DGGS

SEQ ID NO: 11779 - protein, 4 aa, Artificial Sequence
  Synthetic
SGGG

SEQ ID NO: 11780 - protein, 4 aa, Artificial Sequence
  Synthetic
YGGS

SEQ ID NO: 11781 - protein, 4 aa, Artificial Sequence
  Synthetic
NVGI

SEQ ID NO: 11782 - protein, 4 aa, Artificial Sequence
  Synthetic
SRGN

SEQ ID NO: 11783 - protein, 4 aa, Artificial Sequence
  Synthetic
SGGF

SEQ ID NO: 11784 - protein, 5 aa, Artificial Sequence
  Synthetic
GYGTS

SEQ ID NO: 11785 - protein, 4 aa, Artificial Sequence
  Synthetic
TGGT

SEQ ID NO: 11786 - protein, 5 aa, Artificial Sequence
  Synthetic
AGGGS

SEQ ID NO: 11787 - protein, 4 aa, Artificial Sequence
  Synthetic
SGGS

SEQ ID NO: 11788 - protein, 4 aa, Artificial Sequence
  Synthetic
IGGT

SEQ ID NO: 11789 - protein, 5 aa, Artificial Sequence
  Synthetic
GTGSI

SEQ ID NO: 11790 - protein, 5 aa, Artificial Sequence
  Synthetic
WTGAI

SEQ ID NO: 11791 - protein, 4 aa, Artificial Sequence
  Synthetic
IGGT

SEQ ID NO: 11792 - protein, 5 aa, Artificial Sequence
  Synthetic
GSGKL

SEQ ID NO: 11793 - protein, 5 aa, Artificial Sequence
  Synthetic
GTGGS

SEQ ID NO: 11794 - protein, 4 aa, Artificial Sequence
  Synthetic
GSGG

SEQ ID NO: 11795 - protein, 4 aa, Artificial Sequence
  Synthetic
WIAN

SEQ ID NO: 11796 - protein, 5 aa, Artificial Sequence
  Synthetic
SSGGY

SEQ ID NO: 11797 - protein, 5 aa, Artificial Sequence
  Synthetic
SSGEY

SEQ ID NO: 11798 - protein, 5 aa, Artificial Sequence
  Synthetic
SSGDY

SEQ ID NO: 11799 - protein, 5 aa, Artificial Sequence
  Synthetic
WSDSG

SEQ ID NO: 11800 - protein, 4 aa, Artificial Sequence
  Synthetic
STGS

SEQ ID NO: 11801 - protein, 4 aa, Artificial Sequence
  Synthetic
SGGY

SEQ ID NO: 11802 - protein, 5 aa, Artificial Sequence
  Synthetic
WSSGN

SEQ ID NO: 11803 - protein, 5 aa, Artificial Sequence
  Synthetic
LSGGN

SEQ ID NO: 11804 - protein, 4 aa, Artificial Sequence
  Synthetic
WIDN

SEQ ID NO: 11805 - protein, 5 aa, Artificial Sequence
  Synthetic
WSGGY

SEQ ID NO: 11806 - protein, 4 aa, Artificial Sequence
  Synthetic
SGGR

SEQ ID NO: 11807 - protein, 4 aa, Artificial Sequence
  Synthetic
YGGG

SEQ ID NO: 11808 - protein, 4 aa, Artificial Sequence
  Synthetic
YNGG

SEQ ID NO: 11809 - protein, 4 aa, Artificial Sequence
  Synthetic
YGGG

SEQ ID NO: 11810 - protein, 4 aa, Artificial Sequence
  Synthetic
SDYN

SEQ ID NO: 11811 - protein, 5 aa, Artificial Sequence
  Synthetic
RGGGS

SEQ ID NO: 11812 - protein, 5 aa, Artificial Sequence
  Synthetic
RGGGS

SEQ ID NO: 11813 - protein, 5 aa, Artificial Sequence
  Synthetic
WDSAR

SEQ ID NO: 11814 - protein, 5 aa, Artificial Sequence
  Synthetic
WSGKE

SEQ ID NO: 11815 - protein, 5 aa, Artificial Sequence
  Synthetic
WGSAG

SEQ ID NO: 11816 - protein, 4 aa, Artificial Sequence
  Synthetic
SGGS

SEQ ID NO: 11817 - protein, 5 aa, Artificial Sequence
  Synthetic
TRGGR

SEQ ID NO: 11818 - protein, 5 aa, Artificial Sequence
  Synthetic
WSSDT

SEQ ID NO: 11819 - protein, 5 aa, Artificial Sequence
  Synthetic
RSGTL

SEQ ID NO: 11820 - protein, 5 aa, Artificial Sequence
  Synthetic
QSGAA

SEQ ID NO: 11821 - protein, 5 aa, Artificial Sequence
  Synthetic
WSGGT

SEQ ID NO: 11822 - protein, 4 aa, Artificial Sequence
  Synthetic
SGGS

SEQ ID NO: 11823 - protein, 5 aa, Artificial Sequence
  Synthetic
WTGGL

SEQ ID NO: 11824 - protein, 5 aa, Artificial Sequence
  Synthetic
RSGGL

SEQ ID NO: 11825 - protein, 4 aa, Artificial Sequence
  Synthetic
NEGR

SEQ ID NO: 11826 - protein, 5 aa, Artificial Sequence
  Synthetic
WSGGT

SEQ ID NO: 11827 - protein, 4 aa, Artificial Sequence
  Synthetic
RSGS

SEQ ID NO: 11828 - protein, 5 aa, Artificial Sequence
  Synthetic
SKGGS

SEQ ID NO: 11829 - protein, 5 aa, Artificial Sequence
  Synthetic
RQSNL

SEQ ID NO: 11830 - protein, 4 aa, Artificial Sequence
  Synthetic
SAGT

SEQ ID NO: 11831 - protein, 5 aa, Artificial Sequence
  Synthetic
RNGAN

SEQ ID NO: 11832 - protein, 4 aa, Artificial Sequence
  Synthetic
TNNN

SEQ ID NO: 11833 - protein, 5 aa, Artificial Sequence
  Synthetic
WGGST

SEQ ID NO: 11834 - protein, 5 aa, Artificial Sequence
  Synthetic
WSGSN

SEQ ID NO: 11835 - protein, 5 aa, Artificial Sequence
  Synthetic
GSGRS

SEQ ID NO: 11836 - protein, 5 aa, Artificial Sequence
  Synthetic
SSGQY

SEQ ID NO: 11837 - protein, 5 aa, Artificial Sequence
  Synthetic
WSGGS

SEQ ID NO: 11838 - protein, 5 aa, Artificial Sequence
  Synthetic
QTGSH

SEQ ID NO: 11839 - protein, 5 aa, Artificial Sequence
  Synthetic
WGGGL

SEQ ID NO: 11840 - protein, 5 aa, Artificial Sequence
  Synthetic
WGGGL

SEQ ID NO: 11841 - protein, 4 aa, Artificial Sequence
  Synthetic
TTGT

SEQ ID NO: 11842 - protein, 5 aa, Artificial Sequence
  Synthetic
SSGDK

SEQ ID NO: 11843 - protein, 5 aa, Artificial Sequence
  Synthetic
WRGDS

SEQ ID NO: 11844 - protein, 5 aa, Artificial Sequence
  Synthetic
WSGGY

SEQ ID NO: 11845 - protein, 5 aa, Artificial Sequence
  Synthetic
WSSGS

SEQ ID NO: 11846 - protein, 5 aa, Artificial Sequence
  Synthetic
DSDGR

SEQ ID NO: 11847 - protein, 4 aa, Artificial Sequence
  Synthetic
SVGD

SEQ ID NO: 11848 - protein, 5 aa, Artificial Sequence
  Synthetic
RSGGD

SEQ ID NO: 11849 - protein, 5 aa, Artificial Sequence
  Synthetic
STGRT

SEQ ID NO: 11850 - protein, 5 aa, Artificial Sequence
  Synthetic
STGTS

SEQ ID NO: 11851 - protein, 4 aa, Artificial Sequence
  Synthetic
WGGT

SEQ ID NO: 11852 - protein, 5 aa, Artificial Sequence
  Synthetic
WSGGN

SEQ ID NO: 11853 - protein, 4 aa, Artificial Sequence
  Synthetic
ISGY

SEQ ID NO: 11854 - protein, 4 aa, Artificial Sequence
  Synthetic
SYGD

SEQ ID NO: 11855 - protein, 9 aa, Artificial Sequence
  Synthetic
RDAAGYADS

SEQ ID NO: 11856 - protein, 5 aa, Artificial Sequence
  Synthetic
SGGGG

SEQ ID NO: 11857 - protein, 5 aa, Artificial Sequence
  Synthetic
WSGGS

SEQ ID NO: 11858 - protein, 5 aa, Artificial Sequence
  Synthetic
WSGTT

SEQ ID NO: 11859 - protein, 8 aa, Artificial Sequence
  Synthetic
AAPGTAYY

SEQ ID NO: 11860 - protein, 4 aa, Artificial Sequence
  Synthetic
TSGI

SEQ ID NO: 11861 - protein, 5 aa, Artificial Sequence
  Synthetic
TRGGI

SEQ ID NO: 11862 - protein, 4 aa, Artificial Sequence
  Synthetic
RDGN

SEQ ID NO: 11863 - protein, 4 aa, Artificial Sequence
  Synthetic
SGGG

SEQ ID NO: 11864 - protein, 4 aa, Artificial Sequence
  Synthetic
SGGS

SEQ ID NO: 11865 - protein, 5 aa, Artificial Sequence
  Synthetic
WTGAN

SEQ ID NO: 11866 - protein, 5 aa, Artificial Sequence
  Synthetic
RSGGK

SEQ ID NO: 11867 - protein, 4 aa, Artificial Sequence
  Synthetic
IDGR

SEQ ID NO: 11868 - protein, 5 aa, Artificial Sequence
  Synthetic
WVGAS

SEQ ID NO: 11869 - protein, 5 aa, Artificial Sequence
  Synthetic
WSSGT

SEQ ID NO: 11870 - protein, 4 aa, Artificial Sequence
  Synthetic
PQGV

SEQ ID NO: 11871 - protein, 4 aa, Artificial Sequence
  Synthetic
SGST

SEQ ID NO: 11872 - protein, 4 aa, Artificial Sequence
  Synthetic
SFGS

SEQ ID NO: 11873 - protein, 4 aa, Artificial Sequence
  Synthetic
TGGA

SEQ ID NO: 11874 - protein, 5 aa, Artificial Sequence
  Synthetic
SSGGT

SEQ ID NO: 11875 - protein, 5 aa, Artificial Sequence
  Synthetic
SVGGS

SEQ ID NO: 11876 - protein, 4 aa, Artificial Sequence
  Synthetic
SGGS

SEQ ID NO: 11877 - protein, 5 aa, Artificial Sequence
  Synthetic
PGTEK

SEQ ID NO: 11878 - protein, 5 aa, Artificial Sequence
  Synthetic
WRGYN

SEQ ID NO: 11879 - protein, 5 aa, Artificial Sequence
  Synthetic
WSSGN

SEQ ID NO: 11880 - protein, 4 aa, Artificial Sequence
  Synthetic
SGGT

SEQ ID NO: 11881 - protein, 5 aa, Artificial Sequence
  Synthetic
IRAGI

SEQ ID NO: 11882 - protein, 4 aa, Artificial Sequence
  Synthetic
SGGS

SEQ ID NO: 11883 - protein, 5 aa, Artificial Sequence
  Synthetic
GSGGS

SEQ ID NO: 11884 - protein, 4 aa, Artificial Sequence
  Synthetic
KGFD

SEQ ID NO: 11885 - protein, 5 aa, Artificial Sequence
  Synthetic
WSGGS

SEQ ID NO: 11886 - protein, 5 aa, Artificial Sequence
  Synthetic
WRGGN

SEQ ID NO: 11887 - protein, 5 aa, Artificial Sequence
  Synthetic
GGDMS

SEQ ID NO: 11888 - protein, 5 aa, Artificial Sequence
  Synthetic
GEYGS

SEQ ID NO: 11889 - protein, 4 aa, Artificial Sequence
  Synthetic
SGGN

SEQ ID NO: 11890 - protein, 5 aa, Artificial Sequence
  Synthetic
WTGSG

SEQ ID NO: 11891 - protein, 4 aa, Artificial Sequence
  Synthetic
NEGS

SEQ ID NO: 11892 - protein, 5 aa, Artificial Sequence
  Synthetic
WSASS

SEQ ID NO: 11893 - protein, 5 aa, Artificial Sequence
  Synthetic
RSGGS

SEQ ID NO: 11894 - protein, 4 aa, Artificial Sequence
  Synthetic
REGS

SEQ ID NO: 11895 - protein, 4 aa, Artificial Sequence
  Synthetic
FGGD

SEQ ID NO: 11896 - protein, 5 aa, Artificial Sequence
  Synthetic
WADGT

SEQ ID NO: 11897 - protein, 5 aa, Artificial Sequence
  Synthetic
WNAVS

SEQ ID NO: 11898 - protein, 5 aa, Artificial Sequence
  Synthetic
WSGGS

SEQ ID NO: 11899 - protein, 4 aa, Artificial Sequence
  Synthetic
SGGS

SEQ ID NO: 11900 - protein, 4 aa, Artificial Sequence
  Synthetic
SGDT

SEQ ID NO: 11901 - protein, 6 aa, Artificial Sequence
  Synthetic
SSSDGF

SEQ ID NO: 11902 - protein, 5 aa, Artificial Sequence
  Synthetic
AGGGV

SEQ ID NO: 11903 - protein, 5 aa, Artificial Sequence
  Synthetic
WSGGS

SEQ ID NO: 11904 - protein, 5 aa, Artificial Sequence
  Synthetic
RFGFP

SEQ ID NO: 11905 - protein, 5 aa, Artificial Sequence
  Synthetic
SAGGS

SEQ ID NO: 11906 - protein, 4 aa, Artificial Sequence
  Synthetic
SDVS

SEQ ID NO: 11907 - protein, 4 aa, Artificial Sequence
  Synthetic
SVGS

SEQ ID NO: 11908 - protein, 9 aa, Artificial Sequence
  Synthetic
RINSGSGAR

SEQ ID NO: 11909 - protein, 4 aa, Artificial Sequence
  Synthetic
SAGM

SEQ ID NO: 11910 - protein, 4 aa, Artificial Sequence
  Synthetic
DDGS

SEQ ID NO: 11911 - protein, 4 aa, Artificial Sequence
  Synthetic
SDRS

SEQ ID NO: 11912 - protein, 5 aa, Artificial Sequence
  Synthetic
AVGLV

SEQ ID NO: 11913 - protein, 5 aa, Artificial Sequence
  Synthetic
THDGN

SEQ ID NO: 11914 - protein, 5 aa, Artificial Sequence
  Synthetic
WGGVI

SEQ ID NO: 11915 - protein, 5 aa, Artificial Sequence
  Synthetic
DAGGN

SEQ ID NO: 11916 - protein, 6 aa, Artificial Sequence
  Synthetic
SYSGSI

SEQ ID NO: 11917 - protein, 7 aa, Artificial Sequence
  Synthetic
CSGGGGG

SEQ ID NO: 11918 - protein, 5 aa, Artificial Sequence
  Synthetic
WSDST

SEQ ID NO: 11919 - protein, 5 aa, Artificial Sequence
  Synthetic
WSGMT

SEQ ID NO: 11920 - protein, 4 aa, Artificial Sequence
  Synthetic
EAGT

SEQ ID NO: 11921 - protein, 5 aa, Artificial Sequence
  Synthetic
WSGRR

SEQ ID NO: 11922 - protein, 7 aa, Artificial Sequence
  Synthetic
SNGNGGS

SEQ ID NO: 11923 - protein, 4 aa, Artificial Sequence
  Synthetic
RSNY

SEQ ID NO: 11924 - protein, 4 aa, Artificial Sequence
  Synthetic
SGGG

SEQ ID NO: 11925 - protein, 5 aa, Artificial Sequence
  Synthetic
VGNAW

SEQ ID NO: 11926 - protein, 5 aa, Artificial Sequence
  Synthetic
WIGGA

SEQ ID NO: 11927 - protein, 4 aa, Artificial Sequence
  Synthetic
GGGV

SEQ ID NO: 11928 - protein, 4 aa, Artificial Sequence
  Synthetic
NRGT

SEQ ID NO: 11929 - protein, 5 aa, Artificial Sequence
  Synthetic
NRGGH

SEQ ID NO: 11930 - protein, 5 aa, Artificial Sequence
  Synthetic
IRDGS

SEQ ID NO: 11931 - protein, 8 aa, Artificial Sequence
  Synthetic
GVPHGEDH

SEQ ID NO: 11932 - protein, 5 aa, Artificial Sequence
  Synthetic
TTGDF

SEQ ID NO: 11933 - protein, 5 aa, Artificial Sequence
  Synthetic
HSGDL

SEQ ID NO: 11934 - protein, 5 aa, Artificial Sequence
  Synthetic
SSGGT

SEQ ID NO: 11935 - protein, 5 aa, Artificial Sequence
  Synthetic
SSGGT

SEQ ID NO: 11936 - protein, 8 aa, Artificial Sequence
  Synthetic
TLGSRGIT

SEQ ID NO: 11937 - protein, 5 aa, Artificial Sequence
  Synthetic
SSGEN

SEQ ID NO: 11938 - protein, 4 aa, Artificial Sequence
  Synthetic
RSGN

SEQ ID NO: 11939 - protein, 5 aa, Artificial Sequence
  Synthetic
DSGGS

SEQ ID NO: 11940 - protein, 4 aa, Artificial Sequence
  Synthetic
SYGS

SEQ ID NO: 11941 - protein, 4 aa, Artificial Sequence
  Synthetic
DEHR

SEQ ID NO: 11942 - protein, 5 aa, Artificial Sequence
  Synthetic
SSGGG

SEQ ID NO: 11943 - protein, 4 aa, Artificial Sequence
  Synthetic
SNGN

SEQ ID NO: 11944 - protein, 5 aa, Artificial Sequence
  Synthetic
SSDGS

SEQ ID NO: 11945 - protein, 5 aa, Artificial Sequence
  Synthetic
ATSSL

SEQ ID NO: 11946 - protein, 4 aa, Artificial Sequence
  Synthetic
SGGS

SEQ ID NO: 11947 - protein, 4 aa, Artificial Sequence
  Synthetic
NIGR

SEQ ID NO: 11948 - protein, 5 aa, Artificial Sequence
  Synthetic
WIDGS

SEQ ID NO: 11949 - protein, 5 aa, Artificial Sequence
  Synthetic
QIIGS

SEQ ID NO: 11950 - protein, 5 aa, Artificial Sequence
  Synthetic
SNGGT

SEQ ID NO: 11951 - protein, 5 aa, Artificial Sequence
  Synthetic
WIGGF

SEQ ID NO: 11952 - protein, 4 aa, Artificial Sequence
  Synthetic
SSGK

SEQ ID NO: 11953 - protein, 5 aa, Artificial Sequence
  Synthetic
WLGGR

SEQ ID NO: 11954 - protein, 5 aa, Artificial Sequence
  Synthetic
KSGTA

SEQ ID NO: 11955 - protein, 5 aa, Artificial Sequence
  Synthetic
GVGGS

SEQ ID NO: 11956 - protein, 5 aa, Artificial Sequence
  Synthetic
WIGGS

SEQ ID NO: 11957 - protein, 5 aa, Artificial Sequence
  Synthetic
SSRGT

SEQ ID NO: 11958 - protein, 5 aa, Artificial Sequence
  Synthetic
WRGGG

SEQ ID NO: 11959 - protein, 8 aa, Artificial Sequence
  Synthetic
WNGNGGNG

SEQ ID NO: 11960 - protein, 5 aa, Artificial Sequence
  Synthetic
WSGGS

SEQ ID NO: 11961 - protein, 4 aa, Artificial Sequence
  Synthetic
TDGS

SEQ ID NO: 11962 - protein, 4 aa, Artificial Sequence
  Synthetic
PDGT

SEQ ID NO: 11963 - protein, 4 aa, Artificial Sequence
  Synthetic
SGDG

SEQ ID NO: 11964 - protein, 4 aa, Artificial Sequence
  Synthetic
NRGA

SEQ ID NO: 11965 - protein, 4 aa, Artificial Sequence
  Synthetic
TDGR

SEQ ID NO: 11966 - protein, 5 aa, Artificial Sequence
  Synthetic
RSGVN

SEQ ID NO: 11967 - protein, 4 aa, Artificial Sequence
  Synthetic
ARGT

SEQ ID NO: 11968 - protein, 4 aa, Artificial Sequence
  Synthetic
SRGT

SEQ ID NO: 11969 - protein, 5 aa, Artificial Sequence
  Synthetic
SATGI

SEQ ID NO: 11970 - protein, 4 aa, Artificial Sequence
  Synthetic
SGPS

SEQ ID NO: 11971 - protein, 4 aa, Artificial Sequence
  Synthetic
PGGL

SEQ ID NO: 11972 - protein, 5 aa, Artificial Sequence
  Synthetic
GAGIT

SEQ ID NO: 11973 - protein, 4 aa, Artificial Sequence
  Synthetic
SDGQ

SEQ ID NO: 11974 - protein, 4 aa, Artificial Sequence
  Synthetic
TAGS

SEQ ID NO: 11975 - protein, 4 aa, Artificial Sequence
  Synthetic
SGGT

SEQ ID NO: 11976 - protein, 5 aa, Artificial Sequence
  Synthetic
ANGVP

SEQ ID NO: 11977 - protein, 5 aa, Artificial Sequence
  Synthetic
VADGT

SEQ ID NO: 11978 - protein, 5 aa, Artificial Sequence
  Synthetic
RSGAI

SEQ ID NO: 11979 - protein, 5 aa, Artificial Sequence
  Synthetic
RSGSN

SEQ ID NO: 11980 - protein, 5 aa, Artificial Sequence
  Synthetic
WSGHN

SEQ ID NO: 11981 - protein, 5 aa, Artificial Sequence
  Synthetic
WTDDN

SEQ ID NO: 11982 - protein, 4 aa, Artificial Sequence
  Synthetic
GDGS

SEQ ID NO: 11983 - protein, 5 aa, Artificial Sequence
  Synthetic
SFGDT

SEQ ID NO: 11984 - protein, 5 aa, Artificial Sequence
  Synthetic
RNGGK

SEQ ID NO: 11985 - protein, 5 aa, Artificial Sequence
  Synthetic
WNGLR

SEQ ID NO: 11986 - protein, 5 aa, Artificial Sequence
  Synthetic
RNGHI

SEQ ID NO: 11987 - protein, 5 aa, Artificial Sequence
  Synthetic
SSGHV

SEQ ID NO: 11988 - protein, 4 aa, Artificial Sequence
  Synthetic
WIGD

SEQ ID NO: 11989 - protein, 5 aa, Artificial Sequence
  Synthetic
WSGKR

SEQ ID NO: 11990 - protein, 4 aa, Artificial Sequence
  Synthetic
SGGT

SEQ ID NO: 11991 - protein, 4 aa, Artificial Sequence
  Synthetic
NIGE

SEQ ID NO: 11992 - protein, 5 aa, Artificial Sequence
  Synthetic
WTGNS

SEQ ID NO: 11993 - protein, 5 aa, Artificial Sequence
  Synthetic
TDGGR

SEQ ID NO: 11994 - protein, 4 aa, Artificial Sequence
  Synthetic
NTGI

SEQ ID NO: 11995 - protein, 5 aa, Artificial Sequence
  Synthetic
WSASS

SEQ ID NO: 11996 - protein, 4 aa, Artificial Sequence
  Synthetic
NTGS

SEQ ID NO: 11997 - protein, 5 aa, Artificial Sequence
  Synthetic
SFGTN

SEQ ID NO: 11998 - protein, 7 aa, Artificial Sequence
  Synthetic
NGGLRDY

SEQ ID NO: 11999 - protein, 4 aa, Artificial Sequence
  Synthetic
SGGR

SEQ ID NO: 12000 - skipped

SEQ ID NO: 12001 - protein, 4 aa, Artificial Sequence
  Synthetic
NDGL

SEQ ID NO: 12002 - protein, 5 aa, Artificial Sequence
  Synthetic
SSGGS

SEQ ID NO: 12003 - protein, 8 aa, Artificial Sequence
  Synthetic
WGVDDAYY

SEQ ID NO: 12004 - protein, 4 aa, Artificial Sequence
  Synthetic
NYGR

SEQ ID NO: 12005 - protein, 5 aa, Artificial Sequence
  Synthetic
SRNDI

SEQ ID NO: 12006 - protein, 5 aa, Artificial Sequence
  Synthetic
SRNDI

SEQ ID NO: 12007 - protein, 10 aa, Artificial Sequence
  Synthetic
WSVDGDATYY

SEQ ID NO: 12008 - protein, 5 aa, Artificial Sequence
  Synthetic
WRGDV

SEQ ID NO: 12009 - protein, 5 aa, Artificial Sequence
  Synthetic
WSTNN

SEQ ID NO: 12010 - protein, 5 aa, Artificial Sequence
  Synthetic
HTGEN

SEQ ID NO: 12011 - protein, 5 aa, Artificial Sequence
  Synthetic
RSISL

SEQ ID NO: 12012 - protein, 4 aa, Artificial Sequence
  Synthetic
SGGS

SEQ ID NO: 12013 - protein, 4 aa, Artificial Sequence
  Synthetic
NIGG

SEQ ID NO: 12014 - protein, 5 aa, Artificial Sequence
  Synthetic
LSGAG

SEQ ID NO: 12015 - protein, 5 aa, Artificial Sequence
  Synthetic
TTGTF

SEQ ID NO: 12016 - protein, 4 aa, Artificial Sequence
  Synthetic
SGGR

SEQ ID NO: 12017 - protein, 5 aa, Artificial Sequence
  Synthetic
STNEI

SEQ ID NO: 12018 - protein, 5 aa, Artificial Sequence
  Synthetic
WTGDS

SEQ ID NO: 12019 - protein, 5 aa, Artificial Sequence
  Synthetic
SHDGN

SEQ ID NO: 12020 - protein, 8 aa, Artificial Sequence
  Synthetic
WNGNGGNG

SEQ ID NO: 12021 - protein, 4 aa, Artificial Sequence
  Synthetic
SGGT

SEQ ID NO: 12022 - protein, 5 aa, Artificial Sequence
  Synthetic
GGGSA

SEQ ID NO: 12023 - protein, 5 aa, Artificial Sequence
  Synthetic
SSDGS

SEQ ID NO: 12024 - protein, 4 aa, Artificial Sequence
  Synthetic
SGGS

SEQ ID NO: 12025 - protein, 5 aa, Artificial Sequence
  Synthetic
WSGGS

SEQ ID NO: 12026 - protein, 5 aa, Artificial Sequence
  Synthetic
WSGGS

SEQ ID NO: 12027 - protein, 5 aa, Artificial Sequence
  Synthetic
WSGGS

SEQ ID NO: 12028 - protein, 5 aa, Artificial Sequence
  Synthetic
WSGGS

SEQ ID NO: 12029 - protein, 5 aa, Artificial Sequence
  Synthetic
SSDGS

SEQ ID NO: 12030 - protein, 41 aa, Artificial Sequence; identical to SEQ ID NO: 7095
  Synthetic

SEQ ID NO: 12031 - protein, 41 aa, Artificial Sequence
  Synthetic
TYYADSVKGRFTISQDNAKNTVYLQMNNLKPEDTAMYYCAA

SEQ ID NO: 12032 - protein, 41 aa, Artificial Sequence; identical to SEQ ID NO: 7062
  Synthetic

SEQ ID NO: 12033 - protein, 41 aa, Artificial Sequence
  Synthetic
ANYTDSVRGRFTISRDNTKNMVYLQMNSLKPEDTAVYYCNV

SEQ ID NO: 12034 - protein, 41 aa, Artificial Sequence
  Synthetic
ATYADSVKGRFTISRDNAKNTIYLQMNSLKPEDTAVYYCKT

SEQ ID NO: 12035 - protein, 41 aa, Artificial Sequence; identical to SEQ ID NO: 7111
  Synthetic

SEQ ID NO: 12036 - protein, 41 aa, Artificial Sequence
  Synthetic
TYLADSVKGRFTISQNNAKSTVYLQMNSLKPEDTAMYYCAA

SEQ ID NO: 12037 - protein, 41 aa, Artificial Sequence
  Synthetic
TYYMDSVKGRFTISRDKGKNTVYLQMDSLKPEDTAVYYCTA

SEQ ID NO: 12038 - protein, 41 aa, Artificial Sequence; identical to SEQ ID NO: 7092
  Synthetic

SEQ ID NO: 12039 - protein, 41 aa, Artificial Sequence; identical to SEQ ID NO: 7338
  Synthetic

SEQ ID NO: 12040 - protein, 41 aa, Artificial Sequence; identical to SEQ ID NO: 7337
  Synthetic

SEQ ID NO: 12041 - protein, 41 aa, Artificial Sequence; identical to SEQ ID NO: 7111
  Synthetic

SEQ ID NO: 12042 - protein, 41 aa, Artificial Sequence
  Synthetic
TNYADSVKGRFTISRDNAKGTVNLTMNSLKPEDTAVYYCNR

SEQ ID NO: 12043 - protein, 41 aa, Artificial Sequence
  Synthetic
TNYADSVEGRFTISRDYAKNTVYLQMNSLKPEDTAVYYCHS

SEQ ID NO: 12044 - protein, 41 aa, Artificial Sequence
  Synthetic
TNYADSVKGRFTISRDNAKNMMFLQMRSLLPENTAVYYCHA

SEQ ID NO: 12045 - protein, 41 aa, Artificial Sequence
  Synthetic
TNYADSVKGRFTIYRDNAKNTVYLQMNSLKPEDTAVYYCNA

SEQ ID NO: 12046 - protein, 41 aa, Artificial Sequence; identical to SEQ ID NO: 7315
  Synthetic

SEQ ID NO: 12047 - protein, 41 aa, Artificial Sequence
  Synthetic
TSYADSVKGRFTISRDNAKNTVYLQMNSLKPEDTAVYYCAM

SEQ ID NO: 12048 - protein, 41 aa, Artificial Sequence
  Synthetic
INYADFVKGRFTISRDNAKNTVYLQMNKLKPEDTAVYLCNA

SEQ ID NO: 12049 - protein, 41 aa, Artificial Sequence
  Synthetic
TYYADSVKGRFTISRDNAKNTVSLQMDSLKPEDTAVYYCTR

SEQ ID NO: 12050 - protein, 41 aa, Artificial Sequence
  Synthetic
TYYGDAVRGRFTISQDNAKKTVYLQMNSLKPEDTAMYYCNT

SEQ ID NO: 12051 - protein, 41 aa, Artificial Sequence
  Synthetic
PYYADSVKGRFTISQDKAKNIVSLLMNSLKPEDTAIYYCAA

SEQ ID NO: 12052 - protein, 41 aa, Artificial Sequence
  Synthetic
TDYTASVKGRFTISRDNDQRTVTLQMNSLKPEDTAVYYCAR

SEQ ID NO: 12053 - protein, 41 aa, Artificial Sequence
  Synthetic
TYYADSVKGRFTISQDNAKDTLYLQMNSLKPEDTAIYLCAA

SEQ ID NO: 12054 - protein, 41 aa, Artificial Sequence; identical to SEQ ID NO: 7099
  Synthetic

SEQ ID NO: 12055 - protein, 41 aa, Artificial Sequence; identical to SEQ ID NO: 7084
  Synthetic

SEQ ID NO: 12056 - protein, 41 aa, Artificial Sequence
  Synthetic
TYYTGSLKGRFTISRDNAKNTVYLQMDSLKPEDTGVYYCAA

SEQ ID NO: 12057 - protein, 41 aa, Artificial Sequence
  Synthetic
PVYADFVRGRFTISLDSSKDTLYLLMNAVTPEDTAMYYCAA

SEQ ID NO: 12058 - protein, 41 aa, Artificial Sequence
  Synthetic
TFYIDAVKGRFTFSQDNDDKNIVYLQMNSLRPEDTAMYICA

SEQ ID NO: 12059 - protein, 41 aa, Artificial Sequence
  Synthetic
TYYADSVKGRFTISQDNAKNRVFLQMNSLKPEDTAMYYCNS

SEQ ID NO: 12060 - protein, 41 aa, Artificial Sequence
  Synthetic
TVYADSVKGRFTISQDNAKPTVYLQMNSLKPEDTAMYYCAA

SEQ ID NO: 12061 - protein, 41 aa, Artificial Sequence
  Synthetic
TDYADSVEGRFIISRDNTENTVYLQMADLKPEDAAMYYCAV

SEQ ID NO: 12062 - protein, 41 aa, Artificial Sequence
  Synthetic
RYYAESVWGRFTISQDKAKNTVYLEMNSLKPEDTAVYYCSA

SEQ ID NO: 12063 - protein, 41 aa, Artificial Sequence
  Synthetic
TTTIDSVKGRFSVSRDKATETTFLQMDNLKPEDTGMYTCRT

SEQ ID NO: 12064 - protein, 41 aa, Artificial Sequence
  Synthetic
TYYADSVKGRFTISQDNAKNTMWLEMNSLKPEDTAMYYCAA

SEQ ID NO: 12065 - protein, 41 aa, Artificial Sequence
  Synthetic
TYYPDYLKGRFTITRDNAKNMVFLQIDNLKVEDTAIYYCAA

SEQ ID NO: 12066 - protein, 41 aa, Artificial Sequence
  Synthetic
AYYADSVKGRFTISQDNAKSTTYLQMSSLKPEDTAMYYCAT

SEQ ID NO: 12067 - protein, 41 aa, Artificial Sequence
  Synthetic
LFYLESVKGRFTFSRDTTKNTISLEMNGLKPDDTAMYYCAA

SEQ ID NO: 12068 - protein, 41 aa, Artificial Sequence
  Synthetic
PDYADFVNGRFTISQDPARNTVSLQMYNLQPNDTAMYYCAT

SEQ ID NO: 12069 - protein, 41 aa, Artificial Sequence
  Synthetic
GVYADSVRGRFTISQNTAKTTVYLQMNNLTIDDTATYVCAS

SEQ ID NO: 12070 - protein, 41 aa, Artificial Sequence
  Synthetic
GTTNYADSVRGRFTISKVKKQLYLDMVNLKPEDTAMYYCAS

SEQ ID NO: 12071 - protein, 41 aa, Artificial Sequence
  Synthetic
ITHAGSVKGRFTISKDNSKNTLYLQMNSLKPEDTALYYCAT

SEQ ID NO: 12072 - protein, 41 aa, Artificial Sequence
  Synthetic
TNYIDSVKGRFTITHDNAKDTVYLQMNSLKPEDTAMYFCAA

SEQ ID NO: 12073 - protein, 41 aa, Artificial Sequence
  Synthetic
TVYADSVKGRFTISRDNAKNTVYLQMNNLKPEDTAMYYCAV

SEQ ID NO: 12074 - protein, 41 aa, Artificial Sequence
  Synthetic
TVYADSVKGRFTISQDNAENTVFLQMDSLKPEDTAMYYCAA

SEQ ID NO: 12075 - protein, 41 aa, Artificial Sequence
  Synthetic
ATYDDSVKGRFTISQDNAKNTVLLQMDSLKPEDSAMYYCAV

SEQ ID NO: 12076 - protein, 41 aa, Artificial Sequence
  Synthetic
TAYADPAKGRFTISQDNAKDTVYLQMQDLEPEDTAIYYCAA

SEQ ID NO: 12077 - protein, 41 aa, Artificial Sequence
  Synthetic
TYYADSVKGRFTISQDNAKNTVYLQMNSLRPKDTAIYYCAA

SEQ ID NO: 12078 - protein, 41 aa, Artificial Sequence
  Synthetic
VYYADSVKGRFTISQDIAQDTMYLQMNDLTPENTVTYTCAA

SEQ ID NO: 12079 - protein, 41 aa, Artificial Sequence
  Synthetic
TYYADSVKGRFTISQDNTKDMRYLQMNNLKPEDTATYYCAT

SEQ ID NO: 12080 - protein, 41 aa, Artificial Sequence
  Synthetic
TNYADSVKGRFTISRDNTKDIVYLQMNSLKPEDTTVYYCDA

SEQ ID NO: 12081 - protein, 41 aa, Artificial Sequence
  Synthetic
TFYLESVKGRFTLSQDNAKNTLYLQMNSLKPEDTAIYYCAA

SEQ ID NO: 12082 - protein, 41 aa, Artificial Sequence
  Synthetic
TYYDDHVKGRFTISQDNAQNTVYLQMNSLKPEDTAMYYCAA

SEQ ID NO: 12083 - protein, 41 aa, Artificial Sequence
  Synthetic
IYYADSVKGRFAISQDNAKNMVYLQMNSLKPEDTAMYYCVA

SEQ ID NO: 12084 - protein, 41 aa, Artificial Sequence
  Synthetic
TLYADSVKGRFTISQDKAKNTVYLQMNSLKPEDTALYYCAA

SEQ ID NO: 12085 - protein, 41 aa, Artificial Sequence
  Synthetic
TYIADSVKGRFTISQDNAKNTVYLQMNSLEPEDTAMYYCVA

SEQ ID NO: 12086 - protein, 41 aa, Artificial Sequence
  Synthetic
TYYADSVKGRFTISLDIPKSAVYLQMNSLKPDDTAMYYCAA

SEQ ID NO: 12087 - protein, 41 aa, Artificial Sequence
  Synthetic
LYYADFMKGRFTISQDNPKNTLYLQMNILEPEDTAMYYCAA

SEQ ID NO: 12088 - protein, 41 aa, Artificial Sequence
  Synthetic
TYYADSVKGRFTISRDNAENTVYLEMNGLIPEDTAMYYCAA

SEQ ID NO: 12089 - protein, 41 aa, Artificial Sequence
  Synthetic
IVYADSVKGRFTISQDNVENTLSLQMNSLKTDDTGVYYCAA

SEQ ID NO: 12090 - protein, 41 aa, Artificial Sequence
  Synthetic
TIYADSVKGRFTISKDNAKNTLYLQMNNLKLEDTAMYYCAA

SEQ ID NO: 12091 - protein, 41 aa, Artificial Sequence
  Synthetic
TTYAGSVKGRFTISKDNAHNTLYLQMNSLKPDDTAAYYCAS

SEQ ID NO: 12092 - protein, 41 aa, Artificial Sequence
  Synthetic
TSYADSVKGRFTISQDNAKNTVYLQMNSLKPEDTAMYYCAA

SEQ ID NO: 12093 - protein, 41 aa, Artificial Sequence
  Synthetic
TYYTDSVKGRFTISKDNAKNTLYLQMNSLKPEDTTMYYCAA

SEQ ID NO: 12094 - protein, 41 aa, Artificial Sequence
  Synthetic
TTYAGSVKGRFTISKDNAKNTLYLQMNSLKPEDTAMYYCAA

SEQ ID NO: 12095 - protein, 41 aa, Artificial Sequence
  Synthetic
THYADSVKDRFTISKDNAKNTLYLQMNNLKPEDTAVYYCAL

SEQ ID NO: 12096 - protein, 41 aa, Artificial Sequence
  Synthetic
TYYADSVKGRFAISQDNAKNTVYLQMNSLKPEDTAMYYCAT

SEQ ID NO: 12097 - protein, 41 aa, Artificial Sequence
  Synthetic
TNYVDSVKGRFTISQDNAKNTLYLQMNSLKPEDTAIYYCAA

SEQ ID NO: 12098 - protein, 41 aa, Artificial Sequence
  Synthetic
TSYADSVKGRFTISQDIAKNTLYLQMNSLKPEDTAMYYCAA

SEQ ID NO: 12099 - protein, 41 aa, Artificial Sequence
  Synthetic
TYYADSVKGRFTISQDNAKNTLYLQMNSLKPEDTALYYCAA

SEQ ID NO: 12100 - protein, 41 aa, Artificial Sequence
  Synthetic
TYYADSVKGRFTISQDNAKNTVYLQMNSLKPEDTAMYYCAV

SEQ ID NO: 12101 - protein, 41 aa, Artificial Sequence
  Synthetic
TSYADPVKGRSTISKDNVANTLYLQMNSLKPEDTAMYYCAA

SEQ ID NO: 12102 - protein, 41 aa, Artificial Sequence
  Synthetic
TRYADSVKGRFTISKDNAKNTLYLHMNSLKPEDTAMYYCAA

SEQ ID NO: 12103 - protein, 41 aa, Artificial Sequence
  Synthetic
TSYADSVKGRFTISQDNAKSTLYLQMNSLKTEDTAVYYCAA

SEQ ID NO: 12104 - protein, 41 aa, Artificial Sequence; identical to SEQ ID NO: 7343
  Synthetic

SEQ ID NO: 12105 - protein, 41 aa, Artificial Sequence; identical to SEQ ID NO: 7343
  Synthetic

SEQ ID NO: 12106 - protein, 41 aa, Artificial Sequence
  Synthetic
PYYADSVKGRFTISQDNAKNTVYLQMNSLKPEDTAMYYCAA

SEQ ID NO: 12107 - protein, 41 aa, Artificial Sequence
  Synthetic
TYYADPVKGRFTISRDNAKSTVYLLMNSLKPEDTAIYYCAQ

SEQ ID NO: 12108 - protein, 41 aa, Artificial Sequence
  Synthetic
TLYADSVKGRFTISQGNAKNTKFLLLNNLEPEDTAIYYCAL

SEQ ID NO: 12109 - protein, 41 aa, Artificial Sequence
  Synthetic
TYYSDSVRGRFTISRDDYKNTVWLQMDSLKPEDTAIYYCAR

SEQ ID NO: 12110 - protein, 41 aa, Artificial Sequence
  Synthetic
TRYADSVKGRFTVSRDNAKNTLYLEMNSLKPEDTATYFCAK

SEQ ID NO: 12111 - protein, 41 aa, Artificial Sequence
  Synthetic
TDYADSMKGRFTISRDNAKNTMYLQMTSLKPDDTAVYYCAA

SEQ ID NO: 12112 - protein, 41 aa, Artificial Sequence
  Synthetic
TDYDDSVKGRFTLSRDNAKNTLYLRMNSLKPEDTAMYYCAA

SEQ ID NO: 12113 - protein, 41 aa, Artificial Sequence
  Synthetic
TFVRASVRGRFTISQDDAMKTMYLQMDSLKAEDTGVYYCAA

SEQ ID NO: 12114 - protein, 41 aa, Artificial Sequence
  Synthetic
TMYRTPVKGRFTISQDSAKDTAFLQMNSLKVEDTAMYFCRT

SEQ ID NO: 12115 - protein, 41 aa, Artificial Sequence
  Synthetic
TNYADSVKGRFTISQGNAKNTVYLQMNSLKPEDTAIYYCAA

SEQ ID NO: 12116 - protein, 41 aa, Artificial Sequence
  Synthetic
RYYADAVKARFTISQDNAKNTVYLQMNSLKPEDIAMYYCAT

SEQ ID NO: 12117 - protein, 41 aa, Artificial Sequence
  Synthetic
KYYTDSVKGRFTIFRDDDKNTVDLQMNSLKPEDTAIYYCAA

SEQ ID NO: 12118 - protein, 41 aa, Artificial Sequence
  Synthetic
TSYADSVKGRFTISQDNAKNTVYLQMNSLIPEDTAMYYCKT

SEQ ID NO: 12119 - protein, 41 aa, Artificial Sequence
  Synthetic
TTYADSVKGRFTISRDNAKNTVYLQMNSLKPEDTGMYYCKI

SEQ ID NO: 12120 - protein, 41 aa, Artificial Sequence
  Synthetic
IRYIGAVKGRFTISRDSAKNTLYLQMSSLKTEDTGVYYCAA

SEQ ID NO: 12121 - protein, 41 aa, Artificial Sequence
  Synthetic
TRYADSVKGRFTISQDRAKHTLYLQMNSLKTEDTAVYYCRA

SEQ ID NO: 12122 - protein, 41 aa, Artificial Sequence
  Synthetic
TAYADSVKGRFTISQDNAKNTLWLRMNTLKPEDTAMYYCAA

SEQ ID NO: 12123 - protein, 41 aa, Artificial Sequence
  Synthetic
GRYADSVRGRFAISQDNAKNTLYLQMNTLNPEDTATYYCAA

SEQ ID NO: 12124 - protein, 41 aa, Artificial Sequence
  Synthetic
TEYSDSVKGRFTISRDNAKNAVYLQMNSLKPEDTAMYYCAA

SEQ ID NO: 12125 - protein, 41 aa, Artificial Sequence; identical to SEQ ID NO: 7093
  Synthetic

SEQ ID NO: 12126 - protein, 41 aa, Artificial Sequence
  Synthetic
SYYADSVKGRFTISRDNGENAVNLQMNSLKPEDTAIYYCAA

SEQ ID NO: 12127 - protein, 41 aa, Artificial Sequence; identical to SEQ ID NO: 7088
  Synthetic

SEQ ID NO: 12128 - protein, 41 aa, Artificial Sequence
  Synthetic
LYYVDSVKGRFTISRDNDNAENTVYLQMNSLKPEDTSTYYC

SEQ ID NO: 12129 - protein, 41 aa, Artificial Sequence
  Synthetic
TSYADSVKGRFTVSQDNAEGTVYLQMNDLKPEDTAIYYCAA

SEQ ID NO: 12130 - protein, 41 aa, Artificial Sequence; identical to SEQ ID NO: 7089
  Synthetic

SEQ ID NO: 12131 - protein, 41 aa, Artificial Sequence
  Synthetic
TYFADSVKGRFTISRDSEENTLYLQMNSLKAEDTGIYYCAA

SEQ ID NO: 12132 - protein, 41 aa, Artificial Sequence
  Synthetic
TDYADSVKGRFTISQDNNKNTVYLQMNSLKPEDTAMYYCAA

SEQ ID NO: 12133 - protein, 41 aa, Artificial Sequence
  Synthetic
SNYPDSVKGRFTISRDNADNTVYLLMNDLKPEDTATYYCAA

SEQ ID NO: 12134 - protein, 41 aa, Artificial Sequence
  Synthetic
TYYADSVKGRFTISQDNAKNTLYLRMNNLKPEDTAVYYCAT

SEQ ID NO: 12135 - protein, 41 aa, Artificial Sequence
  Synthetic
TWYADSVKGRFTISLDSANNTLYLQMNSLKPEDTAMYYCAT

SEQ ID NO: 12136 - protein, 41 aa, Artificial Sequence
  Synthetic
TYYPVSVKGRFTVSRDDAKNTLNLQLNTLKIEDTAMYYCVR

SEQ ID NO: 12137 - protein, 41 aa, Artificial Sequence
  Synthetic
TEYADSVKGRFTISQDDAKNTVYLQMNNLKPEDTGIYYCVA

SEQ ID NO: 12138 - protein, 41 aa, Artificial Sequence
  Synthetic
TDYADSVKGRFTISRDNAKNTVDLQMDSLKPEDTAVYYCAA

SEQ ID NO: 12139 - protein, 41 aa, Artificial Sequence
  Synthetic
TYYHESVQGRFTISRDNVKNLMTLQMNNLKVEDTARYYCAA

SEQ ID NO: 12140 - protein, 41 aa, Artificial Sequence
  Synthetic
TWYADSVKGRFTISEDKAKHVLFLQMNNLRPEDTAMYYCAT

SEQ ID NO: 12141 - protein, 41 aa, Artificial Sequence
  Synthetic
TLYDSSVAGRFKITRDHDKNTVFLQMNSLKQEDTAIYYCAL

SEQ ID NO: 12142 - protein, 41 aa, Artificial Sequence
  Synthetic
TYYATSVKGRFAISRDNAKNTVYLRMNSLKPEDSAMYYCAT

SEQ ID NO: 12143 - protein, 41 aa, Artificial Sequence
  Synthetic
KDYADSVKGRFTISQDNAKNTVYLQMNSLKPEDTAIYYCAA

SEQ ID NO: 12144 - protein, 41 aa, Artificial Sequence
  Synthetic
GTTYYADSVKGRFTITQIKNTVYLQMTSLTPEDTAIYYCAA

SEQ ID NO: 12145 - protein, 41 aa, Artificial Sequence
  Synthetic
TYYADSVKGRFTISQDIAKNTVYLQMNSLKLEDTAMYYCAT

SEQ ID NO: 12146 - protein, 41 aa, Artificial Sequence
  Synthetic
TMYQDSVKGRFAISHDNLKSTVFLQMNSLKPEDTAKYYCKL

SEQ ID NO: 12147 - protein, 41 aa, Artificial Sequence
  Synthetic
TKYADSVKGRFTISQINANNTVSLQMNSLNLEDTAVYYCAS

SEQ ID NO: 12148 - protein, 41 aa, Artificial Sequence
  Synthetic
IYIADSVKGRFTISQDKAKKTVYLEMNNLKLEDTAMYYCAA

SEQ ID NO: 12149 - protein, 41 aa, Artificial Sequence
  Synthetic
AVYADSVKGRFTISEDSASNTVYLQMDDLKPEDTAIYYCAA

SEQ ID NO: 12150 - protein, 41 aa, Artificial Sequence
  Synthetic
TVETDSVQGRFTPSQDFPSNTVYLQMNSLKPEDTAIYYCAA

SEQ ID NO: 12151 - protein, 41 aa, Artificial Sequence
  Synthetic
STDYADSVKGRFAISQDNHKNIYLQLHSLKPEDTAIYFCAA

SEQ ID NO: 12152 - protein, 41 aa, Artificial Sequence
  Synthetic
TWYADSVKGRFTISQDNNKNTVYLRMNNLKPEDTAMYYCSA

SEQ ID NO: 12153 - protein, 41 aa, Artificial Sequence
  Synthetic
TYFRDSVKGRFIISQDNVKNTVHLLMNSLKPEDTAAYYCAA

SEQ ID NO: 12154 - protein, 41 aa, Artificial Sequence
  Synthetic
TIYADSVKGRFTISQDKAKNTSYLQMTSLTPDDMAMYYCAA

SEQ ID NO: 12155 - protein, 41 aa, Artificial Sequence
  Synthetic
TRYAESVKGRFTVSRDSATNTVYLDMNSLTPDDSAMYTCQS

SEQ ID NO: 12156 - protein, 41 aa, Artificial Sequence
  Synthetic
TYYADSVKGRFTISQDKAENTVYLQMNSLKPEDTAIYYCAA

SEQ ID NO: 12157 - protein, 41 aa, Artificial Sequence
  Synthetic
THYADSVKGRFTISQDIAKNTVYLEMNSLKPEDTAIYYCVA

SEQ ID NO: 12158 - protein, 41 aa, Artificial Sequence
  Synthetic
AWYADSVKGRFTISQDNTKNTMNLNMNTLKPEDTAIYYCAA

SEQ ID NO: 12159 - protein, 41 aa, Artificial Sequence; identical to SEQ ID NO: 7094
  Synthetic

SEQ ID NO: 12160 - protein, 41 aa, Artificial Sequence
  Synthetic
TTYAESVKGRFTISQDNAKQTLFLQMNSLKPEDTAVYFCAV

SEQ ID NO: 12161 - protein, 41 aa, Artificial Sequence
  Synthetic
TYYADSVKGRFTISRDNAKHTLRMQMTNLKPEDSAMYYCGV

SEQ ID NO: 12162 - protein, 41 aa, Artificial Sequence
  Synthetic
SYYADSVKGRFTISQDSAKNTVFLEMNSLKPEDTAIYVCAA

SEQ ID NO: 12163 - protein, 41 aa, Artificial Sequence
  Synthetic
TFYNPSVKGRFTISRDTIKNTVYLQMDSLKPEDSAMYYCAA

SEQ ID NO: 12164 - protein, 41 aa, Artificial Sequence
  Synthetic
TNYADSVKGRFTISQDNALDPVYLQMNGLKPEDTAMYICKF

SEQ ID NO: 12165 - protein, 41 aa, Artificial Sequence
  Synthetic
RRYADSARGRFTISKGNAKNSLYLQMNSLKPEDTAVYYCAA

SEQ ID NO: 12166 - protein, 41 aa, Artificial Sequence
  Synthetic
TVYATSVKGRFTISQGNAQKTVYLQMNSLKPEDTAIYYCAA

SEQ ID NO: 12167 - protein, 41 aa, Artificial Sequence
  Synthetic
NEIYADSVKGRFTISRDNAQSMSLQMDRLKPEDTALYYCAA

SEQ ID NO: 12168 - protein, 41 aa, Artificial Sequence
  Synthetic
TYYADSVKGRFTISRDNAKNTMYLQMNSLKPEDTAMYYCDT

SEQ ID NO: 12169 - protein, 41 aa, Artificial Sequence
  Synthetic
TFYADSVKGRFTISLDNAKAAVYLQMNSLNTDDTAVYYCAA

SEQ ID NO: 12170 - protein, 41 aa, Artificial Sequence
  Synthetic
RPYYADSVKGRFTISQDSATTTYLQMESLQPEDTAMYFCAA

SEQ ID NO: 12171 - protein, 41 aa, Artificial Sequence
  Synthetic
TFYADSVKGRFTISQDNAKNTVYLQMNSLKPEDTAMYYCAA

SEQ ID NO: 12172 - protein, 41 aa, Artificial Sequence
  Synthetic
PDYAASVKGRFTISQDNAKNTVYLQMNSLKPEDTATYVCAT

SEQ ID NO: 12173 - protein, 41 aa, Artificial Sequence
  Synthetic
TYFGEFVKGRFTISQDNAKNNVYLQMDNLKPEDTAIYYCAA

SEQ ID NO: 12174 - protein, 41 aa, Artificial Sequence
  Synthetic
TYIADSVKGRFTISHDNAKNTVYLQMNNLKPEDTAIYYCAA

SEQ ID NO: 12175 - protein, 41 aa, Artificial Sequence
  Synthetic
TNYYDSAKGRFTISRDNAKNTVYLQMNSLKPEDTARYYCAA

SEQ ID NO: 12176 - protein, 41 aa, Artificial Sequence
  Synthetic
TYYADSVKGRFTISQDNAKNTVYLLMNSLKPEDTAIYYCAA

SEQ ID NO: 12177 - protein, 41 aa, Artificial Sequence
  Synthetic
TTYPDSTKGRFTISQNDAWYTVYLQMNDLKPEDTATYYCSA

SEQ ID NO: 12178 - protein, 41 aa, Artificial Sequence
  Synthetic
SYYADSVKGRFTISQDNAKNTVYLQMNSLKPEDTAIYYCAA

SEQ ID NO: 12179 - protein, 41 aa, Artificial Sequence
  Synthetic
TTYATSVKGRFTISQDNAKNTATLQMASLKPEDTAMYYCNR

SEQ ID NO: 12180 - protein, 41 aa, Artificial Sequence
  Synthetic
PWYKDSVKGRFTISLNKDNSSLELQMDNLKPEDTATYYCNI

SEQ ID NO: 12181 - protein, 41 aa, Artificial Sequence
  Synthetic
TYYADSVKGRFTISRDNSKDMLYLQINLLKTEDAAIYYCAA

SEQ ID NO: 12182 - protein, 41 aa, Artificial Sequence
  Synthetic
TFYGNSVKGRAAISRDDADNTVHLQMNSLKPEDTAVYYCVA

SEQ ID NO: 12183 - protein, 41 aa, Artificial Sequence
  Synthetic
TYYSDSVKGRFTISLDTTNNTVYLEMTSLKPEDTAMYYCAA

SEQ ID NO: 12184 - protein, 41 aa, Artificial Sequence
  Synthetic
TYYADSVKDRFTISRDNAKNTVYLQMNSLKPDDTAMYYCAA

SEQ ID NO: 12185 - protein, 41 aa, Artificial Sequence
  Synthetic
TYYHDSVKGRFALSRDNAGPTWYLQMDDLKLDDTAMYSCAA

SEQ ID NO: 12186 - protein, 41 aa, Artificial Sequence
  Synthetic
TYYHDSIKGRFTISQSQDNAKRMVYLQMNSLKPEDTGLYYC

SEQ ID NO: 12187 - protein, 41 aa, Artificial Sequence
  Synthetic
SYYDDFVAGRFTISQDNAKATVYLQMDTVKPEDTASYVCAI

SEQ ID NO: 12188 - protein, 41 aa, Artificial Sequence
  Synthetic
RWSSDSVKARFTMSSDNAKNTVYLEMNSLKPEDSAMYFCAA

SEQ ID NO: 12189 - protein, 41 aa, Artificial Sequence
  Synthetic
TYYADSVKGRFTISQGNAKNTVYLEMNSLKPEDTAMYYCAS

SEQ ID NO: 12190 - protein, 41 aa, Artificial Sequence
  Synthetic
THYADSMKGRFTMSQDNAKNTVYLQMNSLKPEDTALYYCVA

SEQ ID NO: 12191 - protein, 41 aa, Artificial Sequence
  Synthetic
TYYADSVKGRFTISQDNAKKTNVLLMNNLKPEDTAIYYCAA

SEQ ID NO: 12192 - protein, 41 aa, Artificial Sequence
  Synthetic
TYYADSVKGRLNISKDNAKSTFYLQLRSLKPEDTAMYYCAG

SEQ ID NO: 12193 - protein, 41 aa, Artificial Sequence
  Synthetic
TWYADSVRGRFAASQDNAKNTVSLQMNSLESEDTAMYYCAA

SEQ ID NO: 12194 - protein, 41 aa, Artificial Sequence
  Synthetic
TYYADSIKGRFTISRDPGKEITLYLKMDNLNSEDTASYYCA

SEQ ID NO: 12195 - protein, 41 aa, Artificial Sequence
  Synthetic
TYYADSVKGRFTISQDNAQNTVYLQMNGLKPEDTAIYYCAQ

SEQ ID NO: 12196 - protein, 41 aa, Artificial Sequence
  Synthetic
YAYDGSMTGRVTISQDTTKTTVFLEMSSLRPDDTAIYYCAA

SEQ ID NO: 12197 - protein, 41 aa, Artificial Sequence
  Synthetic
TDYADSVKGRFTISQDNTKNTVYLQMNSLKPEDTAIYYCAA

SEQ ID NO: 12198 - protein, 41 aa, Artificial Sequence
  Synthetic
PLYADSVKGRFTISRDNAKNAVYLQMNSLKVGDTGMYYCAA

SEQ ID NO: 12199 - protein, 41 aa, Artificial Sequence
  Synthetic
RNYADSVKDRFTISRDDTKNAIYLQMSTLKPEDTAMYYCGA

SEQ ID NO: 12200 - protein, 41 aa, Artificial Sequence
  Synthetic
TNYADSVKGRFIISRDNAENEVYLQMNNLKPEDTAIYYCAS

SEQ ID NO: 12201 - protein, 41 aa, Artificial Sequence
  Synthetic
TYYAVSVRGRFTISKGRAKNTLSLQMNNLNVNDTAVYYCAQ

SEQ ID NO: 12202 - protein, 41 aa, Artificial Sequence
  Synthetic
TDYADSVKGRFTVSQDNSKRTSYLQMNSLKPEDTAMYFCKA

SEQ ID NO: 12203 - protein, 41 aa, Artificial Sequence
  Synthetic
TYYADSVKGRFTISQDKAKNTVSLQMNNLQPEDTATYYCAA

SEQ ID NO: 12204 - protein, 41 aa, Artificial Sequence
  Synthetic
TAYADSVKGRFTISRDNTKNTVFLQMNSLKPEDTAIYLCAA

SEQ ID NO: 12205 - protein, 41 aa, Artificial Sequence
  Synthetic
AFYADSVKGRFIISQDHVQNTVYLQMNNLKPEDTAIYYCAA

SEQ ID NO: 12206 - protein, 41 aa, Artificial Sequence
  Synthetic
DRTNYADSVKGRFTISQAKSTVYLQMNSLNPEDTAMYYCAL

SEQ ID NO: 12207 - protein, 41 aa, Artificial Sequence
  Synthetic
PKYSDSVKGRFTISQDVASNMVYLQMNSLKPEDTAIYYCAA

SEQ ID NO: 12208 - protein, 41 aa, Artificial Sequence
  Synthetic
TYYDDSVRGRFVISRDITKKTVYLQMNSLKAEDTAVYYCAA

SEQ ID NO: 12209 - protein, 41 aa, Artificial Sequence
  Synthetic
TYYADSVKGRFTISQDNAKKTVYLQMNNLKPEDTAMYYCKI

SEQ ID NO: 12210 - protein, 41 aa, Artificial Sequence
  Synthetic
IWYHMSVQGRFTISRVNEKRTAYLQMDNLAPSDTAMYYCSA

SEQ ID NO: 12211 - protein, 41 aa, Artificial Sequence
  Synthetic
TWYKDSVKGRFTISQEYVKKTVYLEMNSLEPEDTAMYYCMI

SEQ ID NO: 12212 - protein, 41 aa, Artificial Sequence
  Synthetic
ASYATSVQGRFIISQDDNKNAVYLQMNNLKPEDTAMYYCAA

SEQ ID NO: 12213 - protein, 41 aa, Artificial Sequence
  Synthetic
TYYADSVKGRFTISQDTAKNTVVLLMNSLKPEDTAIYYCGA

SEQ ID NO: 12214 - protein, 41 aa, Artificial Sequence
  Synthetic
TYVVDSVKGRFVISQDNAKDTVYLQMNSLKPEDTAMYYCYT

SEQ ID NO: 12215 - protein, 41 aa, Artificial Sequence
  Synthetic
IYYADSVKDRFLISRDNAKSTLYLQMNSLKPEDTAIYYCAA

SEQ ID NO: 12216 - protein, 41 aa, Artificial Sequence
  Synthetic
THYAESVTGRFTISRDNAKNVVILHMNNLKPEDTAIYYCAA

SEQ ID NO: 12217 - protein, 41 aa, Artificial Sequence
  Synthetic
TTYGDSVKGRFTISQDNAKNAVYLQMDSLKVEDTAIYYCAL

SEQ ID NO: 12218 - protein, 41 aa, Artificial Sequence
  Synthetic
THYHPSVKDRFTISQDNAKNTIYLQMNTLKPEDTAIYYCAA

SEQ ID NO: 12219 - protein, 41 aa, Artificial Sequence
  Synthetic
TYYSDSVKGRFTISQGNTKNTWYLQMNNLKPEDTSIYTCGT

SEQ ID NO: 12220 - protein, 41 aa, Artificial Sequence
  Synthetic
IYYGDSVKGRFTISRDNNKNTVYLQMNSLKPEDTAMYYCAA

SEQ ID NO: 12221 - protein, 41 aa, Artificial Sequence
  Synthetic
TYYADSVKDRFTISQDNENTKKTVYLQMDNLKPEDTAIYYC

SEQ ID NO: 12222 - protein, 41 aa, Artificial Sequence
  Synthetic
TYYDDDVKGRFTISQDNAKNTVYPQMNSLKPEDTAMYYCAA

SEQ ID NO: 12223 - protein, 41 aa, Artificial Sequence
  Synthetic
TIYAASLQGRFTISRDNAKNTVYLQMNNLKPEDTAIYYCAA

SEQ ID NO: 12224 - protein, 41 aa, Artificial Sequence
  Synthetic
TYYADSLKGRFTISQDNAKNTVYLEMNSLKPEDTAIYYCAA

SEQ ID NO: 12225 - protein, 41 aa, Artificial Sequence
  Synthetic
TVYSKSHGSRASITRDTSKNQISLQLNSVTPEDTAVYYCAR

SEQ ID NO: 12226 - protein, 41 aa, Artificial Sequence
  Synthetic
TFYADSVKGRFTISEDNDNVKNFVYLQMNSLKPEDTAMYVC

SEQ ID NO: 12227 - protein, 41 aa, Artificial Sequence
  Synthetic
TKYTYSVKGRFTMSRGSTEYTVFLQMDNLKPEDTAMYYCKT

SEQ ID NO: 12228 - protein, 41 aa, Artificial Sequence
  Synthetic
TTEADSVQGRFTISRDNSRNTVYLQMNSLKPEDTAVYYCGA

SEQ ID NO: 12229 - protein, 41 aa, Artificial Sequence
  Synthetic
TYVAESVKGRFAISQDNAKTTVYLDMNNLTPEDTATYYCAA

SEQ ID NO: 12230 - protein, 41 aa, Artificial Sequence
  Synthetic
TYYADSVKGRFTISQDSTLKTMYLLMNNLKPEDTGTYYCAA

SEQ ID NO: 12231 - protein, 41 aa, Artificial Sequence
  Synthetic
TFIDEPVKGRFTISRDNAQKTLSLRMNSLRPEDTAVYYCAA

SEQ ID NO: 12232 - protein, 41 aa, Artificial Sequence
  Synthetic
TYYADSVTGRFTISRDSPKNTVYLQMNSLKPEDTAIYFCAA

SEQ ID NO: 12233 - protein, 41 aa, Artificial Sequence
  Synthetic
KFYVDFVKGRFTISQDNAKNTVYLQMSFLKPEDTAIYYCAA

SEQ ID NO: 12234 - protein, 41 aa, Artificial Sequence
  Synthetic
TYYADAVKGRFTISQGNAKNTVFLQMDNLKPEDTAIYYCAA

SEQ ID NO: 12235 - protein, 41 aa, Artificial Sequence
  Synthetic
TDYADSVKGRFTISQGNTKNTVNLQMNSLTPEDTAIYSCAA

SEQ ID NO: 12236 - protein, 41 aa, Artificial Sequence
  Synthetic
TNYRDSVKGRFTISQLNAQNTVYLQMNSLKPEDSAMYYCAI

SEQ ID NO: 12237 - protein, 41 aa, Artificial Sequence
  Synthetic
TFYADSVKGRFTIFLDNDKTTFSLQLDRLNPEDTADYYCAA

SEQ ID NO: 12238 - protein, 41 aa, Artificial Sequence
  Synthetic
IYAADSVKGRFTISQDTAKKTVYLQMNNLQPEDTATYYCAA

SEQ ID NO: 12239 - protein, 41 aa, Artificial Sequence
  Synthetic
TTYADSVKGRFTISQDSAKNTVYLQMNSLKPEDTAMYYCKI

SEQ ID NO: 12240 - protein, 41 aa, Artificial Sequence
  Synthetic
TNYPDSVKGRFTISRDNAKNTVYLQMSSLKPEDTAVYYCEK

SEQ ID NO: 12241 - protein, 41 aa, Artificial Sequence
  Synthetic
TRYAGDVKGRFTISQDNAKNTVYLEMNSLKPEDTAMYYCLR

SEQ ID NO: 12242 - protein, 41 aa, Artificial Sequence; identical to SEQ ID NO: 7080
  Synthetic

SEQ ID NO: 12243 - protein, 41 aa, Artificial Sequence
  Synthetic
ISYADSVKGRFTISRDNAGNLVYLQMNSLKPEDTAMYYCKA

SEQ ID NO: 12244 - protein, 41 aa, Artificial Sequence; identical to SEQ ID NO: 7082
  Synthetic

SEQ ID NO: 12245 - protein, 41 aa, Artificial Sequence; identical to SEQ ID NO: 7081
  Synthetic

SEQ ID NO: 12246 - protein, 41 aa, Artificial Sequence
  Synthetic
TDYADSAKGRFTISQDRAKNTVYLQMNSLKPEDTAMYYCAG

SEQ ID NO: 12247 - protein, 41 aa, Artificial Sequence; identical to SEQ ID NO: 7085
  Synthetic

SEQ ID NO: 12248 - protein, 41 aa, Artificial Sequence
  Synthetic
TKYADSVKGRFTISRDNAKNTVYLEMNSLKPEDTAIYYCAG

SEQ ID NO: 12249 - protein, 41 aa, Artificial Sequence
  Synthetic
TYYDVSVKGRFTVSQDNAKNTVYLQMNSLKPEDTAIYYCAA

SEQ ID NO: 12250 - protein, 41 aa, Artificial Sequence; identical to SEQ ID NO: 7075
  Synthetic

SEQ ID NO: 12251 - protein, 41 aa, Artificial Sequence; identical to SEQ ID NO: 7079
  Synthetic

SEQ ID NO: 12252 - protein, 41 aa, Artificial Sequence; identical to SEQ ID NO: 7084
  Synthetic

SEQ ID NO: 12253 - protein, 41 aa, Artificial Sequence; identical to SEQ ID NO: 7076
  Synthetic

SEQ ID NO: 12254 - protein, 41 aa, Artificial Sequence; identical to SEQ ID NO: 7078
  Synthetic

SEQ ID NO: 12255 - protein, 41 aa, Artificial Sequence; identical to SEQ ID NO: 7103
  Synthetic

SEQ ID NO: 12256 - protein, 41 aa, Artificial Sequence; identical to SEQ ID NO: 7090
  Synthetic

SEQ ID NO: 12257 - protein, 41 aa, Artificial Sequence; identical to SEQ ID NO: 7075
  Synthetic

SEQ ID NO: 12258 - protein, 41 aa, Artificial Sequence
  Synthetic
TYYADSVKGRFTISRDNSKNTLYLQMNSLRAEDTAVYYCAA

SEQ ID NO: 12259 - protein, 41 aa, Artificial Sequence; identical to SEQ ID NO: 7059
  Synthetic

SEQ ID NO: 12260 - protein, 41 aa, Artificial Sequence; identical to SEQ ID NO: 7063
  Synthetic

SEQ ID NO: 12261 - protein, 41 aa, Artificial Sequence; identical to SEQ ID NO: 7064
  Synthetic

SEQ ID NO: 12262 - protein, 41 aa, Artificial Sequence; identical to SEQ ID NO: 7065
  Synthetic

SEQ ID NO: 12263 - protein, 41 aa, Artificial Sequence; identical to SEQ ID NO: 7067
  Synthetic

SEQ ID NO: 12264 - protein, 41 aa, Artificial Sequence; identical to SEQ ID NO: 7068
  Synthetic

SEQ ID NO: 12265 - protein, 41 aa, Artificial Sequence; identical to SEQ ID NO: 7075
  Synthetic

SEQ ID NO: 12266 - protein, 41 aa, Artificial Sequence; identical to SEQ ID NO: 7070
  Synthetic

SEQ ID NO: 12267 - protein, 41 aa, Artificial Sequence; identical to SEQ ID NO: 7095
  Synthetic

SEQ ID NO: 12268 - protein, 41 aa, Artificial Sequence; identical to SEQ ID NO: 7094
  Synthetic

SEQ ID NO: 12269 - protein, 41 aa, Artificial Sequence; identical to SEQ ID NO: 7072
  Synthetic

SEQ ID NO: 12270 - protein, 41 aa, Artificial Sequence; identical to SEQ ID NO: 7317
  Synthetic

SEQ ID NO: 12271 - protein, 41 aa, Artificial Sequence; identical to SEQ ID NO: 7074
  Synthetic

SEQ ID NO: 12272 - protein, 41 aa, Artificial Sequence
  Synthetic
ARYADSVKGRFTISRDNAKNTVYLQMNSLKPEDTGMYYCKT

SEQ ID NO: 12273 - protein, 41 aa, Artificial Sequence
  Synthetic
TDYADSVKGRFTISRDNAENKVYLQMNSLKPEDTAVYYCAA

SEQ ID NO: 12274 - protein, 41 aa, Artificial Sequence
  Synthetic
TNYADSVKGRFTISRDNAKNTVYLQMNALKPEDTAVYYCAA

SEQ ID NO: 12275 - protein, 41 aa, Artificial Sequence
  Synthetic
AYYADSVKGRFTVSRDNVKNTVDLQMKGLKAEDTATYYCAA

SEQ ID NO: 12276 - protein, 41 aa, Artificial Sequence
  Synthetic
TYYNDAVKGRFTISRDNTKSTAELQMNNLRPEDTARYFCAT

SEQ ID NO: 12277 - protein, 41 aa, Artificial Sequence
  Synthetic
TYYADAVKGRFTISRDNAKNTVYLQMNSLKPEDTAMYYCAI

SEQ ID NO: 12278 - protein, 41 aa, Artificial Sequence
  Synthetic
TYYADSVKGRFTISRDNAKNTVDLQMNGLNPEDTAIYYCAA

SEQ ID NO: 12279 - protein, 41 aa, Artificial Sequence
  Synthetic
TLYADSVKGRFTISRDNARNAVYLQMNSLKPEDTGTYYCAG

SEQ ID NO: 12280 - protein, 41 aa, Artificial Sequence
  Synthetic
ASYADSVKGRFTISQDIVKKSVYLRMNSLKPEDTAMYYCKT

SEQ ID NO: 12281 - protein, 41 aa, Artificial Sequence
  Synthetic
TYYSTSVKGRFTISRDNAKNTVYLQMNNLKAEDTAMYYCAA

SEQ ID NO: 12282 - protein, 41 aa, Artificial Sequence
  Synthetic
TAYADSVKGRFTISRGNEKNTVYLLMNNLKAEDTATYYCAA

SEQ ID NO: 12283 - protein, 41 aa, Artificial Sequence
  Synthetic
TFYADSVKGRFTISQDNAKKMVYLQMELLRPEDTGIYYCAS

SEQ ID NO: 12284 - protein, 41 aa, Artificial Sequence
  Synthetic
TYYADSVKGRFTISQDTAKNTLYLQMNSLKPEDTAMYYCAT

SEQ ID NO: 12285 - protein, 41 aa, Artificial Sequence
  Synthetic
ARYADSVKGRFTISQDLSNDTMYLQMNNLKPEDTGMYYCAA

SEQ ID NO: 12286 - protein, 41 aa, Artificial Sequence
  Synthetic
TSYADSVKGRFTISCDNAKNTVHLQMNSLKPEDTAMYYCKR

SEQ ID NO: 12287 - protein, 41 aa, Artificial Sequence
  Synthetic
TSYADSVKGRFTISQDNAKNTVYLQMDSLKPEDTAMYYCKR

SEQ ID NO: 12288 - protein, 41 aa, Artificial Sequence
  Synthetic
TSYADSVKGRFTISLDIAKNTVYLQMNSLKPEGTAMYYCKT

SEQ ID NO: 12289 - protein, 41 aa, Artificial Sequence
  Synthetic
TSYADSVKGRFTISQDNAKNTVYLQMNSLKPEDTAMYYCKT

SEQ ID NO: 12290 - protein, 41 aa, Artificial Sequence
  Synthetic
TYYKDSLKGRFTISRDNAKNTLYLQMNSLKSEDTALYYCNI

SEQ ID NO: 12291 - protein, 41 aa, Artificial Sequence
  Synthetic
TYYVDSVQGRFTISRDNAKNTVYLQMNSLKPEDTAMFYCAT

SEQ ID NO: 12292 - protein, 41 aa, Artificial Sequence; identical to SEQ ID NO: 7084
  Synthetic

SEQ ID NO: 12293 - protein, 41 aa, Artificial Sequence
  Synthetic
TTYADSVKGRFTISQDNAKNTVYLQMNSLKPEDTAMYYCKS

SEQ ID NO: 12294 - protein, 41 aa, Artificial Sequence
  Synthetic
TYYADSVKGRFTISQDNAKNTVDLQMNSLKPEDTAMYYCNM

SEQ ID NO: 12295 - protein, 41 aa, Artificial Sequence
  Synthetic
TYYTDSVKGRFTISQDNAKNTVYLQMNSLKPEDTAIYYCAA

SEQ ID NO: 12296 - protein, 41 aa, Artificial Sequence
  Synthetic
TMYADSVKGRFTISRDNAKNTATLQMNSLKPEDTAMYYCKR

SEQ ID NO: 12297 - protein, 41 aa, Artificial Sequence; identical to SEQ ID NO: 12289
  Synthetic

SEQ ID NO: 12298 - protein, 41 aa, Artificial Sequence
  Synthetic
TYYADSVKGRFTISQDNAENTVYLQMNSLKPEDTAIYYCAA

SEQ ID NO: 12299 - protein, 41 aa, Artificial Sequence
  Synthetic
TRIADSVKGRFTISQDNAKNTVYLQMNSLKPEDTAMYYCGA

SEQ ID NO: 12300 - protein, 41 aa, Artificial Sequence
  Synthetic
TDYADAVKGRFTISQDNAKNTVYLQMNSLKPEDTAMYYCAA

SEQ ID NO: 12301 - protein, 41 aa, Artificial Sequence
  Synthetic
TTYADSVKGRFTISQDNAKNTVYLQMNSLKPEDTAMYYCKR

SEQ ID NO: 12302 - protein, 41 aa, Artificial Sequence
  Synthetic
TSYADSVKGRFTISQDNAKNTVYLQMNSLKPEDTAMYYCKR

SEQ ID NO: 12303 - protein, 41 aa, Artificial Sequence
  Synthetic
TSYADSVKGRFTISQDNAKNTVYLQMNSLKPEDTAMYYCKI

SEQ ID NO: 12304 - protein, 41 aa, Artificial Sequence
  Synthetic
TTYADSVKGRFTISQDNAKSTLYLQMNGLKPEDTAVYFCAA

SEQ ID NO: 12305 - protein, 41 aa, Artificial Sequence
  Synthetic
TYYADSVKGRFTISEDKAKKTWYLQMNSLKPEDTAIYYCAI

SEQ ID NO: 12306 - protein, 41 aa, Artificial Sequence
  Synthetic
TSYADSVKGRFIISQGVAKNTVDLQMNNLKPEDSATYYCAV

SEQ ID NO: 12307 - protein, 41 aa, Artificial Sequence
  Synthetic
TAYAASAKGRFTMSRDNAKSMVYLRMNNLKPEDTAVYYCAE

SEQ ID NO: 12308 - protein, 41 aa, Artificial Sequence
  Synthetic
ILYADPVKGRFTISQDNAKNSVYLEMNSLKPEDAAIYYCAA

SEQ ID NO: 12309 - protein, 41 aa, Artificial Sequence
  Synthetic
IAYHDSVKGRFTISQDNVKNTVYLQMNSLKPEDTAIYYCVA

SEQ ID NO: 12310 - protein, 41 aa, Artificial Sequence
  Synthetic
TSYAESVKGRFIISRDNAKNTVYLQMNSLEPEDTAMYYCAT

SEQ ID NO: 12311 - protein, 41 aa, Artificial Sequence
  Synthetic
TYYADSVKGRFAVSLDNAKNTVSLQINSLKVEDTAMYYCAA

SEQ ID NO: 12312 - protein, 41 aa, Artificial Sequence
  Synthetic
TYYAASVKGRFTISQNNAKNTVYLQMNALKPEDTAMYYCNM

SEQ ID NO: 12313 - protein, 41 aa, Artificial Sequence
  Synthetic
ATYADSVKGRFTMSQDGAKNTVNLQMNSLKPEDTAKYYCKI

SEQ ID NO: 12314 - protein, 41 aa, Artificial Sequence
  Synthetic
PYYADFVAGRFIISQDNTKKTLFLQMNSLKPEDTATYYCNS

SEQ ID NO: 12315 - protein, 41 aa, Artificial Sequence
  Synthetic
TWYAASVKGRFTISQDNAKNTVYLQMNSLEPEDTGIYYCAA

SEQ ID NO: 12316 - protein, 41 aa, Artificial Sequence
  Synthetic
TYYADSVKGRFTISQDNAKKTVYLQMNSLKPEDTAIYYCAA

SEQ ID NO: 12317 - protein, 41 aa, Artificial Sequence
  Synthetic
TYYEDSVKGRFTISRDNAKNTVFLQMNNLKPEDTAMYYCAS

SEQ ID NO: 12318 - protein, 41 aa, Artificial Sequence
  Synthetic
AKYAESVKGRFTISQDNDKNAVYLQMNSLKPEDTATYYCKV

SEQ ID NO: 12319 - protein, 41 aa, Artificial Sequence
  Synthetic
TDYADSVKGRFTISQDNTENTLYLQMNSLKPEDTGMYYCAA

SEQ ID NO: 12320 - protein, 41 aa, Artificial Sequence
  Synthetic
TIYADSVKDRFAISQDNVKNSVYLQMNSLKPEDTAVYYCAV

SEQ ID NO: 12321 - protein, 41 aa, Artificial Sequence
  Synthetic
TYYDDSVKGRFTISQDYAKSMVFLPMNSLEPEDTAMYYCNM

SEQ ID NO: 12322 - protein, 41 aa, Artificial Sequence
  Synthetic
TYYAESVKGRFTISQDNDKKTVYFQMNSLKPEDTAMYLCNT

SEQ ID NO: 12323 - protein, 41 aa, Artificial Sequence
  Synthetic
TYYSNSVKGRFTISQDKSKNTVYLTMNSLAPEDTAIYYCAA

SEQ ID NO: 12324 - protein, 41 aa, Artificial Sequence
  Synthetic
TAYADSVKGRFTISRDGDKNTIDLLINSLKLEDTAIYYCAA

SEQ ID NO: 12325 - protein, 41 aa, Artificial Sequence
  Synthetic
TFDSDHLKGRFTITQDNAENTVYLIMNSLIPEDTAIYYCAA

SEQ ID NO: 12326 - protein, 41 aa, Artificial Sequence
  Synthetic
SYYTDSVEGRFTISRDNYKNMVQLHMTRLTPEDTGMYYCGA

SEQ ID NO: 12327 - protein, 41 aa, Artificial Sequence
  Synthetic
TFYADSVKGRFTISEGDDEDTVYLQMNNLQPEDTAMYYCTA

SEQ ID NO: 12328 - protein, 41 aa, Artificial Sequence
  Synthetic
TYYTDSVKGRFTISRGNMKNTLSLQMLSLIPEDPAVYYCAA

SEQ ID NO: 12329 - protein, 41 aa, Artificial Sequence
  Synthetic
TWYADSVKGRFTISQDHARSAKYLQMDSLKPEDTAMYYCAA

SEQ ID NO: 12330 - protein, 41 aa, Artificial Sequence
  Synthetic
FSYYMDSVKGRFTISQDSSNTVYLEMDSLKPEDTAMYYCAA

SEQ ID NO: 12331 - protein, 41 aa, Artificial Sequence
  Synthetic
YYFDDSMKPRFTISRETAKNTVHLQMTSLKPEDTAIYYCAV

SEQ ID NO: 12332 - protein, 41 aa, Artificial Sequence
  Synthetic
SGYADSAKGRFTISYDNVKNTMYLQMSNLKAEDTGTYYCAA

SEQ ID NO: 12333 - protein, 41 aa, Artificial Sequence
  Synthetic
TNYADSVKGRFTISRDNGKNTADLQMNSLILEDTGVYYCAA

SEQ ID NO: 12334 - protein, 41 aa, Artificial Sequence
  Synthetic
TLYADSVKARFTISRDNAKNTMWLQMDSLKPEDTAIYYCAR

SEQ ID NO: 12335 - protein, 41 aa, Artificial Sequence; identical to SEQ ID NO: 12118
  Synthetic

SEQ ID NO: 12336 - protein, 41 aa, Artificial Sequence
  Synthetic
TYYADSVKGRFAISRDNAKSTLYLQMNGLKPEDTAMYYCAS

SEQ ID NO: 12337 - protein, 41 aa, Artificial Sequence
  Synthetic
TTYADSVKGRFTISQNNAKNTVFLQMDSLQPGDTAMYFCKT

SEQ ID NO: 12338 - protein, 41 aa, Artificial Sequence
  Synthetic
TFYSDSVKGRFTISQDNATNTVYLQMDSLKPEDTAMYYCAA

SEQ ID NO: 12339 - protein, 41 aa, Artificial Sequence
  Synthetic
TKYGDSVKGRFTVSRDNNKNTMYLEMTSLKPDDAGVYYCAH

SEQ ID NO: 12340 - protein, 41 aa, Artificial Sequence
  Synthetic
TYYADSAKGRFTISRDNAKNAVYLQMNSLKPDDTATYYCAA

SEQ ID NO: 12341 - protein, 41 aa, Artificial Sequence
  Synthetic
VNYADSVKGRFTISQDNAKNTVYLQMNSLKPEDTAMYYCKI

SEQ ID NO: 12342 - protein, 41 aa, Artificial Sequence
  Synthetic
PYLADSVKGRFTVSLDRPENTVYLEMNNLKPEDTGTYICAA

SEQ ID NO: 12343 - protein, 41 aa, Artificial Sequence
  Synthetic
TSYADSVKGRFTISRDNAKNAVYLQMNSLKPEETAMYYCKI

SEQ ID NO: 12344 - protein, 41 aa, Artificial Sequence
  Synthetic
TYYADSLKGRFTISRDNARNTLYLQMNSLKPEDTAMYYCAL

SEQ ID NO: 12345 - protein, 41 aa, Artificial Sequence; identical to SEQ ID NO: 7315
  Synthetic

SEQ ID NO: 12346 - protein, 41 aa, Artificial Sequence
  Synthetic
ITYAESVKGRFTISRDNAKSTVYLQMNSLKPEDTATYYCKS

SEQ ID NO: 12347 - protein, 41 aa, Artificial Sequence
  Synthetic
TYYADSVKGRFTISQDNRKNTVYLQMTSLKPEDTAMYYCAA

SEQ ID NO: 12348 - protein, 41 aa, Artificial Sequence
  Synthetic
TYSADSVKGRFTISQDNGKNTVYLHMNTLKPEDTAIYYCAA

SEQ ID NO: 12349 - protein, 41 aa, Artificial Sequence
  Synthetic
GSYADVVKGRFTISQDKAKDKVYLQMNNLKPEDTAMYSCKT

SEQ ID NO: 12350 - protein, 41 aa, Artificial Sequence
  Synthetic
TSYADPVKGRFTISQDNAKNTVYLQMNNLKPEDTGMYYCAL

SEQ ID NO: 12351 - protein, 41 aa, Artificial Sequence
  Synthetic
VWYVDSVKGRFTISHDNAKKMLYLEMNNLQPEDTATYYCAA

SEQ ID NO: 12352 - protein, 41 aa, Artificial Sequence
  Synthetic
TYYADAVKGRFTISRDNAKNTVYLPMNSLKPEDTAMYYCAA

SEQ ID NO: 12353 - protein, 41 aa, Artificial Sequence
  Synthetic
RYSADSVKGRFTLSQDNAKNTVYLHMNSLKPEDTAIYYCAA

SEQ ID NO: 12354 - protein, 41 aa, Artificial Sequence
  Synthetic
TVTSDSVKGRFTISQDRIKNTVYLQMNSLNPEDTAMYYCAA

SEQ ID NO: 12355 - protein, 41 aa, Artificial Sequence
  Synthetic
TDYVDSVNGRFTVSRDNADNTIHLQMNSLKPEDTAVYYCAT

SEQ ID NO: 12356 - protein, 41 aa, Artificial Sequence
  Synthetic
TYYQDSVKGRFTISRDSAGITLFLQMNSLQPEDTAMYYCEA

SEQ ID NO: 12357 - protein, 41 aa, Artificial Sequence
  Synthetic
INYADSVKGRFTISQDNAKNTVYLQMNSLKPEDTAMYYCKT

SEQ ID NO: 12358 - protein, 41 aa, Artificial Sequence
  Synthetic
TVYADSVKGRFTISQDNAKSTVYLQMNNLKPEDTAMYYCKI

SEQ ID NO: 12359 - protein, 41 aa, Artificial Sequence
  Synthetic
PFYADSVKGRFTISQDTAKNTVYLQMDSLLPKDTAIYYCAA

SEQ ID NO: 12360 - protein, 41 aa, Artificial Sequence
  Synthetic
TNYVTSVKGRFTISQDNAKNTVYLQMNSLKPDDTAIYYCAL

SEQ ID NO: 12361 - protein, 41 aa, Artificial Sequence
  Synthetic
KYYGDSVKGRFTISQDNTKSTVYLQMNSLKPEDTGMYYCAA

SEQ ID NO: 12362 - protein, 41 aa, Artificial Sequence
  Synthetic
AQYANSVKGRFTISRDKAKNVMYLQMNNLKPEDTAIYYCAQ

SEQ ID NO: 12363 - protein, 41 aa, Artificial Sequence
  Synthetic
QYYADSVKGRFTASQDRDKRTMYLQMNSLEVEDTGVYYCAV

SEQ ID NO: 12364 - protein, 41 aa, Artificial Sequence
  Synthetic
THYADSAKGRFTVSQDNAKTTVYLQMNSLEPEDTGMYYCAA

SEQ ID NO: 12365 - protein, 41 aa, Artificial Sequence
  Synthetic
TYHADSLKDRFTASQDRAKRTMYLQMNSLKVEDTGMYYCAV

SEQ ID NO: 12366 - protein, 41 aa, Artificial Sequence
  Synthetic
TYYADSVKGRFTISHDNAKNTVYLQMNSLKSEDTAIYYCAS

SEQ ID NO: 12367 - protein, 41 aa, Artificial Sequence
  Synthetic
PEYANSVKGRFTISRDRAENIVDLQMNSLKPEETAIYYCAQ

SEQ ID NO: 12368 - protein, 41 aa, Artificial Sequence
  Synthetic
TRYAEAVKGRFTISRDKAKNTVYLQMNSLQPDDTAMYYCHA

SEQ ID NO: 12369 - protein, 41 aa, Artificial Sequence
  Synthetic
TYYADSMKGRFAISQDNPKNTVYLELHNLQPQDTAMYYCAA

SEQ ID NO: 12370 - protein, 41 aa, Artificial Sequence
  Synthetic
QYYADSVKDRFTASQDRAKRTMYLQMNSLEVEDTGMYYCAV

SEQ ID NO: 12371 - protein, 41 aa, Artificial Sequence
  Synthetic
TYYADSVKGRFTISRDNTKNTVYLQMNNLKSEDTAIYYCAA

SEQ ID NO: 12372 - protein, 41 aa, Artificial Sequence
  Synthetic
NTYYADSVKGRFTIPQGSTRLVYLQMNSLKPEDTAIYYCAA

SEQ ID NO: 12373 - protein, 41 aa, Artificial Sequence
  Synthetic
TYYAASVEGRFTISLDRTKSTVYLQMNSLKPEDSGIYYCAS

SEQ ID NO: 12374 - protein, 41 aa, Artificial Sequence
  Synthetic
QYYADSVKGRFTVSRDNAKNTIYLQMNTLKPSDTAMYYCAA

SEQ ID NO: 12375 - protein, 41 aa, Artificial Sequence
  Synthetic
LPYADFPVGRFAISRDGAKNILYLQMNSLKPEDTAVYYCAA

SEQ ID NO: 12376 - protein, 41 aa, Artificial Sequence
  Synthetic
VRYYGTSVEGRFSISKGNNREVLLQMNSLKPEDTAMYYCAA

SEQ ID NO: 12377 - protein, 41 aa, Artificial Sequence
  Synthetic
VHYTDSVKGRFAISQDNGANTVHLVMNNLKPEDTAIYYCAA

SEQ ID NO: 12378 - protein, 41 aa, Artificial Sequence
  Synthetic
AYAADSVKGRFTISQDRAKNTVYLQMNSLKPEDTAMYYCAT

SEQ ID NO: 12379 - protein, 41 aa, Artificial Sequence
  Synthetic
TYVADSVKDRFIISRENAENTVALVMSDLKAEDSAMYYCAA

SEQ ID NO: 12380 - protein, 41 aa, Artificial Sequence
  Synthetic
TYYADDVKGRFAISQDRAKNTIYLQLNSLKPEDTGMYFCAT

SEQ ID NO: 12381 - protein, 41 aa, Artificial Sequence
  Synthetic
AYYADSVKGRFTISRDNAKNTVYLQMNSLKPEDTAMFFCAG

SEQ ID NO: 12382 - protein, 41 aa, Artificial Sequence
  Synthetic
TYYADSVKGRFTISRDNNAKNMLYLHMNSLKPEDTAIYYCA

SEQ ID NO: 12383 - protein, 41 aa, Artificial Sequence
  Synthetic
TYYADSVKGRFTISRDNYKNTVYLQMNSLKPEDTAIYYCAS

SEQ ID NO: 12384 - protein, 41 aa, Artificial Sequence
  Synthetic
TYHAASVKGRFTISQDKANHRVYLQMNSLKPEDTAMYFCAA

SEQ ID NO: 12385 - protein, 41 aa, Artificial Sequence
  Synthetic
TEYSESVKGRLTISKDNAKNTLYLQMNTLRPDDTAVYYCAR

SEQ ID NO: 12386 - protein, 41 aa, Artificial Sequence
  Synthetic
TNYADSVKGRFTISRDNAKNTLYLQLNSLKTEDTAMYYCAN

SEQ ID NO: 12387 - protein, 41 aa, Artificial Sequence
  Synthetic
TYYADPVKGRFTISRDNAELTLNLQMNSLKPEDTAVYYCAN

SEQ ID NO: 12388 - protein, 41 aa, Artificial Sequence
  Synthetic
TQYCDSVKGRFTISRDNAKNTLFLQMNGLRPEDTARYYCVI

SEQ ID NO: 12389 - protein, 41 aa, Artificial Sequence
  Synthetic
ADYLDSVKGRFTISRDNAKNTLHLQMDGVQPEDTAVYYCAT

SEQ ID NO: 12390 - protein, 41 aa, Artificial Sequence
  Synthetic
TNYAYDVHGRFTISRDNAKNTVYLQMNNPNPDDTAVYYCNI

SEQ ID NO: 12391 - protein, 41 aa, Artificial Sequence
  Synthetic
TNYSPSVKGRFTISRDNAKNTVYLQLNSLKPDDTAVYYCRY

SEQ ID NO: 12392 - protein, 41 aa, Artificial Sequence
  Synthetic
EYYADSVKGRFTISRDKSKNIVYLRMNSLKTEDTAVYYCAA

SEQ ID NO: 12393 - protein, 41 aa, Artificial Sequence
  Synthetic
TNYKDSVKGRFTISRDNAKKTVCLQMNSLKPDDTAVYYCNA

SEQ ID NO: 12394 - protein, 41 aa, Artificial Sequence
  Synthetic
TRYADSLKGRFIISRDNAAKTVDLQMDKLKPEDTAAYICAD

SEQ ID NO: 12395 - protein, 41 aa, Artificial Sequence
  Synthetic
TYYADSAKGRFIISRDNAKNTGYLQMDSLKPEDTAVYYCAR

SEQ ID NO: 12396 - protein, 41 aa, Artificial Sequence
  Synthetic
TYVANSVKDRFSVSRDNAKNTVYLQMNSLKPEDTAVYYCYM

SEQ ID NO: 12397 - protein, 41 aa, Artificial Sequence
  Synthetic
VHYASSVTGRFIMSRDDAQNTEYLEMNGLKIEDTAVYYCAL

SEQ ID NO: 12398 - protein, 41 aa, Artificial Sequence
  Synthetic
TDYADSVKGRFTISKDNAKALMYLQMTSLRPEDTAVYYCVG

SEQ ID NO: 12399 - protein, 41 aa, Artificial Sequence
  Synthetic
TVYADSVKGRFTTSSDKPKNIEYLQMNSLKPEDTAVYYCSA

SEQ ID NO: 12400 - protein, 41 aa, Artificial Sequence
  Synthetic
HFYSEGARGRFTMSRDNAKNTASLRMNSLKPSDTAVYYCAA

SEQ ID NO: 12401 - protein, 41 aa, Artificial Sequence
  Synthetic
TYYADSVKGRFTISRDNAKNTVYLQMNSLKPEDTAVYYCNV

SEQ ID NO: 12402 - protein, 41 aa, Artificial Sequence
  Synthetic
THYADSVEGRFTISRDNAKNTMYLQMDSLSPEDTAIYYCNA

SEQ ID NO: 12403 - protein, 41 aa, Artificial Sequence
  Synthetic
TQYAESVTGRFTISRDVAKNTVYLEMNNLKPDDTAVYTCHA

SEQ ID NO: 12404 - protein, 41 aa, Artificial Sequence
  Synthetic
TDYADSVKGRFTIWRDDANNTVYLQMVNVKAEDTAIYYCNV

SEQ ID NO: 12405 - protein, 41 aa, Artificial Sequence
  Synthetic
INYLNSVKGRVTISRDNAKNTVYLQMNSLMPEDTAVYVCNA

SEQ ID NO: 12406 - protein, 41 aa, Artificial Sequence
  Synthetic
LYYADSVKGRFTISRDNAKNTVYLQMNSLKPEDTAIYYCNA

SEQ ID NO: 12407 - protein, 41 aa, Artificial Sequence
  Synthetic
TYYADSVKGRFTISRDNAKNTVYLQMNSLKPEDTAIYYCNA

SEQ ID NO: 12408 - protein, 41 aa, Artificial Sequence
  Synthetic
TLYTDSVKGRFTISRANGQNTVYLQMNSLKPEDTAVYYCAA

SEQ ID NO: 12409 - protein, 41 aa, Artificial Sequence
  Synthetic
TNYADFVKGRFTISRDNARSIIYLQMNSLKPEDTAVYYCYA

SEQ ID NO: 12410 - protein, 41 aa, Artificial Sequence
  Synthetic
TFYADSVKGRFTISRDNAKNTVYLQMSSLKPEDTAVYYCAA

SEQ ID NO: 12411 - protein, 41 aa, Artificial Sequence
  Synthetic
VTYADSVKGRFTISRDNIKRTAGLQMNSLKPEDTAVYYCNA

SEQ ID NO: 12412 - protein, 41 aa, Artificial Sequence
  Synthetic
TMYKDSVKGRFTISRDNVKRTAGLQMNNLKPEDTAVYYCNA

SEQ ID NO: 12413 - protein, 41 aa, Artificial Sequence
  Synthetic
TNYADFAKGRFTISRDDVKNTVYLQMNNLKPEDTAVYYCNT

SEQ ID NO: 12414 - protein, 41 aa, Artificial Sequence
  Synthetic
TNYADFAKGRFTISRDNIKNTVFLRMTNLKPEDTAVYYCNT

SEQ ID NO: 12415 - protein, 41 aa, Artificial Sequence
  Synthetic
TNYADFAKGRFTISRDNVKNAVYLQMNNLKPEDTAIYYCNT

SEQ ID NO: 12416 - protein, 41 aa, Artificial Sequence
  Synthetic
KNYAGFAQGRFTISRDNIKNTVYLQMNDLKPEDTAVYYCNT

SEQ ID NO: 12417 - protein, 41 aa, Artificial Sequence
  Synthetic
TNYRDFVKGRFTISINDAKNTLYLQMDSLKPEDTAVYYCNT

SEQ ID NO: 12418 - protein, 41 aa, Artificial Sequence
  Synthetic
TRYADSVKGRFTISRDNDKNMVYLQMNSLKPEDTAVYYCAV

SEQ ID NO: 12419 - protein, 41 aa, Artificial Sequence
  Synthetic
TRYADSVKGRFTISRDNDKNTVYLQMNSLKPEDTAVYYCAT

SEQ ID NO: 12420 - protein, 41 aa, Artificial Sequence
  Synthetic
RNYDDSVKGRFAISRDSAKNTVYLQMNSLKPEDTAVYYCAA

SEQ ID NO: 12421 - protein, 41 aa, Artificial Sequence
  Synthetic
TSYADSVKGRFTISRDNANNTFYLQMNSLKPEDTAVYYCYA

SEQ ID NO: 12422 - protein, 41 aa, Artificial Sequence
  Synthetic
TSYADSVKGRFTLSRDNVNNTMYLQMNSLRPEDTAVYYCYA

SEQ ID NO: 12423 - protein, 41 aa, Artificial Sequence
  Synthetic
TILEDSVKGRFTISRDNAKKTVYVQMNNLKPEDTAVYYCAA

SEQ ID NO: 12424 - protein, 41 aa, Artificial Sequence
  Synthetic
TYYAASVRGRFTISGDSAKNVVALQMSSLRPEDTAVYYCAA

SEQ ID NO: 12425 - protein, 41 aa, Artificial Sequence
  Synthetic
TSYTNSVKGRFIISRDNEKNIVYLQMTRLKPEDTAVYYCAA

SEQ ID NO: 12426 - protein, 41 aa, Artificial Sequence
  Synthetic
LAYADSVKGRFTISRDNVKNTGYLQMNSLKPEDTAVYYCAT

SEQ ID NO: 12427 - protein, 41 aa, Artificial Sequence
  Synthetic
TSYTNSVKGRFIISRDNAKNIVYLQMTRLKPDDTAVYFCAA

SEQ ID NO: 12428 - protein, 41 aa, Artificial Sequence
  Synthetic
TYYADSVKGRFTISRDNAKNTMFLQMNTLRPDDTAVYYCAA

SEQ ID NO: 12429 - protein, 41 aa, Artificial Sequence
  Synthetic
INYSGTVKGRFTISRDADKTTVYLQMNSLTPEDTAVYYCAA

SEQ ID NO: 12430 - protein, 41 aa, Artificial Sequence; identical to SEQ ID NO: 12425
  Synthetic

SEQ ID NO: 12431 - protein, 41 aa, Artificial Sequence
  Synthetic
TYYADSVKGRFTVSRHNAKNTVYLQMNSLKPEDAAVYYCAE

SEQ ID NO: 12432 - protein, 41 aa, Artificial Sequence
  Synthetic
AIYAYPVKGRFTMSRDNAKNTVYLEMNSLKPEDTAVFYCAA

SEQ ID NO: 12433 - protein, 41 aa, Artificial Sequence
  Synthetic
IYVADSVKGRFTISRDNAKDTVYLQMNSLKPEDTAVYYCAV

SEQ ID NO: 12434 - protein, 41 aa, Artificial Sequence
  Synthetic
TNYADSVKGRFTISRDNAKNAVYLQMNSLKPEDTAVYFCNA

SEQ ID NO: 12435 - protein, 41 aa, Artificial Sequence
  Synthetic
TYYADSLKGRFTISRDNAKNTVYLQMNSLKPEDTAIYYCAA

SEQ ID NO: 12436 - protein, 41 aa, Artificial Sequence
  Synthetic
TNYADSVKGRFTISRDNAENTVSLQMNSLKPEDTAVYYCNA

SEQ ID NO: 12437 - protein, 41 aa, Artificial Sequence
  Synthetic
TNYADSVKGRFTISRDGAKSMVSLQMNSLKPEDTAVYYCNA

SEQ ID NO: 12438 - protein, 41 aa, Artificial Sequence
  Synthetic
TYYADSVKGRFTISRGNAENTVYLQMNSLKPEDTAVYTCAI

SEQ ID NO: 12439 - protein, 41 aa, Artificial Sequence
  Synthetic
TNYADSVKGRFTISRDNAKNTVYLQMNNLEPEDTAVYYCAQ

SEQ ID NO: 12440 - protein, 41 aa, Artificial Sequence
  Synthetic
ANYADSVKGRFTISRDNAKNTVYLQMNNLEPKDTAVYYCAQ

SEQ ID NO: 12441 - protein, 41 aa, Artificial Sequence
  Synthetic
THYADSVKGRFTISRDVAKDIMYLQMNSLKPEDTAVYYCAE

SEQ ID NO: 12442 - protein, 41 aa, Artificial Sequence
  Synthetic
TYYGDSVKGRFTISRDNAQNMVYLQMNSLKPEDTAIYFCAI

SEQ ID NO: 12443 - protein, 41 aa, Artificial Sequence
  Synthetic
TYYADSVKGRFTISRDNAKNTVDLRMTSLKPEDTAVYYCSA

SEQ ID NO: 12444 - protein, 41 aa, Artificial Sequence; identical to SEQ ID NO: 7301
  Synthetic

SEQ ID NO: 12445 - protein, 41 aa, Artificial Sequence; identical to SEQ ID NO: 7302
  Synthetic

SEQ ID NO: 12446 - protein, 41 aa, Artificial Sequence; identical to SEQ ID NO: 7303
  Synthetic

SEQ ID NO: 12447 - protein, 41 aa, Artificial Sequence; identical to SEQ ID NO: 7303
  Synthetic

SEQ ID NO: 12448 - protein, 41 aa, Artificial Sequence; identical to SEQ ID NO: 7288
  Synthetic

SEQ ID NO: 12449 - protein, 41 aa, Artificial Sequence; identical to SEQ ID NO: 7289
  Synthetic

SEQ ID NO: 12450 - protein, 41 aa, Artificial Sequence; identical to SEQ ID NO: 7145
  Synthetic

SEQ ID NO: 12451 - protein, 41 aa, Artificial Sequence
  Synthetic
TYYADSVKGRFTISRDNAKNTVDLQMISLKPEDTAVYYCSA

SEQ ID NO: 12452 - protein, 41 aa, Artificial Sequence; identical to SEQ ID NO: 12451
  Synthetic

SEQ ID NO: 12453 - protein, 41 aa, Artificial Sequence
  Synthetic
TYYADSVKGRFTISRDNAKNTVDLQMISLKPEDTAVYYCTA

SEQ ID NO: 12454 - protein, 41 aa, Artificial Sequence
  Synthetic
QYYPDPVKGRFTITRDNAKNTVYLQMNSLKPEDTAVYYCAA

SEQ ID NO: 12455 - protein, 41 aa, Artificial Sequence
  Synthetic
VYYTDSVKGRFTISRDNAKNTVSLQMSSLKPEDTAVYYCNA

SEQ ID NO: 12456 - protein, 41 aa, Artificial Sequence
  Synthetic
TNYADSVKGRFTISRDSAKNTLFLQLNSLKPEDTAVYYCYA

SEQ ID NO: 12457 - protein, 41 aa, Artificial Sequence
  Synthetic
TNYADSVKGRFTISRDNAKNTVYLQMNSLKPEDTAVYYCNR

SEQ ID NO: 12458 - protein, 41 aa, Artificial Sequence; identical to SEQ ID NO: 7146
  Synthetic

SEQ ID NO: 12459 - protein, 41 aa, Artificial Sequence; identical to SEQ ID NO: 7111
  Synthetic

SEQ ID NO: 12460 - protein, 41 aa, Artificial Sequence
  Synthetic
KFYPDSMKGRFSISRDNAKNTVYLQMNSLKPQDTAVYYCGT

SEQ ID NO: 12461 - protein, 41 aa, Artificial Sequence
  Synthetic
IDYTDSVKGRFTISRDNAKNTVFLQMNSLKPEDTAVYYCYA

SEQ ID NO: 12462 - protein, 41 aa, Artificial Sequence
  Synthetic
SYYADSVKGRFTISRDNAKNTVYLQMNSLKPEDTAVYYCAQ

SEQ ID NO: 12463 - protein, 41 aa, Artificial Sequence
  Synthetic
TSYADSVKGRFTISRDSAKSTVYLQMNSLKPEDTAVYFCAA

SEQ ID NO: 12464 - protein, 41 aa, Artificial Sequence
  Synthetic
RYYAASVKGRFTISRDNSKNTVYLQMNSLNPEDTAVYYCAS

SEQ ID NO: 12465 - protein, 41 aa, Artificial Sequence
  Synthetic
TDYADSVKGRFTISRDDAKNTVYLQMNSLKSEDTAVYFCNP

SEQ ID NO: 12466 - protein, 41 aa, Artificial Sequence
  Synthetic
TRFEGSAKGRFTISRDNANDTVYLQMSSLKPEDTAIYYCAA

SEQ ID NO: 12467 - protein, 41 aa, Artificial Sequence
  Synthetic
TYYADSVKGRFTISRDSAKDTMYLQMNTLKPEDTADYYCAI

SEQ ID NO: 12468 - protein, 41 aa, Artificial Sequence
  Synthetic
TFYADSVKGRFTISRDSAKNTVYLQMRSLRPEDTAVYYCAA

SEQ ID NO: 12469 - protein, 41 aa, Artificial Sequence
  Synthetic
TYYADSVKGRFTIARDSAKNTVYLEMNSLKPEDTAVYYCAA

SEQ ID NO: 12470 - protein, 41 aa, Artificial Sequence
  Synthetic
TYYADSVKGRFTISRDNAKMTVYLQMNSLKPEDTAAYYCSA

SEQ ID NO: 12471 - protein, 41 aa, Artificial Sequence
  Synthetic
TYYADFVKGRFTISRDNAKNTVYLQMNSLKPEDTAVYYCAA

SEQ ID NO: 12472 - protein, 41 aa, Artificial Sequence
  Synthetic
TTYADSVKGRFTISRDSAENTVYLQMNSLKPEDTAVYYCAA

SEQ ID NO: 12473 - protein, 41 aa, Artificial Sequence; identical to SEQ ID NO: 7105
  Synthetic

SEQ ID NO: 12474 - protein, 41 aa, Artificial Sequence
  Synthetic
TSYANSLKGRFTISRDNAKNTGYLYMNSLIPEDTAVYYCAA

SEQ ID NO: 12475 - protein, 41 aa, Artificial Sequence
  Synthetic
KYYADSVKGRFTIFRDNANTTVYLQMNSLKPEDTAVYYCAA

SEQ ID NO: 12476 - protein, 41 aa, Artificial Sequence
  Synthetic
TYYVDFVKGRFTISRDNAKNTVYLQMNSLKPEDTAVYYCAA

SEQ ID NO: 12477 - protein, 41 aa, Artificial Sequence
  Synthetic
TEYADSVKGRFTISRDSSKSTAYLQMNSLKPEDTAVYYCAA

SEQ ID NO: 12478 - protein, 41 aa, Artificial Sequence
  Synthetic
VLYTDSVKGRFTISTDNGKNMVYLQMNSLRPEDTAVYYCAG

SEQ ID NO: 12479 - protein, 41 aa, Artificial Sequence
  Synthetic
TYYGDFAKGRFTISRENSKNTVYLQMNSLKPEDTAVYTCAR

SEQ ID NO: 12480 - protein, 41 aa, Artificial Sequence
  Synthetic
TYIADSVKGRFTISRHNAKSTAYLQMNNLRPEDTAVYYCAA

SEQ ID NO: 12481 - protein, 41 aa, Artificial Sequence
  Synthetic
TAYADSVEGRFTISRDNAKNTVYLQMNSLKPEDTAVYYCAA

SEQ ID NO: 12482 - protein, 41 aa, Artificial Sequence
  Synthetic
TNYADSVKGRFSVSRDSAKNTVYLQMNDLKPEDTAVYYCAA

SEQ ID NO: 12483 - protein, 41 aa, Artificial Sequence
  Synthetic
SYYQDSVKGRFTISRDSANDTVYLQMNSLRPEDTAVYYCAQ

SEQ ID NO: 12484 - protein, 41 aa, Artificial Sequence
  Synthetic
TYYAASVKGRFTISRDNAKNTVYLQMNSLKPEDTAVYSCAA

SEQ ID NO: 12485 - protein, 41 aa, Artificial Sequence
  Synthetic
TNYGASIKGRFTISRDNAKNTVYLQMNNLNPEDTAVYYCNA

SEQ ID NO: 12486 - protein, 41 aa, Artificial Sequence
  Synthetic
TYYADSVKGRFTIARDNAKTMVYLQMNSLKPEDTAVYYCAA

SEQ ID NO: 12487 - protein, 41 aa, Artificial Sequence
  Synthetic
PAYADSVKGRFTISRDNAENTVYLQMNSLKPEDTAVYYCNI

SEQ ID NO: 12488 - protein, 41 aa, Artificial Sequence
  Synthetic
TNYADSVKGRFTISRDNAKNTVYLQMNTLKPEDTAVYYCAA

SEQ ID NO: 12489 - protein, 41 aa, Artificial Sequence
  Synthetic
SSYADSVKGRFTISRDSAKSTVYLQMNSLEPEDTAVYYCAA

SEQ ID NO: 12490 - protein, 41 aa, Artificial Sequence
  Synthetic
TTYASSLKDRFTISRDNAKNTVYLHMSSLKVEDTAVYYCDA

SEQ ID NO: 12491 - protein, 41 aa, Artificial Sequence
  Synthetic
ISYLDSVKGRFTIVRDNAKNTVILEMNSLTPEDTAVYYCYA

SEQ ID NO: 12492 - protein, 41 aa, Artificial Sequence
  Synthetic
TYYAASVKGRFTISRDNAKNTVLLQMSSLKPEDTGVYYCAA

SEQ ID NO: 12493 - protein, 41 aa, Artificial Sequence
  Synthetic
LDYEDSVKGRFTISRDNAKNTVYLQMNSLTPEDTAVYYCAA

SEQ ID NO: 12494 - protein, 41 aa, Artificial Sequence
  Synthetic
ILSSNSVRGRITISSDNAKNTVYLQMSTLAPEDTAIYYCAY

SEQ ID NO: 12495 - protein, 41 aa, Artificial Sequence
  Synthetic
TYYAGSVKGRLTISRDNAKNTVYLQMNSLKPEDTAVYYCAA

SEQ ID NO: 12496 - protein, 41 aa, Artificial Sequence
  Synthetic
TYYADSVKGRFTISRDNAKNTGNLQMNSMKPEDTAVYYCAA

SEQ ID NO: 12497 - protein, 41 aa, Artificial Sequence
  Synthetic
TYYADSVKGRFTISRDNAKNAAYLEMNSLKPEDTAVYMCAA

SEQ ID NO: 12498 - protein, 41 aa, Artificial Sequence
  Synthetic
TYYADSVKGRFTISRDNAKTTLAYLQMISLKPEDTAVYYCA

SEQ ID NO: 12499 - protein, 41 aa, Artificial Sequence
  Synthetic
TYYADSVKGRFTISGDIAKNTVYLQMNNLKPEDTAVYSCAA

SEQ ID NO: 12500 - protein, 41 aa, Artificial Sequence
  Synthetic
THYADSVKGRFTISRDNAKNTLYLQMNSLKPEDTAVYYCNA

SEQ ID NO: 12501 - protein, 41 aa, Artificial Sequence
  Synthetic
TYYEDSVKGRFTISRDGAKNTVYLQMNSLKPEDTAVYYCAA

SEQ ID NO: 12502 - protein, 41 aa, Artificial Sequence
  Synthetic
TNYADSVKGRFTISRDSAKITVYLQMDSLKPEDTAVYYCAA

SEQ ID NO: 12503 - protein, 41 aa, Artificial Sequence; identical to SEQ ID NO: 12474
  Synthetic

SEQ ID NO: 12504 - protein, 41 aa, Artificial Sequence
  Synthetic
KYYADSVKGRFTISRDNAKGTVYLQMNSLKPEDTAVYRCAA

SEQ ID NO: 12505 - protein, 41 aa, Artificial Sequence
  Synthetic
TYYHDSVKGRFTISRDNAKNTVYLQMNSLKPEDTAVYYCAG

SEQ ID NO: 12506 - protein, 41 aa, Artificial Sequence
  Synthetic
TYYLNHIKGRFTISRDNAKNTAYLQMNNLEPGDTAVYYCAA

SEQ ID NO: 12507 - protein, 41 aa, Artificial Sequence; identical to SEQ ID NO: 7159
  Synthetic

SEQ ID NO: 12508 - protein, 41 aa, Artificial Sequence; identical to SEQ ID NO: 7229
  Synthetic

SEQ ID NO: 12509 - protein, 41 aa, Artificial Sequence
  Synthetic
TIYRDAAKGRFTISRDDVKNQVYLQMTNLNPEDTGVYYCGA

SEQ ID NO: 12510 - protein, 41 aa, Artificial Sequence
  Synthetic
TRYADSVKDRFTISRDNAGSTLTLQMNSLKPEDTAVYYCHA

SEQ ID NO: 12511 - protein, 41 aa, Artificial Sequence
  Synthetic
RYYTDIAKDRFTISRVVANNTVLLHMNSVKPEDTAVYICRL

SEQ ID NO: 12512 - protein, 41 aa, Artificial Sequence
  Synthetic
TAYAASVKGRFTISRDNGENTVYLQMNSLKPEDTAVYTCNA

SEQ ID NO: 12513 - protein, 41 aa, Artificial Sequence; identical to SEQ ID NO: 7230
  Synthetic

SEQ ID NO: 12514 - protein, 41 aa, Artificial Sequence
  Synthetic
AAYADSVKDRFTISRDVLKNTMWMQMDSLKPEDSGSYYCRV

SEQ ID NO: 12515 - protein, 41 aa, Artificial Sequence; identical to SEQ ID NO: 7297
  Synthetic

SEQ ID NO: 12516 - protein, 41 aa, Artificial Sequence; identical to SEQ ID NO: 7298
  Synthetic

SEQ ID NO: 12517 - protein, 41 aa, Artificial Sequence; identical to SEQ ID NO: 7355
  Synthetic

SEQ ID NO: 12518 - protein, 41 aa, Artificial Sequence
  Synthetic
SYYADSVKGRFTISRDNAKNTVYLQMNSLKPEDTAVYYCAA

SEQ ID NO: 12519 - protein, 41 aa, Artificial Sequence; identical to SEQ ID NO: 12518
  Synthetic

SEQ ID NO: 12520 - protein, 41 aa, Artificial Sequence; identical to SEQ ID NO: 12518
  Synthetic

SEQ ID NO: 12521 - protein, 41 aa, Artificial Sequence
  Synthetic
SAYEDSVKGRFTISRDDAKNMVYLQMNRLKPEDTAVYYCNG

SEQ ID NO: 12522 - protein, 41 aa, Artificial Sequence
  Synthetic
TDYSDSVKGRFTISRDNAKNTVYLQMNSLRPEDTAVYYCAG

SEQ ID NO: 12523 - protein, 41 aa, Artificial Sequence
  Synthetic
PYYGDSVKGRFTISRDNAKNRMYLQMNSLKPEDTATYYCAA

SEQ ID NO: 12524 - protein, 41 aa, Artificial Sequence
  Synthetic
TYYADSVKGRFTISRDNAKNTVYLQMNSLKPEDTAVYYCTA

SEQ ID NO: 12525 - protein, 41 aa, Artificial Sequence
  Synthetic
TTYADSVKGRFTISRDTTKKTMYLEMNSLKPEDSGVYYCGL

SEQ ID NO: 12526 - protein, 41 aa, Artificial Sequence
  Synthetic
TDYADSVKDRFTISRDGAKNTMYLQMNSLKFEDTAVYYCAA

SEQ ID NO: 12527 - protein, 41 aa, Artificial Sequence
  Synthetic
TDYADSVKGRFTISRDNAKSTVYLQMNSLRPEDTAVYYCAG

SEQ ID NO: 12528 - protein, 41 aa, Artificial Sequence
  Synthetic
TYYADSVKGRFTISRDNAKNTVYLQMNRLKPEDTGVYYCAS

SEQ ID NO: 12529 - protein, 41 aa, Artificial Sequence
  Synthetic
TDYADSVKGRFTISRDNAKNTVYLQMNSLRPEDTAVYYCAG

SEQ ID NO: 12530 - protein, 41 aa, Artificial Sequence
  Synthetic
SAYEDSVKGRFIISRDDAKKMVYLQMNSLKPEDTAVYYCNG

SEQ ID NO: 12531 - protein, 41 aa, Artificial Sequence
  Synthetic
SAYEDSVKGRFAISRDNLKNMVYLQMNTLKAEDTAMYYCNY

SEQ ID NO: 12532 - protein, 41 aa, Artificial Sequence
  Synthetic
TEYADSVKGRFTISRDNANGMVYLRMSSLRPEDTAVYYCAA

SEQ ID NO: 12533 - protein, 41 aa, Artificial Sequence
  Synthetic
TYYADSVKDRFTTSRDIAKKTVYLQMNSLKPEDTAVYYCAA

SEQ ID NO: 12534 - protein, 41 aa, Artificial Sequence
  Synthetic
TSYPNSVKGRFTISRDNAKNTVDLQMNSLKSEDTAVYYCAG

SEQ ID NO: 12535 - protein, 41 aa, Artificial Sequence
  Synthetic
TYYADSVKGRFTISRDNAKNTVYLQMNSLKPEETAVYYCVA

SEQ ID NO: 12536 - protein, 41 aa, Artificial Sequence
  Synthetic
TYYTDFVKGRFTISRDNAKNTVYLQMNSLNPEDTAIYYCAA

SEQ ID NO: 12537 - protein, 41 aa, Artificial Sequence
  Synthetic
TDYADSVKGRFTISRDNAKNTVYLQMNSLKPEDTAVYYCAA

SEQ ID NO: 12538 - protein, 41 aa, Artificial Sequence
  Synthetic
TDYTDSVKGRFTISRDNAKNTVYLQMNSLKPEDTAVYICAA

SEQ ID NO: 12539 - protein, 41 aa, Artificial Sequence
  Synthetic
TYYADSVEGRFTISRDNAKNTVYLQMNSLKPEDTAVYYCAA

SEQ ID NO: 12540 - protein, 41 aa, Artificial Sequence
  Synthetic
TYYADSVKGRFTISRDNAKNTAYLQMNSLKPEDTAIYYCVA

SEQ ID NO: 12541 - protein, 41 aa, Artificial Sequence
  Synthetic
TYYADSVKGRFTISRDNAKNTVYLQMNSLKPEDTAVYYCVA

SEQ ID NO: 12542 - protein, 41 aa, Artificial Sequence
  Synthetic
TYYTDFVKGRFTISRDNAKNTVYLQMNSLKPEDTAIYYCAA

SEQ ID NO: 12543 - protein, 41 aa, Artificial Sequence
  Synthetic
TNYADSVKGRFTISNNNAKNTVFLQMNSLKPEDTAVYYCNV

SEQ ID NO: 12544 - protein, 41 aa, Artificial Sequence
  Synthetic
TDYGDSVKGRFTISGDNAKNTVFLQMNSLKPEDTAMYYCAA

SEQ ID NO: 12545 - protein, 41 aa, Artificial Sequence
  Synthetic
PKYADSVKGRFTISRDNAKNTVSLQMNSLKPEDTAVYYCNA

SEQ ID NO: 12546 - protein, 41 aa, Artificial Sequence
  Synthetic
ADYADSVKGRFTISRDNARHTVYLEMNNLKPEDTGVYYCNA

SEQ ID NO: 12547 - protein, 41 aa, Artificial Sequence
  Synthetic
TDYADSVKGRFTISRDNAKNTVYLQMNSLKPEDTAVYYCTA

SEQ ID NO: 12548 - protein, 41 aa, Artificial Sequence
  Synthetic
TDYADSVKGRFTISTDNAKNTVYLQMNSLKPEDTAIYFCVA

SEQ ID NO: 12549 - protein, 41 aa, Artificial Sequence
  Synthetic
TNYGDSVKGRFTISRDNAKNTVYLQMNNLKPEDTAVYQCCV

SEQ ID NO: 12550 - protein, 41 aa, Artificial Sequence
  Synthetic
TNYADSVKGRFTASRDNTKNTVFLQMNSLKPEDTAVYYCNA

SEQ ID NO: 12551 - protein, 41 aa, Artificial Sequence
  Synthetic
TDYGDSVKGRFTISRDNAENTVYLQMGSLKPDDTAVYYCNA

SEQ ID NO: 12552 - protein, 41 aa, Artificial Sequence
  Synthetic
TLYADSVKGRFTISRDNAKNTVYLQMNSLKPEDTAVYYCAA

SEQ ID NO: 12553 - protein, 41 aa, Artificial Sequence
  Synthetic
TNYADSVKGRFTISTDNAKKTVFLQMNSLKPEDTAVYYCNV

SEQ ID NO: 12554 - protein, 41 aa, Artificial Sequence
  Synthetic
LTYSDSVKGRFIISRDPTKNMVYLQMNELKPEDTAVYYCAA

SEQ ID NO: 12555 - protein, 41 aa, Artificial Sequence
  Synthetic
INYADSVKGRFTISRDNTQKTVYLQMNSLKYDDTAVYFCAA

SEQ ID NO: 12556 - protein, 41 aa, Artificial Sequence
  Synthetic
KTDSNSAKGRFTISRNNAKNTVDLQMNSLKPEDTAVYYCAA

SEQ ID NO: 12557 - protein, 41 aa, Artificial Sequence; identical to SEQ ID NO: 12556
  Synthetic

SEQ ID NO: 12558 - protein, 41 aa, Artificial Sequence
  Synthetic
TSYADSVKGRFTISRDNAKNTVDLQMNSLKSEDTAVYYCAG

SEQ ID NO: 12559 - protein, 41 aa, Artificial Sequence
  Synthetic
TSYADSVKGRFTISRDSAKNTVDLQMNSLKSEDTAVYYCAG

SEQ ID NO: 12560 - protein, 41 aa, Artificial Sequence
  Synthetic
TSYADSVKNRFTISRDNAKNTVYLQMSSLKPEDTAVYYCAG

SEQ ID NO: 12561 - protein, 41 aa, Artificial Sequence
  Synthetic
TSYTNSVKGRFTISRDNAKNTVDLQMNSLKSEDTAVYYCAG

SEQ ID NO: 12562 - protein, 41 aa, Artificial Sequence
  Synthetic
TYYADSVKGRFTISRDNAKNTMYLQVNSLKPEDTAVYYCAG

SEQ ID NO: 12563 - protein, 41 aa, Artificial Sequence
  Synthetic
TSYADSVKGRFTISRDNAKNTVDLQMNSLKSEDTAVYYCVG

SEQ ID NO: 12564 - protein, 41 aa, Artificial Sequence
  Synthetic
TSYADSVKGRFTISRDNAKNTVDLQMNALKSEDTAVYYCVG

SEQ ID NO: 12565 - protein, 41 aa, Artificial Sequence
  Synthetic
TNYRDSVEGRFTISRDDVKNTVYLQMNSLKPEDTAVYYCAA

SEQ ID NO: 12566 - protein, 41 aa, Artificial Sequence
  Synthetic
ANYRDSVEGRFTISRDDSKNTVYLQMNSLKPEDTAVYYCAA

SEQ ID NO: 12567 - protein, 41 aa, Artificial Sequence
  Synthetic
SSTDTGDSVKGRFTTFKDNASLYLQMKGLKPEDSAVYYCAA

SEQ ID NO: 12568 - protein, 41 aa, Artificial Sequence
  Synthetic
TYYEDSVKGRFTISRDNAKSTVFLQMNRLKPEDTAVYYCGA

SEQ ID NO: 12569 - protein, 41 aa, Artificial Sequence
  Synthetic
TYSADSVKGRFTISRDNAKNTAYLQMNSLKPEDTAVYYCAA

SEQ ID NO: 12570 - protein, 41 aa, Artificial Sequence
  Synthetic
TSYADSVKGRFTISRDNAKNAVYLQMNSLKPEDTAVYYCAA

SEQ ID NO: 12571 - protein, 41 aa, Artificial Sequence
  Synthetic
ADYSDSVKGRFTISRDNAKKTLYLQMSSLQPEDTGVYYCAA

SEQ ID NO: 12572 - protein, 41 aa, Artificial Sequence
  Synthetic
TRYADSVKGRFTISRDNAKNTVYLQMTSLKVEDTAVYHCNV

SEQ ID NO: 12573 - protein, 41 aa, Artificial Sequence
  Synthetic
TSYEDSVKGRFTISRDNDKNTVYLRMNSLKPEDTAVYYCAQ

SEQ ID NO: 12574 - protein, 41 aa, Artificial Sequence
  Synthetic
TYYADSVKGRFTISRDNAKNTVYLQMNGLKPEDTAVYSCAA

SEQ ID NO: 12575 - protein, 41 aa, Artificial Sequence
  Synthetic
TYYTDSVKGRFTISRDNAKNTVYLQMNGLKPEDTAVYYCAA

SEQ ID NO: 12576 - protein, 41 aa, Artificial Sequence
  Synthetic
GVYSDSVKGRFTISRDNAKNTLYLQMNSLKPEDTAVYYCAA

SEQ ID NO: 12577 - protein, 41 aa, Artificial Sequence
  Synthetic
MDYADSVKGRFTISRDIAKNTVYLQMNSLKPEDTAVYYCAA

SEQ ID NO: 12578 - protein, 41 aa, Artificial Sequence; identical to SEQ ID NO: 7126
  Synthetic

SEQ ID NO: 12579 - protein, 41 aa, Artificial Sequence
  Synthetic
TDYADSVKGRFTISRDKAKNTVALQMNSLKPENTAVYYCAA

SEQ ID NO: 12580 - protein, 41 aa, Artificial Sequence
  Synthetic
TYYADSVKGRFTISRDNAKNTVYLQMNSLKAEDTAVYYCAA

SEQ ID NO: 12581 - protein, 41 aa, Artificial Sequence
  Synthetic
TYYGDSVKGRFTISRNNARNTVYLQMNSLKPEDTAVYYCNA

SEQ ID NO: 12582 - protein, 41 aa, Artificial Sequence
  Synthetic
GTTNYVDSVKGRFTISRDNAKVYLLMNILKPEDTAVYYCAV

SEQ ID NO: 12583 - protein, 41 aa, Artificial Sequence
  Synthetic
PYYADSVKGRFTISRDNAKNTVYLQMNSLKPEDTAVYYCAA

SEQ ID NO: 12584 - protein, 41 aa, Artificial Sequence
  Synthetic
TNYADSLKGRFTISRDNAKNTMYLQMDSLKPEDTAVYYCAA

SEQ ID NO: 12585 - protein, 41 aa, Artificial Sequence
  Synthetic
TNYADSVKGRFTISRDNAINTVYLQMNSLKPEDTAVYYCNI

SEQ ID NO: 12586 - protein, 41 aa, Artificial Sequence
  Synthetic
VYYADSVKGRFTISREVDKNAVYLQMNSLKSEDTAVYYCAA

SEQ ID NO: 12587 - protein, 41 aa, Artificial Sequence
  Synthetic
ISYTDSVKGRFTISRDNAKNTVWLQMNSLKPEDTAVYYCAQ

SEQ ID NO: 12588 - protein, 41 aa, Artificial Sequence
  Synthetic
TVYADSVKGRFTISRDNGKNMMYLQMSSLKPEDTAVYYCAG

SEQ ID NO: 12589 - protein, 41 aa, Artificial Sequence; identical to SEQ ID NO: 7160
  Synthetic

SEQ ID NO: 12590 - protein, 41 aa, Artificial Sequence
  Synthetic
PNYEDSVNGRFTIARDNAKNTMYLQMNSLKPEDTAVYYCAA

SEQ ID NO: 12591 - protein, 41 aa, Artificial Sequence
  Synthetic
TYHADSVKGRFTVSRDNAKNTAYLQMNSLSPEDTAVYYCAA

SEQ ID NO: 12592 - protein, 41 aa, Artificial Sequence
  Synthetic
TSSADSVRDRFTISRDTPKNLVYLQMDSLKPEDTAVYYCAA

SEQ ID NO: 12593 - protein, 41 aa, Artificial Sequence
  Synthetic
TYNADSVEGRFAISRDNAKNTVYLQMNSLRPEDAAVYYCAG

SEQ ID NO: 12594 - protein, 41 aa, Artificial Sequence; identical to SEQ ID NO: 12590
  Synthetic

SEQ ID NO: 12595 - protein, 41 aa, Artificial Sequence
  Synthetic
TYYADSVKGRFTISRDNTKDTVYLQTNNLKPEDTAVYYCAA

SEQ ID NO: 12596 - protein, 41 aa, Artificial Sequence
  Synthetic
PNYEDSVNGRFTIARDNAKNTMYLQMNSLEPEDTAVYYCAA

SEQ ID NO: 12597 - protein, 41 aa, Artificial Sequence; identical to SEQ ID NO: 12590
  Synthetic

SEQ ID NO: 12598 - protein, 41 aa, Artificial Sequence
  Synthetic
SNYADAVEGRFTISRDNDKNTVYLQMNSLKPEDTAAYYCAA

SEQ ID NO: 12599 - protein, 41 aa, Artificial Sequence
  Synthetic
TYYVDSVKGRFTVSRDNAKNTAYLQMNSLSPEDTAVYYCAA

SEQ ID NO: 12600 - protein, 41 aa, Artificial Sequence
  Synthetic
TYYEDSVKGRFTISRDNAKNTVYLQMDSLASEDTGVYYCAA

SEQ ID NO: 12601 - protein, 41 aa, Artificial Sequence
  Synthetic
TDYGDFVKGRFTVSRDNAKNTVYLQMNSMKPEDTAVYYCAA

SEQ ID NO: 12602 - protein, 41 aa, Artificial Sequence
  Synthetic
TYVPDSVKGRFTISRDNAKNTVYLELNSLNPEDTAVYTCAA

SEQ ID NO: 12603 - protein, 41 aa, Artificial Sequence
  Synthetic
TYYADSVKGRFTISRDSARNTIYLQMNSLKPEDTAVYYCSA

SEQ ID NO: 12604 - protein, 41 aa, Artificial Sequence
  Synthetic
TYYADSVKGRFSISMDNAKNTVLLQMNSLKPEDTAVYYCAA

SEQ ID NO: 12605 - protein, 41 aa, Artificial Sequence
  Synthetic
KEYADFAKGRFTISRENVKRTAYLIMTGLKPEDAADYFCSI

SEQ ID NO: 12606 - protein, 41 aa, Artificial Sequence
  Synthetic
DRYMNSVAGRFTISKDKTKNMMYLNMTGLKPEDTALYVCAV

SEQ ID NO: 12607 - protein, 41 aa, Artificial Sequence
  Synthetic
TDYDDSVRGRFTITGNNAENTISLQMNNLRPEDSAVYFCQA

SEQ ID NO: 12608 - protein, 41 aa, Artificial Sequence
  Synthetic
ETYADAVKGRFTVFRDTSKNTVDLQMNDLKVEDTAVYYCNA

SEQ ID NO: 12609 - protein, 41 aa, Artificial Sequence
  Synthetic
TKYGDSVKGRFVISHDNADNSVVHLQMNSLKIEDTGVYYCN

SEQ ID NO: 12610 - protein, 41 aa, Artificial Sequence
  Synthetic
TIYADSVKGRFTISRNNAKNTVYLQMNSLKPEDTAVYYCNV

SEQ ID NO: 12611 - protein, 41 aa, Artificial Sequence
  Synthetic
TAYADSVKGRFTISRDNAKNTVYLQMNSLIPEDTAIYYCAA

SEQ ID NO: 12612 - protein, 41 aa, Artificial Sequence
  Synthetic
TYYDDDVKGRVTVSLDSTGAIVSLQVNTLEPADSGMYYCAF

SEQ ID NO: 12613 - protein, 41 aa, Artificial Sequence
  Synthetic
ITYADSVKGRFTISRDNAKTTLSLQMNGLKPDDTAMYYCAA

SEQ ID NO: 12614 - protein, 41 aa, Artificial Sequence
  Synthetic
TYYDDSVKGRFTISVDRVKNTVNLQMNSLKPEDTGMYYCAS

SEQ ID NO: 12615 - protein, 41 aa, Artificial Sequence
  Synthetic
TIYAESVKGRFAISQDNTKGTVHLQMNNLEPEDTAKYYCAA

SEQ ID NO: 12616 - protein, 41 aa, Artificial Sequence
  Synthetic
VYYHDDVKGRFTIYRDNAKKMVFLQMNSLQPNDTAIYYCAS

SEQ ID NO: 12617 - protein, 41 aa, Artificial Sequence
  Synthetic
IHFEDNVKGRFTISQDDAKKMLYLQMSNLSPEDTAMYYCNT

SEQ ID NO: 12618 - protein, 41 aa, Artificial Sequence
  Synthetic
TYYADSVKGRFTIFQDNAKNTMYLQMNSLKPEDTAIYYCAA

SEQ ID NO: 12619 - protein, 41 aa, Artificial Sequence
  Synthetic
SRYADSAKGRFTISQDNAKNTVLLQMNNLKPEDTAMYYCRL

SEQ ID NO: 12620 - protein, 41 aa, Artificial Sequence
  Synthetic
TMYADSVKGRFAISRDDAKNTVYLEMNTLKFEDTAMYYCAA

SEQ ID NO: 12621 - protein, 41 aa, Artificial Sequence
  Synthetic
GSYSKDVKDRFTVSQDTAKRTVYLQMTSLNPEDTAAYYCGS

SEQ ID NO: 12622 - protein, 41 aa, Artificial Sequence
  Synthetic
TFYADSVKGRFTIREQRGMNTVHLQMNNLKPEDTGMYYCAA

SEQ ID NO: 12623 - protein, 41 aa, Artificial Sequence
  Synthetic
TNYADSVKGRFTVSRDNAKNTVYLQMNDLRPEDTAVYYCAA

SEQ ID NO: 12624 - protein, 41 aa, Artificial Sequence; identical to SEQ ID NO: 7169
  Synthetic

SEQ ID NO: 12625 - protein, 41 aa, Artificial Sequence; identical to SEQ ID NO: 7204
  Synthetic

SEQ ID NO: 12626 - protein, 41 aa, Artificial Sequence; identical to SEQ ID NO: 7330
  Synthetic

SEQ ID NO: 12627 - protein, 41 aa, Artificial Sequence; identical to SEQ ID NO: 7331
  Synthetic

SEQ ID NO: 12628 - protein, 41 aa, Artificial Sequence; identical to SEQ ID NO: 7332
  Synthetic

SEQ ID NO: 12629 - protein, 41 aa, Artificial Sequence; identical to SEQ ID NO: 7190
  Synthetic

SEQ ID NO: 12630 - protein, 41 aa, Artificial Sequence; identical to SEQ ID NO: 7140
  Synthetic

SEQ ID NO: 12631 - protein, 41 aa, Artificial Sequence; identical to SEQ ID NO: 7203
  Synthetic

SEQ ID NO: 12632 - protein, 41 aa, Artificial Sequence; identical to SEQ ID NO: 7335
  Synthetic

SEQ ID NO: 12633 - protein, 41 aa, Artificial Sequence; identical to SEQ ID NO: 7181
  Synthetic

SEQ ID NO: 12634 - protein, 41 aa, Artificial Sequence; identical to SEQ ID NO: 7206
  Synthetic

SEQ ID NO: 12635 - protein, 41 aa, Artificial Sequence; identical to SEQ ID NO: 7224
  Synthetic

SEQ ID NO: 12636 - protein, 41 aa, Artificial Sequence; identical to SEQ ID NO: 7192
  Synthetic

SEQ ID NO: 12637 - protein, 41 aa, Artificial Sequence; identical to SEQ ID NO: 7205
  Synthetic

SEQ ID NO: 12638 - protein, 41 aa, Artificial Sequence; identical to SEQ ID NO: 7339
  Synthetic

SEQ ID NO: 12639 - protein, 41 aa, Artificial Sequence
  Synthetic
TNYADSVEGRSTISSDNAKNTVYLQLSSLKPEDTAVYYCNA

SEQ ID NO: 12640 - protein, 41 aa, Artificial Sequence; identical to SEQ ID NO: 7196
  Synthetic

SEQ ID NO: 12641 - protein, 41 aa, Artificial Sequence; identical to SEQ ID NO: 7198
  Synthetic

SEQ ID NO: 12642 - protein, 41 aa, Artificial Sequence; identical to SEQ ID NO: 7217
  Synthetic

SEQ ID NO: 12643 - protein, 41 aa, Artificial Sequence; identical to SEQ ID NO: 7218
  Synthetic

SEQ ID NO: 12644 - protein, 41 aa, Artificial Sequence; identical to SEQ ID NO: 7111
  Synthetic

SEQ ID NO: 12645 - protein, 41 aa, Artificial Sequence; identical to SEQ ID NO: 7111
  Synthetic

SEQ ID NO: 12646 - protein, 41 aa, Artificial Sequence; identical to SEQ ID NO: 7216
  Synthetic

SEQ ID NO: 12647 - protein, 41 aa, Artificial Sequence; identical to SEQ ID NO: 7106
  Synthetic

SEQ ID NO: 12648 - protein, 41 aa, Artificial Sequence; identical to SEQ ID NO: 7106
  Synthetic

SEQ ID NO: 12649 - protein, 41 aa, Artificial Sequence; identical to SEQ ID NO: 7223
  Synthetic

SEQ ID NO: 12650 - protein, 41 aa, Artificial Sequence; identical to SEQ ID NO: 7345
  Synthetic

SEQ ID NO: 12651 - protein, 41 aa, Artificial Sequence; identical to SEQ ID NO: 7353
  Synthetic

SEQ ID NO: 12652 - protein, 41 aa, Artificial Sequence
  Synthetic
KTYGVSVQGRFTISRDSDRRTVLLQMNNLQPEDTAVYYCHR

SEQ ID NO: 12653 - protein, 41 aa, Artificial Sequence
  Synthetic
TNYADAVKGRFTISRDNAKKTVYLQMSSLKPEDTAVYYCNA

SEQ ID NO: 12654 - protein, 41 aa, Artificial Sequence
  Synthetic
TLYADSVKGRFIISRDNAKNTMYLQMNSLKPADAAVYYCAA

SEQ ID NO: 12655 - protein, 41 aa, Artificial Sequence; identical to SEQ ID NO: 7130
  Synthetic

SEQ ID NO: 12656 - protein, 41 aa, Artificial Sequence
  Synthetic
PYYADSVKGRFTVSTDSGKNTVYLQMNSLKPEDTAIYFCAA

SEQ ID NO: 12657 - protein, 41 aa, Artificial Sequence
  Synthetic
TYYADSVKGRFTISRDNAKNAVYLQMNSLKPEDTAVYYCAT

SEQ ID NO: 12658 - protein, 41 aa, Artificial Sequence
  Synthetic
TYYADSVKGRFATSRDNAKNTVYLQMNSLKPEDTAVYYCAA

SEQ ID NO: 12659 - protein, 41 aa, Artificial Sequence
  Synthetic
TYYADSMKGRFTISRDNAKNTVYLQMNSLKPEDTAVYYCNK

SEQ ID NO: 12660 - protein, 41 aa, Artificial Sequence
  Synthetic
TRYSDSMNDRFTVSRDNTKNTVFLDLKSLKDEDTAVYYCAT

SEQ ID NO: 12661 - protein, 41 aa, Artificial Sequence
  Synthetic
VYYAKSPKGRFTVSRDNAKKNTVYLQMNSLKHEDTAVYYCA

SEQ ID NO: 12662 - protein, 41 aa, Artificial Sequence
  Synthetic
IIVADSVKGRFTIFRDNAKSTVYLQMNSLTPEDTAIYYCAA

SEQ ID NO: 12663 - protein, 41 aa, Artificial Sequence
  Synthetic
TYFADSVKGRFAISRDNAKKTATLQMNNLQLEDTAVYYCAT

SEQ ID NO: 12664 - protein, 41 aa, Artificial Sequence
  Synthetic
TDYADAVKGRFTISRDNIKNMGYLQMDNLKPGDTATYYCAA

SEQ ID NO: 12665 - protein, 41 aa, Artificial Sequence
  Synthetic
TYYADSVKGRFTISRDNAKNTGYLQMNSLKPEDTAVYYCAA

SEQ ID NO: 12666 - protein, 41 aa, Artificial Sequence
  Synthetic
TYYADSVKGRFTIPRDNAKNTGYLQMNSLKPEDTAVYYCAA

SEQ ID NO: 12667 - protein, 41 aa, Artificial Sequence
  Synthetic
AYGADSAKGRFTISREYAKNIMYLQMNSLKPEDTAVYYCAA

SEQ ID NO: 12668 - protein, 41 aa, Artificial Sequence
  Synthetic
TNYAYYAEGRFTISRDNAKNTVYLQMNNLEPGDTAVYYCNA

SEQ ID NO: 12669 - protein, 41 aa, Artificial Sequence
  Synthetic
TYYADSVKGRFTISRDNAKNTVYLQMNSLKPEDTAVYYCAH

SEQ ID NO: 12670 - protein, 41 aa, Artificial Sequence
  Synthetic
TYHADSLKDRFTISRDNDKNTVYLQMNSLKPEDTAVYYCAA

SEQ ID NO: 12671 - protein, 41 aa, Artificial Sequence
  Synthetic
TYYRDSVKGRFTISRDNAKNTVYLQMNSLEPEDTAVYYCAA

SEQ ID NO: 12672 - protein, 41 aa, Artificial Sequence
  Synthetic
QYYKYFAKGRFTISRDNAKNTVDLQMNSLRPEDAAVYYCAR

SEQ ID NO: 12673 - protein, 41 aa, Artificial Sequence
  Synthetic
TYYSDAVKGRFTISRDNDKNMSYLQMNNLKPEDTAVYFCAA

SEQ ID NO: 12674 - protein, 41 aa, Artificial Sequence
  Synthetic
GWQVYSDSVKNRFTVSRDSAKMYLQMNSLSPDDTAVYYCAA

SEQ ID NO: 12675 - protein, 41 aa, Artificial Sequence
  Synthetic
TWYAASVKGRFTVSRDDAKNTLYLQMNSLKPEDTGLYYCAR

SEQ ID NO: 12676 - protein, 41 aa, Artificial Sequence
  Synthetic
TYYADSVKGRFTISGDNAKNTLYLQMNSLKPEDTAFYYPAR

SEQ ID NO: 12677 - protein, 41 aa, Artificial Sequence
  Synthetic
THYADFVRGRFTISGDNAKNTVYLQMNRLTPEDTAVYYCKA

SEQ ID NO: 12678 - protein, 41 aa, Artificial Sequence
  Synthetic
TAYADSVKGRFTISRDNAKNTVYLQMNGLKPEDTAVYYCAR

SEQ ID NO: 12679 - protein, 41 aa, Artificial Sequence
  Synthetic
TYYTDSVKGRFTISRDNARNTVYLQMNNLKPEDTAVYYCNA

SEQ ID NO: 12680 - protein, 41 aa, Artificial Sequence
  Synthetic
TSYATSVKGRFTISRDNRKNTAYLQMNSLKPEDTAVYYCFA

SEQ ID NO: 12681 - protein, 41 aa, Artificial Sequence
  Synthetic
AAYADSVKGRFTISRGVGKNTVYLQMDSLKVEDTAVYYCAA

SEQ ID NO: 12682 - protein, 41 aa, Artificial Sequence
  Synthetic
TMYADSVKGRFTISRDNAKSTVYLQMNSLKPEDTAVYYCAA

SEQ ID NO: 12683 - protein, 41 aa, Artificial Sequence
  Synthetic
TYYADSVKGRFTISRDNTVNTVSLQMNNLKPADTGVYYCAA

SEQ ID NO: 12684 - protein, 41 aa, Artificial Sequence
  Synthetic
TNYGDSVKGRFTISRQKLNNTIILQMNNLKPEDTAVYYCAA

SEQ ID NO: 12685 - protein, 41 aa, Artificial Sequence
  Synthetic
TYYEASVKGRFTISRDNAKNTMYLQMNSLKPEDTAVYRCAA

SEQ ID NO: 12686 - protein, 41 aa, Artificial Sequence
  Synthetic
TFYSNSVKGRFTISRDNAKNTVYLQMNSLKPEDTADYYCAA

SEQ ID NO: 12687 - protein, 41 aa, Artificial Sequence
  Synthetic
TKYADFVKGRFSISRDNAKNMVYLQMNSLKPEDTALYYCAA

SEQ ID NO: 12688 - protein, 41 aa, Artificial Sequence
  Synthetic
RHYADSVKGRFTISRDDAKNTLYLQMNSLQPEDTAVYFCAA

SEQ ID NO: 12689 - protein, 41 aa, Artificial Sequence
  Synthetic
SYYANSVEGRFTISRDNAKNTMYLQMNKLKPEDTAVYTCAL

SEQ ID NO: 12690 - protein, 41 aa, Artificial Sequence
  Synthetic
TDYADSVKGRFTISRDNNKNTVYLQMGSLEAGDTALYYCAA

SEQ ID NO: 12691 - protein, 41 aa, Artificial Sequence
  Synthetic
TYYADSVKGRFTISRDNVKDMLYLQMNSLKPEDTAVYTCAV

SEQ ID NO: 12692 - protein, 41 aa, Artificial Sequence
  Synthetic
TWYKDSVKGRFTISRDNAKTTVYLQMNSLKPEDTAVYYCAA

SEQ ID NO: 12693 - protein, 41 aa, Artificial Sequence
  Synthetic
LTYADSVKGRFTVSRDNAKNTVYLQMHSLKPEDTAVYYCNR

SEQ ID NO: 12694 - protein, 41 aa, Artificial Sequence
  Synthetic
TYYVDSVKGRFTISRDNAKSTVYLQMNSLKPEDTGVYYCAV

SEQ ID NO: 12695 - protein, 41 aa, Artificial Sequence; identical to SEQ ID NO: 7173
  Synthetic

SEQ ID NO: 12696 - protein, 41 aa, Artificial Sequence
  Synthetic
TWYVDSVKGRFTISRDNAKSTVYLQMNSLKPEDTAVYYCAV

SEQ ID NO: 12697 - protein, 41 aa, Artificial Sequence
  Synthetic
TNYAAFVKGRFTISRDNSKKTLYLQMNSLKPEDTAVYYCRA

SEQ ID NO: 12698 - protein, 41 aa, Artificial Sequence
  Synthetic
IDYSDSVKGRFTISRDSLKNTVCLQMNSLKPEDTAVYYCNA

SEQ ID NO: 12699 - protein, 41 aa, Artificial Sequence
  Synthetic
INYGDSVEGRFTISGSVAENTVYLQMNSLRPEDTAVYYCNA

SEQ ID NO: 12700 - protein, 41 aa, Artificial Sequence
  Synthetic
TEYADSVKGRFAISRDNAKTTVYLQMNSLKPEDTAVYYCYC

SEQ ID NO: 12701 - protein, 41 aa, Artificial Sequence
  Synthetic
TNYIDSVKGRFSISNDPAKWTVYLQMNSLKPEDTAVYSCNT

SEQ ID NO: 12702 - protein, 41 aa, Artificial Sequence
  Synthetic
TTYADSVKGRFTISRDNAKNTVTLQMNILKPEDTAVYYCHA

SEQ ID NO: 12703 - protein, 41 aa, Artificial Sequence
  Synthetic
TNYVDSVKGRFTISRDDAKNTIYLQMNSLKPEDTAVYYCNA

SEQ ID NO: 12704 - protein, 41 aa, Artificial Sequence
  Synthetic
TNYADSVKGRFTISRDNAKNTMYLQMNDLKPEDTAVYYCTN

SEQ ID NO: 12705 - protein, 41 aa, Artificial Sequence
  Synthetic
TNYADSVKGRFTISRDNAKNTVFLQLNSLKPEDTAVYYCHA

SEQ ID NO: 12706 - protein, 41 aa, Artificial Sequence
  Synthetic
EIYADSVKGRFTISRDNAKNIMYLQMNSLRPEDTAVYYCSA

SEQ ID NO: 12707 - protein, 41 aa, Artificial Sequence
  Synthetic
KSYGDSVKGRFTISRDNAKNTVYLQMNSLIPEDTAVYYCAA

SEQ ID NO: 12708 - protein, 41 aa, Artificial Sequence
  Synthetic
TVIADSVKGRFTISRDDAKNTVYLHMNSLKPEDTAVYFCNA

SEQ ID NO: 12709 - protein, 41 aa, Artificial Sequence
  Synthetic
TDYADSVKGRFTISRDNAKNTVYLQMNSLKPEDTAVYYCNQ

SEQ ID NO: 12710 - protein, 41 aa, Artificial Sequence
  Synthetic
GGTPHYADSRFTLSRDHAKNLVYLQMNSLKPEDTARYYCAA

SEQ ID NO: 12711 - protein, 41 aa, Artificial Sequence
  Synthetic
TQYHDNVKGRFTISRDNTRTTAYLQMNDLQPDDTANYYCFA

SEQ ID NO: 12712 - protein, 41 aa, Artificial Sequence
  Synthetic
TDYADSVKGRFTISRHNANNMVYLQMNSLKPEDTAVYYCNA

SEQ ID NO: 12713 - protein, 41 aa, Artificial Sequence
  Synthetic
RYYTEAVQGRFNISRDNAENTVYLLMNSLKPEDTAVYYCAA

SEQ ID NO: 12714 - protein, 41 aa, Artificial Sequence
  Synthetic
TNYADSVKGRFTISRDNAVNTAYLQMDNLAPGDTAVYFCAA

SEQ ID NO: 12715 - protein, 41 aa, Artificial Sequence; identical to SEQ ID NO: 7105
  Synthetic

SEQ ID NO: 12716 - protein, 41 aa, Artificial Sequence
  Synthetic
TYYADSVKGRFTLSRDNAKNTVFLQMDSLKQEDTALYWCAR

SEQ ID NO: 12717 - protein, 41 aa, Artificial Sequence
  Synthetic
TWYADFVEGRFTVFRDNAKNAVYLEMTSLKPEDTASYYCAA

SEQ ID NO: 12718 - protein, 41 aa, Artificial Sequence
  Synthetic
TYYAQFAKGRFAISRVTGEKMVYLQMNDLNPEDTAVYYCAA

SEQ ID NO: 12719 - protein, 41 aa, Artificial Sequence
  Synthetic
TFYADSAKGRFTISRDKGEKTMYLEMNALKPDDTAVYYCAA

SEQ ID NO: 12720 - protein, 41 aa, Artificial Sequence
  Synthetic
TNYADSVKGRFTVSRDNAKNTMYLQMNSLKPEDTAVYYCAL

SEQ ID NO: 12721 - protein, 41 aa, Artificial Sequence
  Synthetic
RNYADFVEGRFTISKDNAKSTLYLQMNNLKSDDTGVYYCKL

SEQ ID NO: 12722 - protein, 41 aa, Artificial Sequence
  Synthetic
TYYTDAVEGRFTISSDDAKNTVYLQMNNLIPEDTAFYYCAR

SEQ ID NO: 12723 - protein, 41 aa, Artificial Sequence
  Synthetic
TNYADSVKDRFTISRDNAEDTVYLQMNSLKPEDTAIYYCNA

SEQ ID NO: 12724 - protein, 41 aa, Artificial Sequence
  Synthetic
TNYTDSVKGRFTISRENAKNTVYLQMSSLKPEDTAIYYCNA

SEQ ID NO: 12725 - protein, 41 aa, Artificial Sequence
  Synthetic
TYYADFVKGRFSISRENVKNTVYLQMNSLKPEDTAVYFCNA

SEQ ID NO: 12726 - protein, 41 aa, Artificial Sequence
  Synthetic
TNYADSVKGRFTISRDRAKNTAYVQMNSLKPDDTAVYYCNA

SEQ ID NO: 12727 - protein, 41 aa, Artificial Sequence; identical to SEQ ID NO: 7126
  Synthetic

SEQ ID NO: 12728 - protein, 41 aa, Artificial Sequence
  Synthetic
TTYSGSVKGRFTISRDNAKNTVYLQMNSLKPEDTAVYYCNA

SEQ ID NO: 12729 - protein, 41 aa, Artificial Sequence
  Synthetic
TYYEDTMKGRVAISRDNVKNTIYLQMDNLKPEDTAVYYCAA

SEQ ID NO: 12730 - protein, 41 aa, Artificial Sequence
  Synthetic
PKYADSVEGRFTISRDNALNTIDLQMNSLKPEDTGVYYCNG

SEQ ID NO: 12731 - protein, 41 aa, Artificial Sequence
  Synthetic
LNYAASVKGRFTISRDSAENTAHLQMKSLRPEDTAVYYCNV

SEQ ID NO: 12732 - protein, 41 aa, Artificial Sequence
  Synthetic
TYYADSVKGRFTISRDNAKDTVYLQMNNLKPEDTAMYYCAA

SEQ ID NO: 12733 - protein, 41 aa, Artificial Sequence
  Synthetic
KYYASALKGRFTISSDSAKNTVYLQMNSLKPEDTAVYYCGA

SEQ ID NO: 12734 - protein, 41 aa, Artificial Sequence
  Synthetic
TYYADSVKGRFSISRDNAKNTVYLQMNSLKPEDTAVYYCNS

SEQ ID NO: 12735 - protein, 41 aa, Artificial Sequence
  Synthetic
THYTESVKGRFTTGRDTAKNTVYLQMNRLKPEDTAIYYCAA

SEQ ID NO: 12736 - protein, 41 aa, Artificial Sequence
  Synthetic
TDYAGSVKGRFTISRDKSGNTVFLQMNSLKPEDTAVYYCNT

SEQ ID NO: 12737 - protein, 41 aa, Artificial Sequence
  Synthetic
IHYADFVKGRFTISRDNAENTVSLQMNSLKPEDTAVYYCAA

SEQ ID NO: 12738 - protein, 41 aa, Artificial Sequence
  Synthetic
TDYADSVKGRFAISRDNAATTLYLQMDHLTPEDTAVYYCTA

SEQ ID NO: 12739 - protein, 41 aa, Artificial Sequence
  Synthetic
SDYVDSVKGRFTISRDNAKNTATLQMNSLKPEDTAVYFCAA

SEQ ID NO: 12740 - protein, 41 aa, Artificial Sequence
  Synthetic
SNYEDFVNGRFTISRDNARNTMYLQMNSLKPEDTAVYYCNV

SEQ ID NO: 12741 - protein, 41 aa, Artificial Sequence
  Synthetic
TSYEDFVKGRFTISRDIAKNTVYLQMNNLKPEDTAVYYCNA

SEQ ID NO: 12742 - protein, 41 aa, Artificial Sequence
  Synthetic
TNYADSVKGRFTISRDNAKNTVYLQMNSLKPEDTAVYYCNL

SEQ ID NO: 12743 - protein, 41 aa, Artificial Sequence
  Synthetic
TNYADSVKGRFTVSRDYGKNTVYLQMNSLKPEDTAVYYCYA

SEQ ID NO: 12744 - protein, 41 aa, Artificial Sequence
  Synthetic
TSYVDSVKGRFTISGDNAWNPVYLQMNSLKPEDTAVYYCYA

SEQ ID NO: 12745 - protein, 41 aa, Artificial Sequence
  Synthetic
TNYADSVKGRFTISRDNAKDTVTLQMNSLKPEDTAVYYCNA

SEQ ID NO: 12746 - protein, 41 aa, Artificial Sequence
  Synthetic
THYVDSVKGRFTISKDNAKNTVYLQMSSLKPEDTAVYTCAV

SEQ ID NO: 12747 - protein, 41 aa, Artificial Sequence
  Synthetic
TNYADSVKGRFTISRDDAKNTLYLQMSSLKPEDTAVYYCNA

SEQ ID NO: 12748 - protein, 41 aa, Artificial Sequence
  Synthetic
TDYGDSLKGRFTISRDNAKNTLYLQMNSLQAGDTAVYYCNA

SEQ ID NO: 12749 - protein, 41 aa, Artificial Sequence
  Synthetic
TNYADSVRGRFTISRDNAKNMMHLQMNSLKPEDTAVYYCHV

SEQ ID NO: 12750 - protein, 41 aa, Artificial Sequence
  Synthetic
TNYGDSVKGRFTISRDNARNTVYLHLQMNSLKPEDTAVYYC

SEQ ID NO: 12751 - protein, 41 aa, Artificial Sequence
  Synthetic
GRTNYADSVKGRFTMSRVKNILYLQMDSLKPEDAAVYYCHA

SEQ ID NO: 12752 - protein, 41 aa, Artificial Sequence
  Synthetic
TNYADSVKGRFTISRDIAKNSVYLQMNSLKPEDTAVYYCNA

SEQ ID NO: 12753 - protein, 41 aa, Artificial Sequence
  Synthetic
TNYGDSVKGRFTISRDNAKNTVYLQMNSLKPEDTAVYYCNT

SEQ ID NO: 12754 - protein, 41 aa, Artificial Sequence
  Synthetic
SNYADSVKGRFTISRDNAKNTVYLQMNSLKPEDTAVYYCNA

SEQ ID NO: 12755 - protein, 41 aa, Artificial Sequence
  Synthetic
LYYTESVKGRFTSSRDNVKNTVYLQMNSLKPEDTAVYYCAA

SEQ ID NO: 12756 - protein, 41 aa, Artificial Sequence
  Synthetic
INYAYSVRGRFTISRDNAKNAVYLQMNSLKSEDTARYYCYA

SEQ ID NO: 12757 - protein, 41 aa, Artificial Sequence
  Synthetic
TDYADSVKGRFTISRDNAKNTVYLQMNSLKAEDTAVYYCAA

SEQ ID NO: 12758 - protein, 41 aa, Artificial Sequence
  Synthetic
TYYVDFVKGRFTISRDNAKNTVYLQMNSLKPEDTAVYYCVA

SEQ ID NO: 12759 - protein, 41 aa, Artificial Sequence
  Synthetic
TGYEASVEGRFTISRDNAKQSVYLQMDSLKPEDTAVYSCNT

SEQ ID NO: 12760 - protein, 41 aa, Artificial Sequence
  Synthetic
IDYADSVKGRFTISRDNAKNTVYLQMTDLKLEDTAVYYCHA

SEQ ID NO: 12761 - protein, 41 aa, Artificial Sequence
  Synthetic
PYYADSVKGRFTISRDNAKDTVYLQMNSLKPEDTAVYYCAA

SEQ ID NO: 12762 - protein, 41 aa, Artificial Sequence
  Synthetic
GSYAGSVKGRFTISRNNAKTMLYLQMSSLKPEDTAVYYCVA

SEQ ID NO: 12763 - protein, 41 aa, Artificial Sequence
  Synthetic
IYYTESVKGRFTMSKDNAKNAVYLQMNSVNTEDTADYYCAA

SEQ ID NO: 12764 - protein, 41 aa, Artificial Sequence
  Synthetic
TDYADSVRDRFTISMDNAKNTVYLQMNSLKPEDTAAYYCAA

SEQ ID NO: 12765 - protein, 41 aa, Artificial Sequence
  Synthetic
TSYVGSAKGRFTISRDNAKKMVYLQMNSLKTEDTAVYYCVA

SEQ ID NO: 12766 - protein, 41 aa, Artificial Sequence
  Synthetic
TSYVDSVKGRFIISRDNVKKTLYLQMNSLKPEDTAVYYCAA

SEQ ID NO: 12767 - protein, 41 aa, Artificial Sequence
  Synthetic
TDYAESVKGRFTISGDAAKNTVYLQMNSLKPEDTAVYYCNQ

SEQ ID NO: 12768 - protein, 41 aa, Artificial Sequence
  Synthetic
PSYADAVKGRFSISRDNAKNTVYLQMNSLKPDDTAVYFCAS

SEQ ID NO: 12769 - protein, 41 aa, Artificial Sequence
  Synthetic
TDYGEPVRGRFTLAKDNARNTVTLQMDSLKPEDTAVYYCAL

SEQ ID NO: 12770 - protein, 41 aa, Artificial Sequence
  Synthetic
LLYADSVSGRFTISRDNTKNTVYLQMVSLRPEDTAVYYCGA

SEQ ID NO: 12771 - protein, 41 aa, Artificial Sequence
  Synthetic
TLYGDAVKGRFTVSTENAKKMVYLEMTNLTPEDTAVYYCNA

SEQ ID NO: 12772 - protein, 41 aa, Artificial Sequence
  Synthetic
INTEDSVKGRFTISGDNAKNAVYLQMNSLNPEDTAVYFCAA

SEQ ID NO: 12773 - protein, 41 aa, Artificial Sequence
  Synthetic
TDYADSVKGRFTITRDNAKNMVFLQMNSLKPEDTAVYYCNA

SEQ ID NO: 12774 - protein, 41 aa, Artificial Sequence
  Synthetic
TYYADFVKGRFTISRDKVKNTVDLQMNRMTPGDTAVYFCAS

SEQ ID NO: 12775 - protein, 41 aa, Artificial Sequence
  Synthetic
TYYVDSLKDRFTISRDNAKNTVSLQMNSLEPDDTAVYFCAA

SEQ ID NO: 12776 - protein, 41 aa, Artificial Sequence
  Synthetic
TTYLDSVRDRFAISRDNVKNTVYLQMNSLKPDDTAVYSCAR

SEQ ID NO: 12777 - protein, 41 aa, Artificial Sequence
  Synthetic
TLYSDSAKGRFTISYDNDKNTVYLQMNNLKPEDTAVYYCAT

SEQ ID NO: 12778 - protein, 41 aa, Artificial Sequence
  Synthetic
TVYGDSVKGRFTISRDNAENTVYLQMNSLKPEDTAVYYCAA

SEQ ID NO: 12779 - protein, 41 aa, Artificial Sequence
  Synthetic
SHYADSVKGRFTISRDDAKNTLYLQMNSLQPEDTAVYFCAA

SEQ ID NO: 12780 - protein, 41 aa, Artificial Sequence
  Synthetic
THYADSVKGRFAISRDNAKNTLYLQINSLKSEDTAVYYCAK

SEQ ID NO: 12781 - protein, 41 aa, Artificial Sequence
  Synthetic
TEYADSAKGRFTISRDNAKNTEYLQMNSLKPEDTALYYCAA

SEQ ID NO: 12782 - protein, 41 aa, Artificial Sequence
  Synthetic
ITFADSVKGRFSISRDSDKNTVYLQMNNMQPEDTAVYYCNA

SEQ ID NO: 12783 - protein, 41 aa, Artificial Sequence
  Synthetic
THYAHSVKGRFTITSDNAKNTVYLQMNSLKPEDTAVYICAA

SEQ ID NO: 12784 - protein, 41 aa, Artificial Sequence
  Synthetic
TLYADAAKGRFTISRDNAKNTAFLQMTSLKPEDTAVYYCAA

SEQ ID NO: 12785 - protein, 41 aa, Artificial Sequence
  Synthetic
TRYADSLKGRFTISRDNAKNTVYLQMNSLKPEDTAVYYCAA

SEQ ID NO: 12786 - protein, 41 aa, Artificial Sequence
  Synthetic
GADYADSVKGRFTISRDADGTLYLQMNSLKPEDTAVYYCAL

SEQ ID NO: 12787 - protein, 41 aa, Artificial Sequence
  Synthetic
TYYASSVRGRFTISRDDAKNTLYLIMNSLKPEDTGLYYCAT

SEQ ID NO: 12788 - protein, 41 aa, Artificial Sequence
  Synthetic
TRYGKAVQGRVSVSKDNAKSTIYLQMNNLDDNDTAVYYCAA

SEQ ID NO: 12789 - protein, 41 aa, Artificial Sequence
  Synthetic
TYYADSMKGRFTISRNNAKNMVYLEMNSLKPEDTAVYYCAM

SEQ ID NO: 12790 - protein, 41 aa, Artificial Sequence
  Synthetic
TNYADSVKGRFTMSKDNAKNTVYLQMNSLRPEDTAVYYCAA

SEQ ID NO: 12791 - protein, 41 aa, Artificial Sequence
  Synthetic
TDYVDSVKGRFTVSRDVAKNTVFLQMNDLKPEDTAVYYCAG

SEQ ID NO: 12792 - protein, 41 aa, Artificial Sequence
  Synthetic
KYYEDSVKGRFTISRDNTKKTVYLEMNSLKPEDTAVYYCAA

SEQ ID NO: 12793 - protein, 41 aa, Artificial Sequence
  Synthetic
IYYADSVLGRSTISRDNAKHTVYLQMNSLKPDDTAVYYCAG

SEQ ID NO: 12794 - protein, 41 aa, Artificial Sequence
  Synthetic
TDYADSVKGRFTISRDNAKNTVYLQLNSLKPEDTAVYYCAL

SEQ ID NO: 12795 - protein, 41 aa, Artificial Sequence
  Synthetic
TAYADSVKGRFTISRDNAKNTVALQMNGLKPEDTAVYYCTA

SEQ ID NO: 12796 - protein, 41 aa, Artificial Sequence
  Synthetic
TYYTDSVRGRFTISRDNAKNTVYLQMDSLKPVDTAIYYCAA

SEQ ID NO: 12797 - protein, 41 aa, Artificial Sequence
  Synthetic
TNYADSVKGRFTISRDGARDTLYLQMNNLSPEDTAVYSCVA

SEQ ID NO: 12798 - protein, 41 aa, Artificial Sequence
  Synthetic
TFYADSVKGRFAISRDNAKNTLYLEMNSLQPEDTAVYYCAA

SEQ ID NO: 12799 - protein, 41 aa, Artificial Sequence
  Synthetic
TYYGSSVKGRFFISKDNAKNTVYLQMNGLKPEDTAVYYCAA

SEQ ID NO: 12800 - protein, 41 aa, Artificial Sequence; identical to SEQ ID NO: 12100
  Synthetic

SEQ ID NO: 12801 - protein, 41 aa, Artificial Sequence
  Synthetic
TSYADSVKGRFTISRDNAKNMVYLQMNSLKPEDTAVYYCAA

SEQ ID NO: 12802 - protein, 41 aa, Artificial Sequence
  Synthetic
TNYADSVKGRFTISRDNAKNTVYLQMNSLKPEDTAVYLCNV

SEQ ID NO: 12803 - protein, 41 aa, Artificial Sequence
  Synthetic
TTYADSVKGRFTISRDNAKNTMSLLMNSLQPEDTAVYYCNA

SEQ ID NO: 12804 - protein, 41 aa, Artificial Sequence
  Synthetic
TNYADSVKGRFTISRDNAKNTLYLQMNSLKPEDTAVYYCNA

SEQ ID NO: 12805 - protein, 41 aa, Artificial Sequence
  Synthetic
TKYADSVKGRFTISRDNAKNTVYLQMNSLKPEDTAVYYCNA

SEQ ID NO: 12806 - protein, 41 aa, Artificial Sequence
  Synthetic
TNYAGSVKGRFTISRDTAKNTVYLQMNSLKPEDTAVYYCNA

SEQ ID NO: 12807 - protein, 41 aa, Artificial Sequence
  Synthetic
TNYADSVKGRFTISRDLAKNMVDLQMNSLKPEDTAVYYCRW

SEQ ID NO: 12808 - protein, 41 aa, Artificial Sequence
  Synthetic
TTFASSVKGRFTISRDNAKNTMYLQMNDLKLDDTGVYSCNA

SEQ ID NO: 12809 - protein, 41 aa, Artificial Sequence; identical to SEQ ID NO: 7111
  Synthetic

SEQ ID NO: 12810 - protein, 41 aa, Artificial Sequence
  Synthetic
TTYADSVKGRFTISRDNAKNTVYLQMDSLKPEDTAVYYCNY

SEQ ID NO: 12811 - protein, 41 aa, Artificial Sequence
  Synthetic
TFYAESVKGRFTISRDNSKNTVSLQMNNLKPEDTAVYYCAA

SEQ ID NO: 12812 - protein, 41 aa, Artificial Sequence
  Synthetic
TNYADAVKGRFTISRDNAKQLVFLQMNNLKPEDTAVYYCNS

SEQ ID NO: 12813 - protein, 41 aa, Artificial Sequence; identical to SEQ ID NO: 7126
  Synthetic

SEQ ID NO: 12814 - protein, 41 aa, Artificial Sequence
  Synthetic
THYADSVKGRFTISGDSAKNTVYLQMNNLKPEDTAVYYCAA

SEQ ID NO: 12815 - protein, 41 aa, Artificial Sequence
  Synthetic
TYVVDAVKGRFSISRDNAKNTVYLQMNGVKPEDTAVYYCAA

SEQ ID NO: 12816 - protein, 41 aa, Artificial Sequence; identical to SEQ ID NO: 7126
  Synthetic

SEQ ID NO: 12817 - protein, 41 aa, Artificial Sequence
  Synthetic
AYVADSVKGRFIISRDNAKNTVYLQMNNLKPEDTALYYCAA

SEQ ID NO: 12818 - protein, 41 aa, Artificial Sequence
  Synthetic
THYADSVKGRFTISRDNAKNTVYLQMNNLKPEDTAVYYCAA

SEQ ID NO: 12819 - protein, 41 aa, Artificial Sequence
  Synthetic
TNYASSVEGRFTISRDNAKKTVYLQMNDLKPEDTAVYYCNS

SEQ ID NO: 12820 - protein, 41 aa, Artificial Sequence
  Synthetic
TYYADSVKGRFTASRDYTKNTVYLQMNNLTPEDTAVYYCAA

SEQ ID NO: 12821 - protein, 41 aa, Artificial Sequence
  Synthetic
TYYADSVKGRFTISRDNTKSTVYLQMNSLKPEDTAVYYCAA

SEQ ID NO: 12822 - protein, 41 aa, Artificial Sequence
  Synthetic
TYYADSVKGRFTISRDNTKTTVYLQMDSLKPEDTAVYYCAA

SEQ ID NO: 12823 - protein, 41 aa, Artificial Sequence
  Synthetic
TYYADSVKGRFTISRDNTKVTVYLQMNSLKPEDTAVYYCAA

SEQ ID NO: 12824 - protein, 41 aa, Artificial Sequence
  Synthetic
TYYADSVKGRFTISRDNAKNTLYLQMDSLKPEDTAVYYCAA

SEQ ID NO: 12825 - protein, 41 aa, Artificial Sequence; identical to SEQ ID NO: 7126
  Synthetic

SEQ ID NO: 12826 - protein, 41 aa, Artificial Sequence
  Synthetic
PVYTDSVKGRFTISRDNAKNTLYLQMNGLKPEDTAVYYCYA

SEQ ID NO: 12827 - protein, 41 aa, Artificial Sequence
  Synthetic
TYYHHFVEGRFTVSRDRAKNTVYLQMNSLKSEDTAIYYCAA

SEQ ID NO: 12828 - protein, 41 aa, Artificial Sequence
  Synthetic
TYYHHSVKGRFTVSRDRAKNTVYLQMDSLKSEDTAIYYCAA

SEQ ID NO: 12829 - protein, 41 aa, Artificial Sequence
  Synthetic
TNYADSVKGRFTVSRDYTKNTMYLQMNNLAPEDTAVYYCAA

SEQ ID NO: 12830 - protein, 41 aa, Artificial Sequence; identical to SEQ ID NO: 12821
  Synthetic

SEQ ID NO: 12831 - protein, 41 aa, Artificial Sequence
  Synthetic
INYADSVKGRFTISRDNAKNTVYLQMNSLKPEDTAVYYCNA

SEQ ID NO: 12832 - protein, 41 aa, Artificial Sequence
  Synthetic
TTYVDSVKGRFTISRDNTKKMMSLQMNSLKPEDTAVYYCAL

SEQ ID NO: 12833 - protein, 41 aa, Artificial Sequence
  Synthetic
TTYADSVKGRFTISRDNTKKMMSLQMNSLNPDDTAVYYCTL

SEQ ID NO: 12834 - protein, 41 aa, Artificial Sequence
  Synthetic
TTYADSVKGRFTISRDNAKKTMSLQMNSLKPEDTAVYYCNL

SEQ ID NO: 12835 - protein, 41 aa, Artificial Sequence
  Synthetic
TYYADSVKGRFTISRDNAKNTVYLQTNSLKPEDTAVYYCAS

SEQ ID NO: 12836 - protein, 41 aa, Artificial Sequence; identical to SEQ ID NO: 7111
  Synthetic

SEQ ID NO: 12837 - protein, 41 aa, Artificial Sequence
  Synthetic
IYYADSVKGRFTISRDNAKNTVYLQMNSLKPEDTAVYYCAA

SEQ ID NO: 12838 - protein, 41 aa, Artificial Sequence; identical to SEQ ID NO: 7175
  Synthetic

SEQ ID NO: 12839 - protein, 41 aa, Artificial Sequence; identical to SEQ ID NO: 7172
  Synthetic

SEQ ID NO: 12840 - protein, 41 aa, Artificial Sequence; identical to SEQ ID NO: 7175
  Synthetic

SEQ ID NO: 12841 - protein, 41 aa, Artificial Sequence; identical to SEQ ID NO: 7285
  Synthetic

SEQ ID NO: 12842 - protein, 41 aa, Artificial Sequence; identical to SEQ ID NO: 7174
  Synthetic

SEQ ID NO: 12843 - protein, 41 aa, Artificial Sequence; identical to SEQ ID NO: 7127
  Synthetic

SEQ ID NO: 12844 - protein, 41 aa, Artificial Sequence; identical to SEQ ID NO: 7128
  Synthetic

SEQ ID NO: 12845 - protein, 41 aa, Artificial Sequence; identical to SEQ ID NO: 7129
  Synthetic

SEQ ID NO: 12846 - protein, 41 aa, Artificial Sequence; identical to SEQ ID NO: 7131
  Synthetic

SEQ ID NO: 12847 - protein, 41 aa, Artificial Sequence; identical to SEQ ID NO: 7126
  Synthetic

SEQ ID NO: 12848 - protein, 41 aa, Artificial Sequence; identical to SEQ ID NO: 7286
  Synthetic

SEQ ID NO: 12849 - protein, 41 aa, Artificial Sequence; identical to SEQ ID NO: 7287
  Synthetic

SEQ ID NO: 12850 - protein, 41 aa, Artificial Sequence; identical to SEQ ID NO: 7135
  Synthetic

SEQ ID NO: 12851 - protein, 41 aa, Artificial Sequence; identical to SEQ ID NO: 7115
  Synthetic

SEQ ID NO: 12852 - protein, 41 aa, Artificial Sequence; identical to SEQ ID NO: 7132
  Synthetic

SEQ ID NO: 12853 - protein, 41 aa, Artificial Sequence; identical to SEQ ID NO: 7168
  Synthetic

SEQ ID NO: 12854 - protein, 41 aa, Artificial Sequence; identical to SEQ ID NO: 7133
  Synthetic

SEQ ID NO: 12855 - protein, 41 aa, Artificial Sequence
  Synthetic
TNYVDSVKGRFTISRDDAKNTMYLQMNSLIPEDTAVYYCNL

SEQ ID NO: 12856 - protein, 41 aa, Artificial Sequence; identical to SEQ ID NO: 7136
  Synthetic

SEQ ID NO: 12857 - protein, 41 aa, Artificial Sequence; identical to SEQ ID NO: 7162
  Synthetic

SEQ ID NO: 12858 - protein, 41 aa, Artificial Sequence; identical to SEQ ID NO: 7161
  Synthetic

SEQ ID NO: 12859 - protein, 41 aa, Artificial Sequence; identical to SEQ ID NO: 7158
  Synthetic

SEQ ID NO: 12860 - protein, 41 aa, Artificial Sequence; identical to SEQ ID NO: 7152
  Synthetic

SEQ ID NO: 12861 - protein, 41 aa, Artificial Sequence; identical to SEQ ID NO: 7154
  Synthetic

SEQ ID NO: 12862 - protein, 41 aa, Artificial Sequence; identical to SEQ ID NO: 7155
  Synthetic

SEQ ID NO: 12863 - protein, 41 aa, Artificial Sequence; identical to SEQ ID NO: 7156
  Synthetic

SEQ ID NO: 12864 - protein, 41 aa, Artificial Sequence; identical to SEQ ID NO: 7116
  Synthetic

SEQ ID NO: 12865 - protein, 41 aa, Artificial Sequence; identical to SEQ ID NO: 7116
  Synthetic

SEQ ID NO: 12866 - protein, 41 aa, Artificial Sequence; identical to SEQ ID NO: 7118
  Synthetic

SEQ ID NO: 12867 - protein, 41 aa, Artificial Sequence; identical to SEQ ID NO: 7098
  Synthetic

SEQ ID NO: 12868 - protein, 41 aa, Artificial Sequence; identical to SEQ ID NO: 7107
  Synthetic

SEQ ID NO: 12869 - protein, 41 aa, Artificial Sequence; identical to SEQ ID NO: 7108
  Synthetic

SEQ ID NO: 12870 - protein, 41 aa, Artificial Sequence; identical to SEQ ID NO: 7109
  Synthetic

SEQ ID NO: 12871 - protein, 41 aa, Artificial Sequence; identical to SEQ ID NO: 7105
  Synthetic

SEQ ID NO: 12872 - protein, 41 aa, Artificial Sequence; identical to SEQ ID NO: 7292
  Synthetic

SEQ ID NO: 12873 - protein, 41 aa, Artificial Sequence; identical to SEQ ID NO: 7113
  Synthetic

SEQ ID NO: 12874 - protein, 41 aa, Artificial Sequence; identical to SEQ ID NO: 7111
  Synthetic

SEQ ID NO: 12875 - protein, 41 aa, Artificial Sequence; identical to SEQ ID NO: 7112
  Synthetic

SEQ ID NO: 12876 - protein, 41 aa, Artificial Sequence; identical to SEQ ID NO: 7293
  Synthetic

SEQ ID NO: 12877 - protein, 41 aa, Artificial Sequence; identical to SEQ ID NO: 7104
  Synthetic

SEQ ID NO: 12878 - protein, 41 aa, Artificial Sequence; identical to SEQ ID NO: 7120
  Synthetic

SEQ ID NO: 12879 - protein, 41 aa, Artificial Sequence; identical to SEQ ID NO: 7294
  Synthetic

SEQ ID NO: 12880 - protein, 41 aa, Artificial Sequence; identical to SEQ ID NO: 7121
  Synthetic

SEQ ID NO: 12881 - protein, 41 aa, Artificial Sequence; identical to SEQ ID NO: 7075
  Synthetic

SEQ ID NO: 12882 - protein, 41 aa, Artificial Sequence; identical to SEQ ID NO: 7296
  Synthetic

SEQ ID NO: 12883 - protein, 41 aa, Artificial Sequence; identical to SEQ ID NO: 7166
  Synthetic

SEQ ID NO: 12884 - protein, 41 aa, Artificial Sequence; identical to SEQ ID NO: 7125
  Synthetic

SEQ ID NO: 12885 - protein, 41 aa, Artificial Sequence; identical to SEQ ID NO: 7299
  Synthetic

SEQ ID NO: 12886 - protein, 41 aa, Artificial Sequence; identical to SEQ ID NO: 7300
  Synthetic

SEQ ID NO: 12887 - protein, 41 aa, Artificial Sequence; identical to SEQ ID NO: 7139
  Synthetic

SEQ ID NO: 12888 - protein, 41 aa, Artificial Sequence; identical to SEQ ID NO: 7304
  Synthetic

SEQ ID NO: 12889 - protein, 41 aa, Artificial Sequence; identical to SEQ ID NO: 7306
  Synthetic

SEQ ID NO: 12890 - protein, 41 aa, Artificial Sequence; identical to SEQ ID NO: 7307
  Synthetic

SEQ ID NO: 12891 - protein, 41 aa, Artificial Sequence; identical to SEQ ID NO: 7163
  Synthetic

SEQ ID NO: 12892 - protein, 41 aa, Artificial Sequence; identical to SEQ ID NO: 7164
  Synthetic

SEQ ID NO: 12893 - protein, 41 aa, Artificial Sequence; identical to SEQ ID NO: 7310
  Synthetic

SEQ ID NO: 12894 - protein, 41 aa, Artificial Sequence; identical to SEQ ID NO: 7142
  Synthetic

SEQ ID NO: 12895 - protein, 41 aa, Artificial Sequence; identical to SEQ ID NO: 7143
  Synthetic

SEQ ID NO: 12896 - protein, 41 aa, Artificial Sequence; identical to SEQ ID NO: 7144
  Synthetic

SEQ ID NO: 12897 - protein, 41 aa, Artificial Sequence; identical to SEQ ID NO: 7201
  Synthetic

SEQ ID NO: 12898 - protein, 41 aa, Artificial Sequence; identical to SEQ ID NO: 7146
  Synthetic

SEQ ID NO: 12899 - protein, 41 aa, Artificial Sequence; identical to SEQ ID NO: 7151
  Synthetic

SEQ ID NO: 12900 - protein, 41 aa, Artificial Sequence; identical to SEQ ID NO: 7313
  Synthetic

SEQ ID NO: 12901 - protein, 41 aa, Artificial Sequence; identical to SEQ ID NO: 7314
  Synthetic

SEQ ID NO: 12902 - protein, 41 aa, Artificial Sequence; identical to SEQ ID NO: 7141
  Synthetic

SEQ ID NO: 12903 - protein, 41 aa, Artificial Sequence; identical to SEQ ID NO: 7147
  Synthetic

SEQ ID NO: 12904 - protein, 41 aa, Artificial Sequence; identical to SEQ ID NO: 7138
  Synthetic

SEQ ID NO: 12905 - protein, 41 aa, Artificial Sequence; identical to SEQ ID NO: 7137
  Synthetic

SEQ ID NO: 12906 - protein, 41 aa, Artificial Sequence; identical to SEQ ID NO: 7148
  Synthetic

SEQ ID NO: 12907 - protein, 41 aa, Artificial Sequence
  Synthetic
PYYTDSVKGRFTISQDNAKNTIYLQMNSLKPEDTAMYFCAG

SEQ ID NO: 12908 - protein, 41 aa, Artificial Sequence; identical to SEQ ID NO: 7149
  Synthetic

SEQ ID NO: 12909 - protein, 41 aa, Artificial Sequence; identical to SEQ ID NO: 7319
  Synthetic

SEQ ID NO: 12910 - protein, 41 aa, Artificial Sequence; identical to SEQ ID NO: 7202
  Synthetic

SEQ ID NO: 12911 - protein, 41 aa, Artificial Sequence; identical to SEQ ID NO: 7191
  Synthetic

SEQ ID NO: 12912 - protein, 41 aa, Artificial Sequence; identical to SEQ ID NO: 7324
  Synthetic

SEQ ID NO: 12913 - protein, 41 aa, Artificial Sequence; identical to SEQ ID NO: 7254
  Synthetic

SEQ ID NO: 12914 - protein, 41 aa, Artificial Sequence; identical to SEQ ID NO: 7239
  Synthetic

SEQ ID NO: 12915 - protein, 41 aa, Artificial Sequence
  Synthetic
TYYADSVKGRFTISRDNAKNTIDLQMNSLKPKDTAVYYCNA

SEQ ID NO: 12916 - protein, 41 aa, Artificial Sequence; identical to SEQ ID NO: 7240
  Synthetic

SEQ ID NO: 12917 - protein, 41 aa, Artificial Sequence; identical to SEQ ID NO: 7238
  Synthetic

SEQ ID NO: 12918 - protein, 41 aa, Artificial Sequence; identical to SEQ ID NO: 7291
  Synthetic

SEQ ID NO: 12919 - protein, 41 aa, Artificial Sequence; identical to SEQ ID NO: 7255
  Synthetic

SEQ ID NO: 12920 - protein, 41 aa, Artificial Sequence; identical to SEQ ID NO: 7305
  Synthetic

SEQ ID NO: 12921 - protein, 41 aa, Artificial Sequence; identical to SEQ ID NO: 7256
  Synthetic

SEQ ID NO: 12922 - protein, 41 aa, Artificial Sequence; identical to SEQ ID NO: 7308
  Synthetic

SEQ ID NO: 12923 - protein, 41 aa, Artificial Sequence; identical to SEQ ID NO: 7273
  Synthetic

SEQ ID NO: 12924 - protein, 41 aa, Artificial Sequence; identical to SEQ ID NO: 7243
  Synthetic

SEQ ID NO: 12925 - protein, 41 aa, Artificial Sequence; identical to SEQ ID NO: 7244
  Synthetic

SEQ ID NO: 12926 - protein, 41 aa, Artificial Sequence; identical to SEQ ID NO: 7245
  Synthetic

SEQ ID NO: 12927 - protein, 41 aa, Artificial Sequence; identical to SEQ ID NO: 7249
  Synthetic

SEQ ID NO: 12928 - protein, 41 aa, Artificial Sequence; identical to SEQ ID NO: 7251
  Synthetic

SEQ ID NO: 12929 - protein, 41 aa, Artificial Sequence; identical to SEQ ID NO: 7250
  Synthetic

SEQ ID NO: 12930 - protein, 41 aa, Artificial Sequence; identical to SEQ ID NO: 7315
  Synthetic

SEQ ID NO: 12931 - protein, 41 aa, Artificial Sequence; identical to SEQ ID NO: 7247
  Synthetic

SEQ ID NO: 12932 - protein, 41 aa, Artificial Sequence; identical to SEQ ID NO: 7248
  Synthetic

SEQ ID NO: 12933 - protein, 41 aa, Artificial Sequence; identical to SEQ ID NO: 7320
  Synthetic

SEQ ID NO: 12934 - protein, 41 aa, Artificial Sequence; identical to SEQ ID NO: 7321
  Synthetic

SEQ ID NO: 12935 - protein, 41 aa, Artificial Sequence; identical to SEQ ID NO: 7322
  Synthetic

SEQ ID NO: 12936 - protein, 41 aa, Artificial Sequence; identical to SEQ ID NO: 7323
  Synthetic

SEQ ID NO: 12937 - protein, 41 aa, Artificial Sequence; identical to SEQ ID NO: 7279
  Synthetic

SEQ ID NO: 12938 - protein, 41 aa, Artificial Sequence; identical to SEQ ID NO: 7325
  Synthetic

SEQ ID NO: 12939 - protein, 41 aa, Artificial Sequence; identical to SEQ ID NO: 7267
  Synthetic

SEQ ID NO: 12940 - protein, 41 aa, Artificial Sequence; identical to SEQ ID NO: 7326
  Synthetic

SEQ ID NO: 12941 - protein, 41 aa, Artificial Sequence; identical to SEQ ID NO: 7261
  Synthetic

SEQ ID NO: 12942 - protein, 41 aa, Artificial Sequence; identical to SEQ ID NO: 7333
  Synthetic

SEQ ID NO: 12943 - protein, 41 aa, Artificial Sequence; identical to SEQ ID NO: 7334
  Synthetic

SEQ ID NO: 12944 - protein, 41 aa, Artificial Sequence; identical to SEQ ID NO: 7266
  Synthetic

SEQ ID NO: 12945 - protein, 41 aa, Artificial Sequence; identical to SEQ ID NO: 7340
  Synthetic

SEQ ID NO: 12946 - protein, 41 aa, Artificial Sequence; identical to SEQ ID NO: 7341
  Synthetic

SEQ ID NO: 12947 - protein, 41 aa, Artificial Sequence; identical to SEQ ID NO: 7269
  Synthetic

SEQ ID NO: 12948 - protein, 41 aa, Artificial Sequence; identical to SEQ ID NO: 7263
  Synthetic

SEQ ID NO: 12949 - protein, 41 aa, Artificial Sequence
  Synthetic
TTYARSVKGRFTISRDSAKNAVYLQMNSLKSEDTAVYYCSV

SEQ ID NO: 12950 - protein, 41 aa, Artificial Sequence
  Synthetic
TIYSTSVKDRFILSRDHDKNILSLQMNGLKPEDTAMYYCAA

SEQ ID NO: 12951 - protein, 41 aa, Artificial Sequence
  Synthetic
TIEYAEAVKGRATISRDNAKKLSLQLNNLKDEDTAMYYCAA

SEQ ID NO: 12952 - protein, 41 aa, Artificial Sequence
  Synthetic
TGYADFVKGRFTLSRPFGNNTVFLQMNNLEPEDTAVYYCNT

SEQ ID NO: 12953 - protein, 41 aa, Artificial Sequence
  Synthetic
TSYADSVKGRFTISRDSDNKTVYLQMKSLQPEDTAVYHCNV

SEQ ID NO: 12954 - protein, 41 aa, Artificial Sequence
  Synthetic
AYYSTSVKGRFTLTRDYDQKTTLLQMNKLSPEDTAVYFCAA

SEQ ID NO: 12955 - protein, 41 aa, Artificial Sequence
  Synthetic
TVYAESVKGRFTISRDSAKNTMYLEMNSLEPEDTAEYYCAA

SEQ ID NO: 12956 - protein, 41 aa, Artificial Sequence
  Synthetic
PYYADFLEGRFTISRDNAKNTVYLQMNDLKPEDTGVYSCAA

SEQ ID NO: 12957 - protein, 41 aa, Artificial Sequence
  Synthetic
TEYVDSVKGRFTISRDNAKNTVYLQMDNLQVEDTAVYYCAA

SEQ ID NO: 12958 - protein, 41 aa, Artificial Sequence
  Synthetic
AYYEDSVKGRFTVSRDNAENTVYLQMNNLKPEDTGVYTCAA

SEQ ID NO: 12959 - protein, 41 aa, Artificial Sequence
  Synthetic
IFYSTPVKGRFTSSRDDAKNTVYLHMNRLTPGDTAVYYCSP

SEQ ID NO: 12960 - protein, 41 aa, Artificial Sequence
  Synthetic
PHYADSVKGRFTISRDNAKNTVYLQMNSLKPEDTAVYYCAA

SEQ ID NO: 12961 - protein, 41 aa, Artificial Sequence
  Synthetic
EVYGDSVRGRFAISRDNAKNTVYLQMNRLEPKDQAVYYCAA

SEQ ID NO: 12962 - protein, 41 aa, Artificial Sequence; identical to SEQ ID NO: 7315
  Synthetic

SEQ ID NO: 12963 - protein, 41 aa, Artificial Sequence
  Synthetic
TNYADSVKGRFTISRDNAKNTVYLQMDSLKLEDTGIYVCAA

SEQ ID NO: 12964 - protein, 41 aa, Artificial Sequence
  Synthetic
DDYAGSVKGRFTVSRNDAKNTVYLQMNNLKPEDTAVYFCAA

SEQ ID NO: 12965 - protein, 41 aa, Artificial Sequence
  Synthetic
VDYHESVKGRFTISKDSTRNTAYLDIMNIEPEDTATYYCGA

SEQ ID NO: 12966 - protein, 41 aa, Artificial Sequence
  Synthetic
TVYADSVKGRFTVARDNAKTATFLEMSDLKPEDTGTYFCAA

SEQ ID NO: 12967 - protein, 41 aa, Artificial Sequence
  Synthetic
ITYADSVKGRFTISRDDAENTVHLQMTSLKAEDTAIYYCAP

SEQ ID NO: 12968 - protein, 41 aa, Artificial Sequence; identical to SEQ ID NO: 7126
  Synthetic

SEQ ID NO: 12969 - protein, 41 aa, Artificial Sequence
  Synthetic
TNYAASAEGRFTISRDNAKHTVDLQMTNLKPEDTAVYYCKL

SEQ ID NO: 12970 - protein, 41 aa, Artificial Sequence
  Synthetic
TNYADSVKGRFTISRDNAKKMVYLQMNSLKSEDTAVYYCVV

SEQ ID NO: 12971 - protein, 41 aa, Artificial Sequence
  Synthetic
TLYADSVKGRFTISRDNAKNTLYLQMNSLKPEDTAMYYCTA

SEQ ID NO: 12972 - protein, 41 aa, Artificial Sequence
  Synthetic
TVYTDSVKGRFTISRDNTKNTVDLQMDNLKPEDTAVYYCAT

SEQ ID NO: 12973 - protein, 41 aa, Artificial Sequence; identical to SEQ ID NO: 7283
  Synthetic

SEQ ID NO: 12974 - protein, 41 aa, Artificial Sequence
  Synthetic
KYYADSVKGRFTISRDNVNNTLFLQMDRLKSEDTAVYYCRS

SEQ ID NO: 12975 - protein, 41 aa, Artificial Sequence; identical to SEQ ID NO: 7281
  Synthetic

SEQ ID NO: 12976 - protein, 41 aa, Artificial Sequence; identical to SEQ ID NO: 7255
  Synthetic

SEQ ID NO: 12977 - protein, 41 aa, Artificial Sequence
  Synthetic
TRYTDSAKGRFTISRDAAKNTMYLQMNSLKPEDTAVYSCTA

SEQ ID NO: 12978 - protein, 41 aa, Artificial Sequence
  Synthetic
THYADSVKGRFTISRDNAKNMLYLDMNSLKPTDTAAYYCTA

SEQ ID NO: 12979 - protein, 41 aa, Artificial Sequence
  Synthetic
TNYADFAKGRFTISRDNAKNTVDLQMNSLKPEDTAVYYCHA

SEQ ID NO: 12980 - protein, 41 aa, Artificial Sequence
  Synthetic
THYTDSVKGRFTISRDNAKNTLYLQMNSLKPEDTAVYYCAA

SEQ ID NO: 12981 - protein, 41 aa, Artificial Sequence
  Synthetic
TNYADSVQGRFTISRDNVNKAVYLQMNSLDPEDTAVYYCNT

SEQ ID NO: 12982 - protein, 41 aa, Artificial Sequence
  Synthetic
AYYADSVKGRFTISRDGAKNTLSLQMSSLKPEDTAVYYCAA

SEQ ID NO: 12983 - protein, 41 aa, Artificial Sequence
  Synthetic
INYADSVKGRFTISRDNAKNTLYLQMNSLKPEDTAVYYCAR

SEQ ID NO: 12984 - protein, 41 aa, Artificial Sequence
  Synthetic
PRYADSVKGRFTISKDNTKSTIWLQMNSLKPEDTAVYYCAA

SEQ ID NO: 12985 - protein, 41 aa, Artificial Sequence
  Synthetic
TYYTDSVKGRFTLSRDNAKNTLSLQMNSLKPEDTAVYYCAA

SEQ ID NO: 12986 - protein, 41 aa, Artificial Sequence
  Synthetic
PNYADSVKGRATVSRNNANNTVYLQMNGLKPDDTAIYYCAA

SEQ ID NO: 12987 - protein, 41 aa, Artificial Sequence
  Synthetic
PYYGNSGNGRFAISRDIAKSMVYLHMDSLKPEDTAVYYCAA

SEQ ID NO: 12988 - protein, 41 aa, Artificial Sequence
  Synthetic
GSTYYADSVKGRFTISRDNGAVYLQMNSLKPEDTAVYYCAS

SEQ ID NO: 12989 - protein, 41 aa, Artificial Sequence
  Synthetic
IEYADSVKGRFTISRDNAKNTVHLQMNSLTPEDTAVYYCAA

SEQ ID NO: 12990 - protein, 41 aa, Artificial Sequence
  Synthetic
TYYADSVKGRFTISRDNAKNSVYLQMNSLKPEDTAVYYCAA

SEQ ID NO: 12991 - protein, 41 aa, Artificial Sequence
  Synthetic
TKYSDSVKGRFTISRDNAKNTVYLQMNNLKPEDTAIYSCIG

SEQ ID NO: 12992 - protein, 41 aa, Artificial Sequence
  Synthetic
PSYVNSVKGRFTISRDNAKNSVYLHMNNLRPEDTAVYYCNQ

SEQ ID NO: 12993 - protein, 41 aa, Artificial Sequence
  Synthetic
PVYRESVKGRFTIFRDNATDALYLRMNSLKPEDTAVYHCNT

SEQ ID NO: 12994 - protein, 41 aa, Artificial Sequence
  Synthetic
TSYRDSVKGRFTISRDNAKNTVYLQMNNLKPEDTGVYYCEP

SEQ ID NO: 12995 - protein, 41 aa, Artificial Sequence
  Synthetic
ATYSDSVKGRFTISRNNLTNTVFLQMSSLKPEDTAVYYCNR

SEQ ID NO: 12996 - protein, 41 aa, Artificial Sequence
  Synthetic
TRYEDSVKGRSTISRDNAKRSVFLQMDSLKRDDTAVYYCAA

SEQ ID NO: 12997 - protein, 41 aa, Artificial Sequence
  Synthetic
IYYADSVKGRFTISRDNAKNTVYLQMNSVEPEDTAAYYCAT

SEQ ID NO: 12998 - protein, 41 aa, Artificial Sequence; identical to SEQ ID NO: 12754
  Synthetic

SEQ ID NO: 12999 - protein, 41 aa, Artificial Sequence
  Synthetic
TNYADSVKGRFIISRDDAKKTGYLQMNSLKPEDTAVYYCNA

SEQ ID NO: 13000 - protein, 41 aa, Artificial Sequence
  Synthetic
ANATDSVGGRFTITRDNAENTVYLQMNDLKPEDTAVYYCNA

SEQ ID NO: 13001 - protein, 41 aa, Artificial Sequence
  Synthetic
TNYADSVTGRFTISRDNAKRTVYLQMNSLQPEDTAVYYCHA

SEQ ID NO: 13002 - protein, 41 aa, Artificial Sequence
  Synthetic
IYYSDSVKDRFTISRNNVENTVYLQMNSLKTEDTAVYYCAA

SEQ ID NO: 13003 - protein, 41 aa, Artificial Sequence
  Synthetic
TNYATSVKGRFTISRDNAKNTVYLLMNSLKLEDTAVYYCYV

SEQ ID NO: 13004 - protein, 41 aa, Artificial Sequence
  Synthetic
PNYADSVKGRFAISRDNAKNTVYLQMNSLKPEDTAVYYCNT

SEQ ID NO: 13005 - protein, 41 aa, Artificial Sequence
  Synthetic
TNYADSVEGRFTISRDNVKKMVHLQVNSLKPEDTAVYYCNS

SEQ ID NO: 13006 - protein, 41 aa, Artificial Sequence
  Synthetic
TGYADSVMGRFTISRDNAKNTVYLEMNSLNPEDTAVYYCNA

SEQ ID NO: 13007 - protein, 41 aa, Artificial Sequence
  Synthetic
ALVADSVTGRFTISRDNAKNTVYLHMNSLKPEDTAVYSCAA

SEQ ID NO: 13008 - protein, 41 aa, Artificial Sequence
  Synthetic
REYADSVKGRFTISRDGAENTVYLEMNSLKPDDTAIYVCAE

SEQ ID NO: 13009 - protein, 41 aa, Artificial Sequence
  Synthetic
TWYAEPLKGRFAISRDNDKNALYLQMNSLKPEDTAVYYCAG

SEQ ID NO: 13010 - protein, 41 aa, Artificial Sequence
  Synthetic
TYYGDSVKGRFTISRDTAKNTVYLQMNSLKPEDTAVYYCAA

SEQ ID NO: 13011 - protein, 41 aa, Artificial Sequence
  Synthetic
TYYADSVKGRFTISRDNAETTAYLQMSGLKPEDTAVYYCAA

SEQ ID NO: 13012 - protein, 41 aa, Artificial Sequence
  Synthetic
PNYADSVKGRFTISRDNAKKTVYLQMNGLKPEETAVYYCHA

SEQ ID NO: 13013 - protein, 41 aa, Artificial Sequence
  Synthetic
TNYTDSVEGRFTISRDNAKNTMYLQMNSLKPDDTAVYYCNT

SEQ ID NO: 13014 - protein, 41 aa, Artificial Sequence
  Synthetic
TYYADSVKGRFTISRDGTENTVYLQMNSLKPEDTAVYYCAA

SEQ ID NO: 13015 - protein, 41 aa, Artificial Sequence
  Synthetic
IAYADFVKGRFTISRDNAKNTAYLQMNSLKPEDSAVYYCAA

SEQ ID NO: 13016 - protein, 41 aa, Artificial Sequence
  Synthetic
ISYSDSARGRFTISKDSAKNALYLQMNDLKPEDTAVYYCAA

SEQ ID NO: 13017 - protein, 41 aa, Artificial Sequence
  Synthetic
TSTGDSVKGRFTISKDNAKNTVYLQMNDLKPEDTAVYYCAS

SEQ ID NO: 13018 - protein, 41 aa, Artificial Sequence
  Synthetic
TYYANSVKGRFTISRDIAKNTVYLQMHSLTPEDTAVYYCAA

SEQ ID NO: 13019 - protein, 41 aa, Artificial Sequence
  Synthetic
IAYADFVKGRFTISRDNAKNTVYLQMNSLKPEDSAVYSCAA

SEQ ID NO: 13020 - protein, 41 aa, Artificial Sequence
  Synthetic
THIADSVKGRFTISRDNDKNTVDLQMNSLKPEDTAVYYCNY

SEQ ID NO: 13021 - protein, 41 aa, Artificial Sequence
  Synthetic
TYYADSVKGRFTISRDNANKTVSLQMNSLKPEDTAVYYCNY

SEQ ID NO: 13022 - protein, 41 aa, Artificial Sequence
  Synthetic
PYYADSVKGRFAISRDDAKDALYLQMNSLKPEDTAVYYCAV

SEQ ID NO: 13023 - protein, 41 aa, Artificial Sequence
  Synthetic
TNTADSLKGRFTISRDNAKNTVYLQMNNLKPEDTAVYYCFA

SEQ ID NO: 13024 - protein, 41 aa, Artificial Sequence
  Synthetic
INYADSVKGRFTVSRDNGKNTVSLQMNSLKPEDTAVYFCYA

SEQ ID NO: 13025 - protein, 41 aa, Artificial Sequence
  Synthetic
TYYRDSVKGRFTVSRDNAKNTVYLQMNSLKLEDTAIYYCAG

SEQ ID NO: 13026 - protein, 41 aa, Artificial Sequence
  Synthetic
PAFADSVKGRFTISRDNAKKTVYLTMNSLKPEDTAIYYCNL

SEQ ID NO: 13027 - protein, 41 aa, Artificial Sequence
  Synthetic
TMYANSAKGRFTISRSDGHNTLYLQMNSLKPEDSAVYFCHA

SEQ ID NO: 13028 - protein, 41 aa, Artificial Sequence
  Synthetic
TDYTDSVKGRFTISRDDAKNTWYLQMNSLKPEDTAVYFCKT

SEQ ID NO: 13029 - protein, 41 aa, Artificial Sequence
  Synthetic
TNYRDSVKGRFTVSRDLANNTVHLEMTSLKPEDTAVYYCYA

SEQ ID NO: 13030 - protein, 41 aa, Artificial Sequence
  Synthetic
AVYRNSVQGRFTISGHSAENAVYLQMDSLKPEDTAVYYCNT

SEQ ID NO: 13031 - protein, 41 aa, Artificial Sequence
  Synthetic
TTYADSVKGRFTISRDNTKKTGWLEMNMVKPEDAAVYYCNA

SEQ ID NO: 13032 - protein, 41 aa, Artificial Sequence
  Synthetic
TYYADSVKGRFAISRDNAKNTVYLQMNSLKPEDTAVYVCEV

SEQ ID NO: 13033 - protein, 41 aa, Artificial Sequence
  Synthetic
ADYAASVKGRFTISGVNAKNTVYLQMNSLKPEDTAVYYCAA

SEQ ID NO: 13034 - protein, 41 aa, Artificial Sequence; identical to SEQ ID NO: 7346
  Synthetic

SEQ ID NO: 13035 - protein, 41 aa, Artificial Sequence
  Synthetic
AYYADSVKGRFTVSRDDAKNTVYLQMNSLKPEDTGVYYCKR

SEQ ID NO: 13036 - protein, 41 aa, Artificial Sequence
  Synthetic
TYYADFVKGRFTISRDNAKNVAYLQMNNLKPEDTGVYYCKR

SEQ ID NO: 13037 - protein, 41 aa, Artificial Sequence; identical to SEQ ID NO: 7351
  Synthetic

SEQ ID NO: 13038 - protein, 41 aa, Artificial Sequence
  Synthetic
TYYGDSVKGRFTISRDNARNTVYLQMNSLKAGDTAVYYCKA

SEQ ID NO: 13039 - protein, 41 aa, Artificial Sequence
  Synthetic
TRHADSVKGRFTISGDNAKNTVYLQMNSLKPEDTAVYYCAG

SEQ ID NO: 13040 - protein, 41 aa, Artificial Sequence
  Synthetic
VNYADSVKGRFRISRNNAKNMLYLHMTSLKPEDTAVYYCAA

SEQ ID NO: 13041 - protein, 41 aa, Artificial Sequence
  Synthetic
TKYADFVKGRYTISRDNVKNTVYLQMNTLKPEDTAVYYCAA

SEQ ID NO: 13042 - protein, 41 aa, Artificial Sequence
  Synthetic
TDYAGSVKGRFTISRDNAKNTVSLQMNSLKPEDTAVYYCQA

SEQ ID NO: 13043 - protein, 41 aa, Artificial Sequence
  Synthetic
TNYVDSVKGRFTISRDNAKKTAYLQMNSLKPEDTAVYYCNA

SEQ ID NO: 13044 - protein, 41 aa, Artificial Sequence
  Synthetic
TYYQDSVKGRFTISRDNAKNTVYLQMNSLKPEDTAVYYCKA

SEQ ID NO: 13045 - protein, 41 aa, Artificial Sequence
  Synthetic
TQYADSVKGRFTISRDNAKNTVYLQLNSVKPDDTAVYYCKA

SEQ ID NO: 13046 - protein, 41 aa, Artificial Sequence
  Synthetic
LNYAESVKGRFTISRDNGKKTVYLQMNSLKPEDTAVYYCNA

SEQ ID NO: 13047 - protein, 41 aa, Artificial Sequence
  Synthetic
TYYADSVKGRFTVSRDNAKETVYLQMNNLKPEDTGVYYCKR

SEQ ID NO: 13048 - protein, 41 aa, Artificial Sequence
  Synthetic
TYYADSVKGRFTISRDNANNTVYLQMNSLKPEDTGVYYCAA

SEQ ID NO: 13049 - protein, 41 aa, Artificial Sequence
  Synthetic
TYYADSVKGRFTVSRDSGKNTVYLEMNSLSPEDTAVYYCAA

SEQ ID NO: 13050 - protein, 41 aa, Artificial Sequence; identical to SEQ ID NO: 12989
  Synthetic

SEQ ID NO: 13051 - protein, 41 aa, Artificial Sequence
  Synthetic
ETYADAVKGRFTISRDNAKNTAYLQMNHLKPEDTGVYLCDV

SEQ ID NO: 13052 - protein, 41 aa, Artificial Sequence
  Synthetic
TTYTDSVKGRFTISRDRAKNTLYLQMNSLKPEDTAIYYCNA

SEQ ID NO: 13053 - protein, 41 aa, Artificial Sequence; identical to SEQ ID NO: 7111
  Synthetic

SEQ ID NO: 13054 - protein, 41 aa, Artificial Sequence; identical to SEQ ID NO: 7126
  Synthetic

SEQ ID NO: 13055 - protein, 41 aa, Artificial Sequence; identical to SEQ ID NO: 7111
  Synthetic

SEQ ID NO: 13056 - protein, 41 aa, Artificial Sequence; identical to SEQ ID NO: 7111
  Synthetic

SEQ ID NO: 13057 - protein, 41 aa, Artificial Sequence; identical to SEQ ID NO: 12407
  Synthetic

SEQ ID NO: 13058 - protein, 41 aa, Artificial Sequence; identical to SEQ ID NO: 7111
  Synthetic

SEQ ID NO: 13059 - protein, 41 aa, Artificial Sequence
  Synthetic
TYYADSVKGRFTISRDNAENTVYLQMNSLKPEDTAVYYCAT

SEQ ID NO: 13060 - protein, 13 aa, Artificial Sequence
  Synthetic
GTRKNVWTRQHPF

SEQ ID NO: 13061 - protein, 10 aa, Artificial Sequence
  Synthetic
APTATHALYF

SEQ ID NO: 13062 - protein, 17 aa, Artificial Sequence
  Synthetic
DIPLRCRDIVAKGGDGF

SEQ ID NO: 13063 - protein, 14 aa, Artificial Sequence
  Synthetic
GRWDKYGSSFQDEY

SEQ ID NO: 13064 - protein, 17 aa, Artificial Sequence
  Synthetic
DSFEDPTCTLVTSSGAF

SEQ ID NO: 13065 - protein, 8 aa, Artificial Sequence
  Synthetic
TRAYSVGY

SEQ ID NO: 13066 - protein, 12 aa, Artificial Sequence
  Synthetic
HRFCNTWSLGTL

SEQ ID NO: 13067 - protein, 7 aa, Artificial Sequence
  Synthetic
PKGHTGD

SEQ ID NO: 13068 - protein, 7 aa, Artificial Sequence
  Synthetic
DDLMIDR

SEQ ID NO: 13069 - protein, 17 aa, Artificial Sequence
  Synthetic
DFLRGSRRYGINTTEEY

SEQ ID NO: 13070 - protein, 4 aa, Artificial Sequence
  Synthetic
VTPW

SEQ ID NO: 13071 - protein, 6 aa, Artificial Sequence
  Synthetic
KTYLLH

SEQ ID NO: 13072 - protein, 4 aa, Artificial Sequence
  Synthetic
RTWR

SEQ ID NO: 13073 - protein, 7 aa, Artificial Sequence
  Synthetic
NTGLRTL

SEQ ID NO: 13074 - protein, 12 aa, Artificial Sequence
  Synthetic
DGSWRGVCNNVY

SEQ ID NO: 13075 - protein, 17 aa, Artificial Sequence
  Synthetic
RSMRSNLYTVYEAPHDY

SEQ ID NO: 13076 - protein, 5 aa, Artificial Sequence
  Synthetic
WRLGY

SEQ ID NO: 13077 - protein, 13 aa, Artificial Sequence
  Synthetic
SRRASYFGDPTDF

SEQ ID NO: 13078 - protein, 10 aa, Artificial Sequence
  Synthetic
YSRFGYSGLC

SEQ ID NO: 13079 - protein, 14 aa, Artificial Sequence
  Synthetic
QAGRFSGPFTNQTY

SEQ ID NO: 13080 - protein, 10 aa, Artificial Sequence
  Synthetic
DGPEIATMIG

SEQ ID NO: 13081 - protein, 15 aa, Artificial Sequence
  Synthetic
RDYGCYSGSAQGTEF

SEQ ID NO: 13082 - protein, 8 aa, Artificial Sequence
  Synthetic
QCGVRSIR

SEQ ID NO: 13083 - protein, 13 aa, Artificial Sequence
  Synthetic
FMTGTQVLRPQDY

SEQ ID NO: 13084 - protein, 5 aa, Artificial Sequence
  Synthetic
TINGA

SEQ ID NO: 13085 - protein, 18 aa, Artificial Sequence
  Synthetic
IRKPQFYTCRMWKPRADF

SEQ ID NO: 13086 - protein, 26 aa, Artificial Sequence
  Synthetic
ADFTCMPEVTANQALNIMSGSQFAAG

SEQ ID NO: 13087 - protein, 11 aa, Artificial Sequence
  Synthetic
WSESKRLCLPD

SEQ ID NO: 13088 - protein, 22 aa, Artificial Sequence
  Synthetic
GLLRAADLGRELRSLLTSPNSV

SEQ ID NO: 13089 - protein, 14 aa, Artificial Sequence
  Synthetic
RTGFSGSWTRQTDY

SEQ ID NO: 13090 - protein, 15 aa, Artificial Sequence
  Synthetic
NRGFSRSHLTCPAPG

SEQ ID NO: 13091 - protein, 5 aa, Artificial Sequence
  Synthetic
LGCAQ

SEQ ID NO: 13092 - protein, 16 aa, Artificial Sequence
  Synthetic
RPKSGARGCADLWDWY

SEQ ID NO: 13093 - protein, 26 aa, Artificial Sequence
  Synthetic
GGGDPGNKPAIYSCYSGSWSREQAED

SEQ ID NO: 13094 - protein, 15 aa, Artificial Sequence
  Synthetic
DARRGYWRPCNSIEY

SEQ ID NO: 13095 - protein, 12 aa, Artificial Sequence
  Synthetic
DPDCRATWYRGG

SEQ ID NO: 13096 - protein, 17 aa, Artificial Sequence
  Synthetic
PSPGVTYGGNDQPCKYL

SEQ ID NO: 13097 - protein, 23 aa, Artificial Sequence
  Synthetic
DYGWKLDGRLLGSESWGLQPSGY

SEQ ID NO: 13098 - protein, 18 aa, Artificial Sequence
  Synthetic
VHLWDGRAWYCPERTSDF

SEQ ID NO: 13099 - protein, 18 aa, Artificial Sequence
  Synthetic
HLARGGGYCYDLSLSSRF

SEQ ID NO: 13100 - protein, 14 aa, Artificial Sequence
  Synthetic
GPRKVGSCDTSFSY

SEQ ID NO: 13101 - protein, 16 aa, Artificial Sequence
  Synthetic
NEFGVRVWSLCQSTRY

SEQ ID NO: 13102 - protein, 20 aa, Artificial Sequence
  Synthetic
SSTTAALVWSPTCPLRGSDY

SEQ ID NO: 13103 - protein, 6 aa, Artificial Sequence
  Synthetic
QRPYGN

SEQ ID NO: 13104 - protein, 19 aa, Artificial Sequence
  Synthetic
QYAASKTYGRSCGTALGDY

SEQ ID NO: 13105 - protein, 14 aa, Artificial Sequence
  Synthetic
RLRAGYCYPADYSM

SEQ ID NO: 13106 - protein, 16 aa, Artificial Sequence
  Synthetic
LRCLSDSDPDTRVHMY

SEQ ID NO: 13107 - protein, 14 aa, Artificial Sequence
  Synthetic
GPRRRDYGLGPCDY

SEQ ID NO: 13108 - protein, 10 aa, Artificial Sequence
  Synthetic
SRPDSTCDYF

SEQ ID NO: 13109 - protein, 15 aa, Artificial Sequence
  Synthetic
RNAGGRFRPSAAGGY

SEQ ID NO: 13110 - protein, 16 aa, Artificial Sequence
  Synthetic
GGSLYSGSCSRYWDEY

SEQ ID NO: 13111 - protein, 15 aa, Artificial Sequence
  Synthetic
GGNWYDGVLNVERAF

SEQ ID NO: 13112 - protein, 16 aa, Artificial Sequence
  Synthetic
GGSYYSGSCSRYGDEW

SEQ ID NO: 13113 - protein, 15 aa, Artificial Sequence
  Synthetic
LSGVCDGGPSMTAIQ

SEQ ID NO: 13114 - protein, 16 aa, Artificial Sequence
  Synthetic
ETRGDCSGGYLGPDPY

SEQ ID NO: 13115 - protein, 17 aa, Artificial Sequence
  Synthetic
STGRLWAGYDWYRPEPY

SEQ ID NO: 13116 - protein, 10 aa, Artificial Sequence
  Synthetic
KIPPKTWFEY

SEQ ID NO: 13117 - protein, 14 aa, Artificial Sequence
  Synthetic
TRHDTRATLEDLWY

SEQ ID NO: 13118 - protein, 16 aa, Artificial Sequence
  Synthetic
DCSIATIAPGSPLIEF

SEQ ID NO: 13119 - protein, 14 aa, Artificial Sequence
  Synthetic
GWSRADSWCYLPDL

SEQ ID NO: 13120 - protein, 13 aa, Artificial Sequence
  Synthetic
SLRYYCNPKEGLF

SEQ ID NO: 13121 - protein, 12 aa, Artificial Sequence
  Synthetic
DYYSDYDESCDY

SEQ ID NO: 13122 - protein, 13 aa, Artificial Sequence
  Synthetic
QRAEWGECILDDY

SEQ ID NO: 13123 - protein, 15 aa, Artificial Sequence
  Synthetic
VASVVAHRCSPSPDY

SEQ ID NO: 13124 - protein, 13 aa, Artificial Sequence
  Synthetic
VWGSGCSGGYPRL

SEQ ID NO: 13125 - protein, 16 aa, Artificial Sequence
  Synthetic
DYGWGGYCYNLETFGF

SEQ ID NO: 13126 - protein, 21 aa, Artificial Sequence
  Synthetic
PPRNREAGDCYSGSWSKPREY

SEQ ID NO: 13127 - protein, 10 aa, Artificial Sequence
  Synthetic
HVLCRLLKVL

SEQ ID NO: 13128 - protein, 15 aa, Artificial Sequence
  Synthetic
DLFGLLFRLLEAESY

SEQ ID NO: 13129 - protein, 8 aa, Artificial Sequence
  Synthetic
DPWYPAAC

SEQ ID NO: 13130 - protein, 15 aa, Artificial Sequence
  Synthetic
ARYRGIGSQVRWTDF

SEQ ID NO: 13131 - protein, 15 aa, Artificial Sequence
  Synthetic
ARYRGIGSRVRWTDF

SEQ ID NO: 13132 - protein, 17 aa, Artificial Sequence
  Synthetic
SKRGPSMGWVPKSASYF

SEQ ID NO: 13133 - protein, 16 aa, Artificial Sequence
  Synthetic
VARVVCPGDKLGASGY

SEQ ID NO: 13134 - protein, 17 aa, Artificial Sequence
  Synthetic
RRRGWSNTSGWKQPGWY

SEQ ID NO: 13135 - protein, 12 aa, Artificial Sequence
  Synthetic
GGYTTGVCAGGF

SEQ ID NO: 13136 - protein, 16 aa, Artificial Sequence
  Synthetic
GSYTCNPDRWSQVSDY

SEQ ID NO: 13137 - protein, 6 aa, Artificial Sequence
  Synthetic
GVGVVD

SEQ ID NO: 13138 - protein, 15 aa, Artificial Sequence
  Synthetic
GELIRFSRWRTGREF

SEQ ID NO: 13139 - protein, 11 aa, Artificial Sequence
  Synthetic
KGVADRDFTNF

SEQ ID NO: 13140 - protein, 9 aa, Artificial Sequence
  Synthetic
TGTTRWCRP

SEQ ID NO: 13141 - protein, 16 aa, Artificial Sequence
  Synthetic
APGRPSLKYEMRQVDF

SEQ ID NO: 13142 - protein, 14 aa, Artificial Sequence
  Synthetic
GHTVGSSWRDPGAW

SEQ ID NO: 13143 - protein, 15 aa, Artificial Sequence
  Synthetic
SRSGLRARLLRPELY

SEQ ID NO: 13144 - protein, 14 aa, Artificial Sequence
  Synthetic
DQTGGSWWADCRYL

SEQ ID NO: 13145 - protein, 10 aa, Artificial Sequence
  Synthetic
VCRDRWNVRQ

SEQ ID NO: 13146 - protein, 8 aa, Artificial Sequence
  Synthetic
CRRSIDDY

SEQ ID NO: 13147 - protein, 10 aa, Artificial Sequence
  Synthetic
GGGSGSWCPG

SEQ ID NO: 13148 - protein, 18 aa, Artificial Sequence
  Synthetic
IAKEYNRGGYYCRSSGRV

SEQ ID NO: 13149 - protein, 14 aa, Artificial Sequence
  Synthetic
WRGDCGIPDMLRTD

SEQ ID NO: 13150 - protein, 24 aa, Artificial Sequence
  Synthetic
PKSGLLRPPISHCDSCVVLGVDGY

SEQ ID NO: 13151 - protein, 20 aa, Artificial Sequence
  Synthetic
ADAIGLAEYWSTPTLSAARY

SEQ ID NO: 13152 - protein, 17 aa, Artificial Sequence
  Synthetic
ADKWGGYCGGVADIAHF

SEQ ID NO: 13153 - protein, 17 aa, Artificial Sequence
  Synthetic
STRVWGGYCGGLDDATN

SEQ ID NO: 13154 - protein, 17 aa, Artificial Sequence
  Synthetic
AADVYRGGYCSAYAGRF

SEQ ID NO: 13155 - protein, 15 aa, Artificial Sequence
  Synthetic
GTRPSIFCYKGDRWY

SEQ ID NO: 13156 - protein, 15 aa, Artificial Sequence
  Synthetic
DVNRGGFCYIEDWYF

SEQ ID NO: 13157 - protein, 15 aa, Artificial Sequence
  Synthetic
DDLRGGYCSSSSTLY

SEQ ID NO: 13158 - protein, 16 aa, Artificial Sequence
  Synthetic
SYQFFSSEPSLSARRY

SEQ ID NO: 13159 - protein, 16 aa, Artificial Sequence
  Synthetic
TETWGPYCGQASPAYF

SEQ ID NO: 13160 - protein, 4 aa, Artificial Sequence
  Synthetic
DSSG

SEQ ID NO: 13161 - protein, 13 aa, Artificial Sequence
  Synthetic
RRGVILTLSPETY

SEQ ID NO: 13162 - protein, 7 aa, Artificial Sequence
  Synthetic
GESWWGY

SEQ ID NO: 13163 - protein, 12 aa, Artificial Sequence
  Synthetic
GRALVGPGFKGF

SEQ ID NO: 13164 - protein, 20 aa, Artificial Sequence
  Synthetic
DNPGPPVCRGGNCRVCDTQA

SEQ ID NO: 13165 - protein, 14 aa, Artificial Sequence
  Synthetic
GSRQFQRTSTTWCL

SEQ ID NO: 13166 - protein, 15 aa, Artificial Sequence
  Synthetic
GNCNYTCHACFPPDY

SEQ ID NO: 13167 - protein, 10 aa, Artificial Sequence
  Synthetic
GRGWSCPSNY

SEQ ID NO: 13168 - protein, 22 aa, Artificial Sequence
  Synthetic
DAGLNDIELKYTRTDCGPLAGY

SEQ ID NO: 13169 - protein, 18 aa, Artificial Sequence
  Synthetic
VPLCSRPPPMIRGAQHGY

SEQ ID NO: 13170 - protein, 16 aa, Artificial Sequence
  Synthetic
DSASSVGFCSNPLEDM

SEQ ID NO: 13171 - protein, 12 aa, Artificial Sequence
  Synthetic
DFLSGNLLDGRY

SEQ ID NO: 13172 - protein, 12 aa, Artificial Sequence
  Synthetic
TARRCGFTTTWL

SEQ ID NO: 13173 - protein, 16 aa, Artificial Sequence
  Synthetic
VNSRDGADCPTGRYDY

SEQ ID NO: 13174 - protein, 12 aa, Artificial Sequence
  Synthetic
GVAASLSPHYGY

SEQ ID NO: 13175 - protein, 15 aa, Artificial Sequence
  Synthetic
ALAYAWSCSRAEAGY

SEQ ID NO: 13176 - protein, 14 aa, Artificial Sequence
  Synthetic
AGRRSECDSERHSF

SEQ ID NO: 13177 - protein, 16 aa, Artificial Sequence
  Synthetic
VRVLAGVPCLPPPYEY

SEQ ID NO: 13178 - protein, 13 aa, Artificial Sequence
  Synthetic
SFSGGRWSDRSRY

SEQ ID NO: 13179 - protein, 17 aa, Artificial Sequence
  Synthetic
LRLQDLWRGSCPETLGY

SEQ ID NO: 13180 - protein, 21 aa, Artificial Sequence
  Synthetic
TGPSCLSDSSLRPWHFAGVAF

SEQ ID NO: 13181 - protein, 9 aa, Artificial Sequence
  Synthetic
TRVGGFCYD

SEQ ID NO: 13182 - protein, 12 aa, Artificial Sequence
  Synthetic
RWAYCRSFRDSP

SEQ ID NO: 13183 - protein, 17 aa, Artificial Sequence
  Synthetic
GQVQCYTEFALRWLLSW

SEQ ID NO: 13184 - protein, 14 aa, Artificial Sequence
  Synthetic
DRYNCEYIRRGGEF

SEQ ID NO: 13185 - protein, 15 aa, Artificial Sequence
  Synthetic
EGPTNIAAIYWGRAF

SEQ ID NO: 13186 - protein, 16 aa, Artificial Sequence
  Synthetic
LSYYSDSELGDCGDGE

SEQ ID NO: 13187 - protein, 25 aa, Artificial Sequence
  Synthetic
LASGEEETVRSWFYGRRDFSSQPDL

SEQ ID NO: 13188 - protein, 24 aa, Artificial Sequence
  Synthetic
QFARATRLTCEADWYLTSAEVYVY

SEQ ID NO: 13189 - protein, 15 aa, Artificial Sequence
  Synthetic
VSTAWTLCPRTPGAY

SEQ ID NO: 13190 - protein, 17 aa, Artificial Sequence
  Synthetic
ECYSTDYGGNVTAGPGL

SEQ ID NO: 13191 - protein, 15 aa, Artificial Sequence
  Synthetic
DQACGSWTGPCHANY

SEQ ID NO: 13192 - protein, 15 aa, Artificial Sequence
  Synthetic
AQGLTWGSLLTPTRY

SEQ ID NO: 13193 - protein, 20 aa, Artificial Sequence
  Synthetic
CQDSYCYKGGFYAVYPGYGC

SEQ ID NO: 13194 - protein, 16 aa, Artificial Sequence
  Synthetic
APGEVNGWRGLGTTRS

SEQ ID NO: 13195 - protein, 18 aa, Artificial Sequence
  Synthetic
ETAPRYYNDAVWPSDSDF

SEQ ID NO: 13196 - protein, 20 aa, Artificial Sequence
  Synthetic
IQPTYGIDFFGSCPSESADF

SEQ ID NO: 13197 - protein, 15 aa, Artificial Sequence
  Synthetic
VGYTDYCKSPWPEAY

SEQ ID NO: 13198 - protein, 16 aa, Artificial Sequence
  Synthetic
RTAEWFACPPAASVDY

SEQ ID NO: 13199 - protein, 12 aa, Artificial Sequence
  Synthetic
GCGAIQPLGAGY

SEQ ID NO: 13200 - protein, 22 aa, Artificial Sequence
  Synthetic
HPGRNLAIQYLNALPGGGASYF

SEQ ID NO: 13201 - protein, 19 aa, Artificial Sequence
  Synthetic
DGPDDIATPCPCGAQYRFL

SEQ ID NO: 13202 - protein, 15 aa, Artificial Sequence
  Synthetic
GCQGLYSSCRYCSVY

SEQ ID NO: 13203 - protein, 11 aa, Artificial Sequence
  Synthetic
GHCKFWYPRLV

SEQ ID NO: 13204 - protein, 15 aa, Artificial Sequence
  Synthetic
DNGPGTCIGRPEYLF

SEQ ID NO: 13205 - protein, 10 aa, Artificial Sequence
  Synthetic
VILCGDSDMA

SEQ ID NO: 13206 - protein, 11 aa, Artificial Sequence
  Synthetic
WADRCSPGYGL

SEQ ID NO: 13207 - protein, 16 aa, Artificial Sequence
  Synthetic
RSTFCTGGTWRDRDEV

SEQ ID NO: 13208 - protein, 13 aa, Artificial Sequence
  Synthetic
RVFVPPINCPADF

SEQ ID NO: 13209 - protein, 15 aa, Artificial Sequence
  Synthetic
NFLVSTSSVLSPLNF

SEQ ID NO: 13210 - protein, 15 aa, Artificial Sequence
  Synthetic
TSGALGGSKLRREGY

SEQ ID NO: 13211 - protein, 12 aa, Artificial Sequence
  Synthetic
LPGQCGRQDDEY

SEQ ID NO: 13212 - protein, 16 aa, Artificial Sequence
  Synthetic
AAGGGGCGASMSPGGF

SEQ ID NO: 13213 - protein, 16 aa, Artificial Sequence
  Synthetic
GIRVPDGSCLSENTIW

SEQ ID NO: 13214 - protein, 22 aa, Artificial Sequence
  Synthetic
VLFDVKQGVVPNAPSPNCTGYF

SEQ ID NO: 13215 - protein, 15 aa, Artificial Sequence
  Synthetic
APYHCDSASWRVKEG

SEQ ID NO: 13216 - protein, 19 aa, Artificial Sequence
  Synthetic
RKGGAGPCGGNWAANLGRF

SEQ ID NO: 13217 - protein, 16 aa, Artificial Sequence
  Synthetic
VPRFLRCDYYFSRGTF

SEQ ID NO: 13218 - protein, 16 aa, Artificial Sequence
  Synthetic
GRAYLDDPTWLKGTGF

SEQ ID NO: 13219 - protein, 20 aa, Artificial Sequence
  Synthetic
ADSCVTFARVQGGTLDYSSI

SEQ ID NO: 13220 - protein, 22 aa, Artificial Sequence
  Synthetic
AGRTKYLRLVASGLSTLSTQAY

SEQ ID NO: 13221 - protein, 11 aa, Artificial Sequence
  Synthetic
DRSCLPLGNRL

SEQ ID NO: 13222 - protein, 16 aa, Artificial Sequence
  Synthetic
RRRVAICSPGVGWTAY

SEQ ID NO: 13223 - protein, 16 aa, Artificial Sequence
  Synthetic
NFSPNYALSCRTTLGD

SEQ ID NO: 13224 - protein, 21 aa, Artificial Sequence
  Synthetic
DRIRLGFPRQTPACTDLRALF

SEQ ID NO: 13225 - protein, 14 aa, Artificial Sequence
  Synthetic
DARTGGDLRRASTY

SEQ ID NO: 13226 - protein, 16 aa, Artificial Sequence
  Synthetic
GRYGIVNFARCEESDF

SEQ ID NO: 13227 - protein, 21 aa, Artificial Sequence
  Synthetic
SLECCPVSPSDGTPRLTKVEF

SEQ ID NO: 13228 - protein, 14 aa, Artificial Sequence
  Synthetic
ELLCYGDYSFMTGQ

SEQ ID NO: 13229 - protein, 18 aa, Artificial Sequence
  Synthetic
DIASYDTSPCTVIAGLEY

SEQ ID NO: 13230 - protein, 16 aa, Artificial Sequence
  Synthetic
NPFRCDWSYVPPATAF

SEQ ID NO: 13231 - protein, 22 aa, Artificial Sequence
  Synthetic
DPKLVCGSVAPTILLFRLLSMG

SEQ ID NO: 13232 - protein, 14 aa, Artificial Sequence
  Synthetic
RRSSNKPYFDLRSY

SEQ ID NO: 13233 - protein, 16 aa, Artificial Sequence
  Synthetic
RKDAHVWTSLLYPNQY

SEQ ID NO: 13234 - protein, 15 aa, Artificial Sequence
  Synthetic
KRLSCADNWVRVSAP

SEQ ID NO: 13235 - protein, 12 aa, Artificial Sequence
  Synthetic
VVGGYCYHPYTM

SEQ ID NO: 13236 - protein, 11 aa, Artificial Sequence
  Synthetic
EGVDWFKGGCS

SEQ ID NO: 13237 - protein, 16 aa, Artificial Sequence
  Synthetic
IVAPPHERCGELERAY

SEQ ID NO: 13238 - protein, 20 aa, Artificial Sequence
  Synthetic
DYDPDYSDYNAGKELLPSDF

SEQ ID NO: 13239 - protein, 20 aa, Artificial Sequence
  Synthetic
RPRAGPYDDCLGSYWGGRFE

SEQ ID NO: 13240 - protein, 18 aa, Artificial Sequence
  Synthetic
RDAPLGDCYVSSWSSQTM

SEQ ID NO: 13241 - protein, 15 aa, Artificial Sequence
  Synthetic
RQFSVCAGALMPSAY

SEQ ID NO: 13242 - protein, 13 aa, Artificial Sequence
  Synthetic
DYGGWCRVKERGY

SEQ ID NO: 13243 - protein, 14 aa, Artificial Sequence
  Synthetic
QYFCLKATMTSNRY

SEQ ID NO: 13244 - protein, 20 aa, Artificial Sequence
  Synthetic
SNRSRFCLSYYSDYVDMGVI

SEQ ID NO: 13245 - protein, 19 aa, Artificial Sequence
  Synthetic
FLVGFDDLVCRPDVSIYPS

SEQ ID NO: 13246 - protein, 19 aa, Artificial Sequence
  Synthetic
YVDVDGSKDITCGRRSDFG

SEQ ID NO: 13247 - protein, 16 aa, Artificial Sequence
  Synthetic
AVGSLRGQCLGRRLPY

SEQ ID NO: 13248 - protein, 15 aa, Artificial Sequence
  Synthetic
RNAGGRFRAWAGGGD

SEQ ID NO: 13249 - protein, 17 aa, Artificial Sequence
  Synthetic
DTSPLCGPATWRNINGY

SEQ ID NO: 13250 - protein, 13 aa, Artificial Sequence
  Synthetic
RYSATCPRTLSGF

SEQ ID NO: 13251 - protein, 15 aa, Artificial Sequence
  Synthetic
SGSLDTNDALVAWAF

SEQ ID NO: 13252 - protein, 11 aa, Artificial Sequence
  Synthetic
NIVMYGPCPRR

SEQ ID NO: 13253 - protein, 12 aa, Artificial Sequence
  Synthetic
ALQPGGYCGYGA

SEQ ID NO: 13254 - protein, 10 aa, Artificial Sequence
  Synthetic
VSLMDRISQH

SEQ ID NO: 13255 - protein, 16 aa, Artificial Sequence
  Synthetic
VPAHLGPGAILDLKKY

SEQ ID NO: 13256 - protein, 13 aa, Artificial Sequence
  Synthetic
ELSGGSCELPLLF

SEQ ID NO: 13257 - protein, 15 aa, Artificial Sequence
  Synthetic
DWKYWTCGAQTGGYF

SEQ ID NO: 13258 - protein, 19 aa, Artificial Sequence
  Synthetic
GSRFSSPVGSTSRLESSDY

SEQ ID NO: 13259 - protein, 14 aa, Artificial Sequence
  Synthetic
ADPSIYYSILGIEY

SEQ ID NO: 13260 - protein, 20 aa, Artificial Sequence
  Synthetic
DSPCYMPTMPAPPIRDSFGW

SEQ ID NO: 13261 - protein, 13 aa, Artificial Sequence
  Synthetic
TSSFYWYCTTAPY

SEQ ID NO: 13262 - protein, 14 aa, Artificial Sequence
  Synthetic
TEIEWYGCNLRTTF

SEQ ID NO: 13263 - protein, 20 aa, Artificial Sequence
  Synthetic
NQLAGGWYLDPNYWLSVGAY

SEQ ID NO: 13264 - protein, 22 aa, Artificial Sequence
  Synthetic
RLTEMGACDARWATLATRTFAY

SEQ ID NO: 13265 - protein, 8 aa, Artificial Sequence
  Synthetic
DSYPCHLL

SEQ ID NO: 13266 - protein, 5 aa, Artificial Sequence
  Synthetic
LPTSF

SEQ ID NO: 13267 - protein, 14 aa, Artificial Sequence
  Synthetic
EPLSGGRRYGSCGL

SEQ ID NO: 13268 - protein, 17 aa, Artificial Sequence
  Synthetic
GPGSGKLVVAGRTCYGP

SEQ ID NO: 13269 - protein, 12 aa, Artificial Sequence
  Synthetic
SPYSGSRCPIPT

SEQ ID NO: 13270 - protein, 11 aa, Artificial Sequence
  Synthetic
SLRYGLPGCPI

SEQ ID NO: 13271 - protein, 12 aa, Artificial Sequence
  Synthetic
GNSVRLASWEGY

SEQ ID NO: 13272 - protein, 16 aa, Artificial Sequence
  Synthetic
DGGRLDPYCSIKAYAY

SEQ ID NO: 13273 - protein, 17 aa, Artificial Sequence
  Synthetic
STVASTGWCSRLRPYDY

SEQ ID NO: 13274 - protein, 11 aa, Artificial Sequence
  Synthetic
NYYCTFVPGNY

SEQ ID NO: 13275 - protein, 16 aa, Artificial Sequence
  Synthetic
IEEYCGGTYWLRPNKY

SEQ ID NO: 13276 - protein, 10 aa, Artificial Sequence
  Synthetic
GGYELRDRTY

SEQ ID NO: 13277 - protein, 15 aa, Artificial Sequence
  Synthetic
SSRWMDYSALTAKAY

SEQ ID NO: 13278 - protein, 13 aa, Artificial Sequence
  Synthetic
TEVAGWPLDIGIY

SEQ ID NO: 13279 - protein, 15 aa, Artificial Sequence
  Synthetic
GWSSLGSCGTNRNRY

SEQ ID NO: 13280 - protein, 22 aa, Artificial Sequence
  Synthetic
DSTIYASYYECGHGLSTGGYGY

SEQ ID NO: 13281 - protein, 10 aa, Artificial Sequence
  Synthetic
GYRNYGQCAT

SEQ ID NO: 13282 - protein, 16 aa, Artificial Sequence
  Synthetic
TRKYVPVRFALDQSSY

SEQ ID NO: 13283 - protein, 10 aa, Artificial Sequence
  Synthetic
GGDALVATRY

SEQ ID NO: 13284 - protein, 14 aa, Artificial Sequence
  Synthetic
VRGYFMRLPSSHNF

SEQ ID NO: 13285 - protein, 21 aa, Artificial Sequence
  Synthetic
DSGTQLGYVGAVGLSCLDYVM

SEQ ID NO: 13286 - protein, 17 aa, Artificial Sequence
  Synthetic
GQGCLTTIQALGGAYGY

SEQ ID NO: 13287 - protein, 9 aa, Artificial Sequence
  Synthetic
TSISCSSGY

SEQ ID NO: 13288 - protein, 15 aa, Artificial Sequence
  Synthetic
GRWRFGDICHEGSGY

SEQ ID NO: 13289 - protein, 11 aa, Artificial Sequence
  Synthetic
SNTCPGASADF

SEQ ID NO: 13290 - protein, 4 aa, Artificial Sequence
  Synthetic
NVGF

SEQ ID NO: 13291 - protein, 10 aa, Artificial Sequence
  Synthetic
GGHHLRDHTY

SEQ ID NO: 13292 - protein, 17 aa, Artificial Sequence
  Synthetic
DRRQRWGPYYYLSALEY

SEQ ID NO: 13293 - protein, 15 aa, Artificial Sequence
  Synthetic
ATTTVASPPVRHVCN

SEQ ID NO: 13294 - protein, 14 aa, Artificial Sequence
  Synthetic
RPSIRCASFSATEY

SEQ ID NO: 13295 - protein, 11 aa, Artificial Sequence
  Synthetic
GFGLSLSRYTY

SEQ ID NO: 13296 - protein, 10 aa, Artificial Sequence
  Synthetic
DSRPIYSGTW

SEQ ID NO: 13297 - protein, 5 aa, Artificial Sequence
  Synthetic
CYNLE

SEQ ID NO: 13298 - protein, 15 aa, Artificial Sequence
  Synthetic
VFKSWCSDGLGTTLP

SEQ ID NO: 13299 - protein, 16 aa, Artificial Sequence
  Synthetic
DISAPPGIGGTCAFLG

SEQ ID NO: 13300 - protein, 10 aa, Artificial Sequence
  Synthetic
DGGYYSCGVG

SEQ ID NO: 13301 - protein, 18 aa, Artificial Sequence
  Synthetic
TDESPLRRRFSLLDRRRY

SEQ ID NO: 13302 - protein, 16 aa, Artificial Sequence
  Synthetic
KSYMCGSTLWRRIDQY

SEQ ID NO: 13303 - protein, 15 aa, Artificial Sequence
  Synthetic
RTSPYSGGWFRVSQY

SEQ ID NO: 13304 - protein, 16 aa, Artificial Sequence
  Synthetic
ACATSCVGGYCRGNGY

SEQ ID NO: 13305 - protein, 15 aa, Artificial Sequence
  Synthetic
VLRGIGYPNLRSDAY

SEQ ID NO: 13306 - protein, 14 aa, Artificial Sequence
  Synthetic
DFVDGTWCAIKFGR

SEQ ID NO: 13307 - protein, 15 aa, Artificial Sequence
  Synthetic
DFQASTVGRCDGYGY

SEQ ID NO: 13308 - protein, 16 aa, Artificial Sequence
  Synthetic
YVGGSYSCGTLENDGY

SEQ ID NO: 13309 - protein, 13 aa, Artificial Sequence
  Synthetic
GSVRGIWSGTSQY

SEQ ID NO: 13310 - protein, 16 aa, Artificial Sequence
  Synthetic
RDAWRRIGSWRDVAIY

SEQ ID NO: 13311 - protein, 13 aa, Artificial Sequence
  Synthetic
GKPYGDMLDARGY

SEQ ID NO: 13312 - protein, 10 aa, Artificial Sequence
  Synthetic
VVLCGHSDYE

SEQ ID NO: 13313 - protein, 10 aa, Artificial Sequence
  Synthetic
ILLCGDSDYA

SEQ ID NO: 13314 - protein, 12 aa, Artificial Sequence
  Synthetic
DPGPFSDSRCAY

SEQ ID NO: 13315 - protein, 17 aa, Artificial Sequence
  Synthetic
DTVPFFLMGPYGGSCHG

SEQ ID NO: 13316 - protein, 5 aa, Artificial Sequence
  Synthetic
GQLLG

SEQ ID NO: 13317 - protein, 19 aa, Artificial Sequence
  Synthetic
RNDLVSSNTPPSNCHPYGY

SEQ ID NO: 13318 - protein, 15 aa, Artificial Sequence
  Synthetic
TEQVFFCSWLRGVDF

SEQ ID NO: 13319 - protein, 10 aa, Artificial Sequence
  Synthetic
GVRGGYCPID

SEQ ID NO: 13320 - protein, 13 aa, Artificial Sequence
  Synthetic
KFKPPLFSCKLGY

SEQ ID NO: 13321 - protein, 20 aa, Artificial Sequence
  Synthetic
EWYGGSWYPISQIPYGDCDF

SEQ ID NO: 13322 - protein, 10 aa, Artificial Sequence
  Synthetic
EIMCGDSDYA

SEQ ID NO: 13323 - protein, 12 aa, Artificial Sequence
  Synthetic
DGVYCSGGYRWS

SEQ ID NO: 13324 - protein, 15 aa, Artificial Sequence
  Synthetic
AVGWLSGAWTWGSKY

SEQ ID NO: 13325 - protein, 7 aa, Artificial Sequence
  Synthetic
GRYWYSM

SEQ ID NO: 13326 - protein, 15 aa, Artificial Sequence
  Synthetic
GFRGLLSRVLSPSNY

SEQ ID NO: 13327 - protein, 10 aa, Artificial Sequence
  Synthetic
ILLCGDSDYE

SEQ ID NO: 13328 - protein, 10 aa, Artificial Sequence
  Synthetic
VVLCGDSDYE

SEQ ID NO: 13329 - protein, 12 aa, Artificial Sequence
  Synthetic
ADQFDCSWVGGY

SEQ ID NO: 13330 - protein, 17 aa, Artificial Sequence
  Synthetic
EGTQLFNRAKCGTWSAY

SEQ ID NO: 13331 - protein, 18 aa, Artificial Sequence
  Synthetic
VSDYDTGPPLLPLETYGY

SEQ ID NO: 13332 - protein, 6 aa, Artificial Sequence
  Synthetic
DLSLRC

SEQ ID NO: 13333 - protein, 17 aa, Artificial Sequence
  Synthetic
TPTAYGGSFCLMLSGGY

SEQ ID NO: 13334 - protein, 16 aa, Artificial Sequence
  Synthetic
ARPHAYCNGVTAPLNF

SEQ ID NO: 13335 - protein, 14 aa, Artificial Sequence
  Synthetic
QDCSGAYCYTMDPN

SEQ ID NO: 13336 - protein, 19 aa, Artificial Sequence
  Synthetic
VRWRYGSTCRSALFASGVN

SEQ ID NO: 13337 - protein, 16 aa, Artificial Sequence
  Synthetic
PSCGEVADGVLGWGDF

SEQ ID NO: 13338 - protein, 11 aa, Artificial Sequence
  Synthetic
EKSRGPRCYGY

SEQ ID NO: 13339 - protein, 11 aa, Artificial Sequence
  Synthetic
MFFFGPDRKAK

SEQ ID NO: 13340 - protein, 16 aa, Artificial Sequence
  Synthetic
DLSRLCQYRMTAPRDF

SEQ ID NO: 13341 - protein, 16 aa, Artificial Sequence
  Synthetic
STRWLLPHEQSNSLQY

SEQ ID NO: 13342 - protein, 13 aa, Artificial Sequence
  Synthetic
PSLAGGSWEGYDC

SEQ ID NO: 13343 - protein, 14 aa, Artificial Sequence
  Synthetic
ERPSSYRLGCIHSY

SEQ ID NO: 13344 - protein, 19 aa, Artificial Sequence
  Synthetic
AKGFLFTGSCYSGSWSDSL

SEQ ID NO: 13345 - protein, 17 aa, Artificial Sequence
  Synthetic
GNCYAGSWCCVAPRRRF

SEQ ID NO: 13346 - protein, 16 aa, Artificial Sequence
  Synthetic
ETGGRPLRVGYCIDGT

SEQ ID NO: 13347 - protein, 16 aa, Artificial Sequence
  Synthetic
IACPAGVSCTRCYSEP

SEQ ID NO: 13348 - protein, 14 aa, Artificial Sequence
  Synthetic
TTSGLWARRRRSDW

SEQ ID NO: 13349 - protein, 13 aa, Artificial Sequence
  Synthetic
KPRRGCVFYRSAY

SEQ ID NO: 13350 - protein, 17 aa, Artificial Sequence
  Synthetic
DNRVLYCGEGMLGPTEY

SEQ ID NO: 13351 - protein, 12 aa, Artificial Sequence
  Synthetic
KRTGVCGLGGNF

SEQ ID NO: 13352 - protein, 14 aa, Artificial Sequence
  Synthetic
SAGRLDEPLGARNY

SEQ ID NO: 13353 - protein, 16 aa, Artificial Sequence
  Synthetic
SPSLSASAWSTGISAF

SEQ ID NO: 13354 - protein, 8 aa, Artificial Sequence
  Synthetic
GSTWETCT

SEQ ID NO: 13355 - protein, 18 aa, Artificial Sequence
  Synthetic
TTYALCRTWYTAAAAYGY

SEQ ID NO: 13356 - protein, 13 aa, Artificial Sequence
  Synthetic
GSVVGCLGHTFGF

SEQ ID NO: 13357 - protein, 19 aa, Artificial Sequence
  Synthetic
ASDPVYYSATSDRLIDYAY

SEQ ID NO: 13358 - protein, 19 aa, Artificial Sequence
  Synthetic
GVVSGTVVLDTCPPRSHES

SEQ ID NO: 13359 - protein, 17 aa, Artificial Sequence
  Synthetic
CGPRSSFDNCARGESGY

SEQ ID NO: 13360 - protein, 19 aa, Artificial Sequence
  Synthetic
ILNTIATMFDDAPVQPCAF

SEQ ID NO: 13361 - protein, 13 aa, Artificial Sequence
  Synthetic
DSMIAGALNDRGY

SEQ ID NO: 13362 - protein, 11 aa, Artificial Sequence
  Synthetic
NPPSGSRACPY

SEQ ID NO: 13363 - protein, 14 aa, Artificial Sequence
  Synthetic
PGKLYYGCDFWSGY

SEQ ID NO: 13364 - protein, 15 aa, Artificial Sequence
  Synthetic
AFLVWGLGDCPDDRA

SEQ ID NO: 13365 - protein, 12 aa, Artificial Sequence
  Synthetic
CSVCSGLSCGRP

SEQ ID NO: 13366 - protein, 20 aa, Artificial Sequence
  Synthetic
HGVTWSASRGGRWQDCQSGL

SEQ ID NO: 13367 - protein, 18 aa, Artificial Sequence
  Synthetic
GTCHDEDGTMKLNVKGHD

SEQ ID NO: 13368 - protein, 14 aa, Artificial Sequence
  Synthetic
RLRVSVFGCPMGGN

SEQ ID NO: 13369 - protein, 18 aa, Artificial Sequence
  Synthetic
EAGVYPYCSGAWDRRSAY

SEQ ID NO: 13370 - protein, 18 aa, Artificial Sequence
  Synthetic
PLTLSRYDCYSSSRSNPL

SEQ ID NO: 13371 - protein, 16 aa, Artificial Sequence
  Synthetic
TTAHCSGGECCGSFQM

SEQ ID NO: 13372 - protein, 13 aa, Artificial Sequence
  Synthetic
RGGGCWYPWWDAY

SEQ ID NO: 13373 - protein, 13 aa, Artificial Sequence
  Synthetic
VPTSQWAACPPEY

SEQ ID NO: 13374 - protein, 11 aa, Artificial Sequence
  Synthetic
QLSPEFGKQCA

SEQ ID NO: 13375 - protein, 16 aa, Artificial Sequence
  Synthetic
SYYRDDHSADLDAAEF

SEQ ID NO: 13376 - protein, 19 aa, Artificial Sequence
  Synthetic
DIAPCSGGYCVCSTRQKKY

SEQ ID NO: 13377 - protein, 19 aa, Artificial Sequence
  Synthetic
DMGGLWSEWGVPSSHCIDF

SEQ ID NO: 13378 - protein, 16 aa, Artificial Sequence
  Synthetic
RRYDCFATSWAYEPAY

SEQ ID NO: 13379 - protein, 14 aa, Artificial Sequence
  Synthetic
KSRFVKPCAPASDF

SEQ ID NO: 13380 - protein, 17 aa, Artificial Sequence
  Synthetic
LYLIPHLGAPVQCRRAF

SEQ ID NO: 13381 - protein, 12 aa, Artificial Sequence
  Synthetic
ANRCTLGSWEGF

SEQ ID NO: 13382 - protein, 9 aa, Artificial Sequence
  Synthetic
GFSPYCTDG

SEQ ID NO: 13383 - protein, 14 aa, Artificial Sequence
  Synthetic
DSGSYRTFWCRDDN

SEQ ID NO: 13384 - protein, 14 aa, Artificial Sequence
  Synthetic
RSGFCRREFEHDAY

SEQ ID NO: 13385 - protein, 16 aa, Artificial Sequence
  Synthetic
GYRSYYRDYALLSDGY

SEQ ID NO: 13386 - protein, 15 aa, Artificial Sequence
  Synthetic
KPSYQSGHWSVGNLY

SEQ ID NO: 13387 - protein, 14 aa, Artificial Sequence
  Synthetic
GRGRFRTGLDAVEF

SEQ ID NO: 13388 - protein, 15 aa, Artificial Sequence
  Synthetic
REEYTPGHWAQTSTY

SEQ ID NO: 13389 - protein, 14 aa, Artificial Sequence
  Synthetic
GPLYSGLWYRPSSY

SEQ ID NO: 13390 - protein, 15 aa, Artificial Sequence
  Synthetic
REYYSPGHWAVESTY

SEQ ID NO: 13391 - protein, 15 aa, Artificial Sequence
  Synthetic
KPVYKSGHWTDDRGY

SEQ ID NO: 13392 - protein, 14 aa, Artificial Sequence
  Synthetic
GRGRFKTGLNAAEY

SEQ ID NO: 13393 - protein, 10 aa, Artificial Sequence
  Synthetic
EGATLICRDY

SEQ ID NO: 13394 - protein, 15 aa, Artificial Sequence
  Synthetic
KPTYQGGPWWKPDGY

SEQ ID NO: 13395 - protein, 15 aa, Artificial Sequence
  Synthetic
REEYAPGHWAQTSTY

SEQ ID NO: 13396 - protein, 15 aa, Artificial Sequence
  Synthetic
KPVYQGGPWYDEAGY

SEQ ID NO: 13397 - protein, 19 aa, Artificial Sequence
  Synthetic
ARLPEEGTCSNLRFSSDDF

SEQ ID NO: 13398 - protein, 15 aa, Artificial Sequence
  Synthetic
RIVYNPGHWAQVSTY

SEQ ID NO: 13399 - protein, 15 aa, Artificial Sequence
  Synthetic
KKSYGSGHWSMTSWY

SEQ ID NO: 13400 - protein, 14 aa, Artificial Sequence
  Synthetic
YCTSGGTCGPPNFN

SEQ ID NO: 13401 - protein, 18 aa, Artificial Sequence
  Synthetic
REEYGQCATSNRPNPDGF

SEQ ID NO: 13402 - protein, 13 aa, Artificial Sequence
  Synthetic
AATNYGCDRLQYW

SEQ ID NO: 13403 - protein, 16 aa, Artificial Sequence
  Synthetic
RLQYGLGLHWSDTAAY

SEQ ID NO: 13404 - protein, 15 aa, Artificial Sequence
  Synthetic
RMAYSPDHWQSSSAY

SEQ ID NO: 13405 - protein, 16 aa, Artificial Sequence
  Synthetic
RLQYGKGLHWTNSDAY

SEQ ID NO: 13406 - protein, 17 aa, Artificial Sequence
  Synthetic
DLSGRMRVSRVLVATSY

SEQ ID NO: 13407 - protein, 16 aa, Artificial Sequence
  Synthetic
TRPYWSRSDYLDPRDY

SEQ ID NO: 13408 - protein, 16 aa, Artificial Sequence
  Synthetic
KDRRELIFRPSEAGTY

SEQ ID NO: 13409 - protein, 17 aa, Artificial Sequence
  Synthetic
KRPWYGGTSEFFKEKNY

SEQ ID NO: 13410 - protein, 9 aa, Artificial Sequence
  Synthetic
DPHDGFWFF

SEQ ID NO: 13411 - protein, 7 aa, Artificial Sequence
  Synthetic
WVLDYAM

SEQ ID NO: 13412 - protein, 8 aa, Artificial Sequence
  Synthetic
AGGAFLPT

SEQ ID NO: 13413 - protein, 10 aa, Artificial Sequence
  Synthetic
TASTTMYVPS

SEQ ID NO: 13414 - protein, 10 aa, Artificial Sequence
  Synthetic
LRGQYRRSEY

SEQ ID NO: 13415 - protein, 9 aa, Artificial Sequence
  Synthetic
VHTRVIIQQ

SEQ ID NO: 13416 - protein, 13 aa, Artificial Sequence
  Synthetic
RAIGNYGSRDEDF

SEQ ID NO: 13417 - protein, 10 aa, Artificial Sequence
  Synthetic
DIRDTLWDSR

SEQ ID NO: 13418 - protein, 8 aa, Artificial Sequence
  Synthetic
RSRYSSDF

SEQ ID NO: 13419 - protein, 18 aa, Artificial Sequence
  Synthetic
RRSVSWGAPSNWYLTREY

SEQ ID NO: 13420 - protein, 6 aa, Artificial Sequence
  Synthetic
KDVRGY

SEQ ID NO: 13421 - protein, 13 aa, Artificial Sequence
  Synthetic
RNAYTFSALEHQY

SEQ ID NO: 13422 - protein, 10 aa, Artificial Sequence
  Synthetic
KSRDSAGLSW

SEQ ID NO: 13423 - protein, 7 aa, Artificial Sequence
  Synthetic
GTVPGRW

SEQ ID NO: 13424 - protein, 13 aa, Artificial Sequence
  Synthetic
DPGVSEYALGLEY

SEQ ID NO: 13425 - protein, 4 aa, Artificial Sequence
  Synthetic
GSPL

SEQ ID NO: 13426 - protein, 12 aa, Artificial Sequence
  Synthetic
VGPPLRGWNLAY

SEQ ID NO: 13427 - protein, 10 aa, Artificial Sequence
  Synthetic
MHLTAVYVRQ

SEQ ID NO: 13428 - protein, 11 aa, Artificial Sequence
  Synthetic
GAFIRLSRKTY

SEQ ID NO: 13429 - protein, 11 aa, Artificial Sequence
  Synthetic
EVRTTAVGSAF

SEQ ID NO: 13430 - protein, 7 aa, Artificial Sequence
  Synthetic
PIATQNP

SEQ ID NO: 13431 - protein, 7 aa, Artificial Sequence
  Synthetic
ELQRLNP

SEQ ID NO: 13432 - protein, 13 aa, Artificial Sequence
  Synthetic
DADAQPMGIIENY

SEQ ID NO: 13433 - protein, 6 aa, Artificial Sequence
  Synthetic
RTRNWG

SEQ ID NO: 13434 - protein, 11 aa, Artificial Sequence
  Synthetic
NPWPVAAPRSG

SEQ ID NO: 13435 - protein, 10 aa, Artificial Sequence
  Synthetic
QTDLRDWTVR

SEQ ID NO: 13436 - protein, 10 aa, Artificial Sequence
  Synthetic
RTDYRDWTVR

SEQ ID NO: 13437 - protein, 8 aa, Artificial Sequence
  Synthetic
YYAMIGHA

SEQ ID NO: 13438 - protein, 8 aa, Artificial Sequence
  Synthetic
FVSFVGIA

SEQ ID NO: 13439 - protein, 8 aa, Artificial Sequence
  Synthetic
YVAIVGHA

SEQ ID NO: 13440 - protein, 8 aa, Artificial Sequence
  Synthetic
YVAFVGRA

SEQ ID NO: 13441 - protein, 7 aa, Artificial Sequence
  Synthetic
PFPTPSH

SEQ ID NO: 13442 - protein, 14 aa, Artificial Sequence
  Synthetic
NSAGTYVSPRSREY

SEQ ID NO: 13443 - protein, 12 aa, Artificial Sequence
  Synthetic
NSAGTYVSPRSR

SEQ ID NO: 13444 - protein, 12 aa, Artificial Sequence
  Synthetic
DTVFRSFVVGNV

SEQ ID NO: 13445 - protein, 6 aa, Artificial Sequence
  Synthetic
RFQSLY

SEQ ID NO: 13446 - protein, 6 aa, Artificial Sequence
  Synthetic
RFDSLY

SEQ ID NO: 13447 - protein, 6 aa, Artificial Sequence
  Synthetic
EKGGSP

SEQ ID NO: 13448 - protein, 12 aa, Artificial Sequence
  Synthetic
TRTWLVTGQSDY

SEQ ID NO: 13449 - protein, 9 aa, Artificial Sequence
  Synthetic
KYRDGERPY

SEQ ID NO: 13450 - protein, 11 aa, Artificial Sequence
  Synthetic
DRWENIRRGSV

SEQ ID NO: 13451 - protein, 9 aa, Artificial Sequence
  Synthetic
KYRDGERPF

SEQ ID NO: 13452 - protein, 12 aa, Artificial Sequence
  Synthetic
RIQARFLDSSAF

SEQ ID NO: 13453 - protein, 14 aa, Artificial Sequence
  Synthetic
GFHYIAAIRRTTDF

SEQ ID NO: 13454 - protein, 9 aa, Artificial Sequence
  Synthetic
KYGGGERPY

SEQ ID NO: 13455 - protein, 16 aa, Artificial Sequence
  Synthetic
NDNYCSGYGCYDYMGY

SEQ ID NO: 13456 - protein, 13 aa, Artificial Sequence
  Synthetic
ARSGVPSSRPTDY

SEQ ID NO: 13457 - protein, 12 aa, Artificial Sequence
  Synthetic
KLGFAPVEERQY

SEQ ID NO: 13458 - protein, 6 aa, Artificial Sequence
  Synthetic
RIWSGL

SEQ ID NO: 13459 - protein, 9 aa, Artificial Sequence
  Synthetic
DTKTGGGGY

SEQ ID NO: 13460 - protein, 8 aa, Artificial Sequence
  Synthetic
RYYSGGYR

SEQ ID NO: 13461 - protein, 8 aa, Artificial Sequence
  Synthetic
RYYSGTYR

SEQ ID NO: 13462 - protein, 14 aa, Artificial Sequence
  Synthetic
GNLRIAVPPSSVGY

SEQ ID NO: 13463 - protein, 10 aa, Artificial Sequence
  Synthetic
WILSTDHSYK

SEQ ID NO: 13464 - protein, 10 aa, Artificial Sequence
  Synthetic
WILSTDHSYM

SEQ ID NO: 13465 - protein, 14 aa, Artificial Sequence
  Synthetic
KRSSWYRPFGVDEF

SEQ ID NO: 13466 - protein, 14 aa, Artificial Sequence
  Synthetic
GNLRIAVPPTSVGY

SEQ ID NO: 13467 - protein, 15 aa, Artificial Sequence
  Synthetic
TYYNGEYYLLRADRY

SEQ ID NO: 13468 - protein, 11 aa, Artificial Sequence
  Synthetic
SHWGTLLIKGI

SEQ ID NO: 13469 - protein, 11 aa, Artificial Sequence
  Synthetic
TDWGTLLIKGI

SEQ ID NO: 13470 - protein, 10 aa, Artificial Sequence
  Synthetic
QKSLNVPAPW

SEQ ID NO: 13471 - protein, 10 aa, Artificial Sequence
  Synthetic
QRSLNVPAPW

SEQ ID NO: 13472 - protein, 8 aa, Artificial Sequence
  Synthetic
ASLVRGPL

SEQ ID NO: 13473 - protein, 16 aa, Artificial Sequence
  Synthetic
REGDVGLVSYKRSSNY

SEQ ID NO: 13474 - protein, 15 aa, Artificial Sequence
  Synthetic
TYYTGEYYLLQADRY

SEQ ID NO: 13475 - protein, 12 aa, Artificial Sequence
  Synthetic
TYYTGEYYLVQA

SEQ ID NO: 13476 - protein, 15 aa, Artificial Sequence
  Synthetic
TYYTGEYYLVQADRY

SEQ ID NO: 13477 - protein, 14 aa, Artificial Sequence
  Synthetic
RTASASGDWYKGSY

SEQ ID NO: 13478 - protein, 18 aa, Artificial Sequence
  Synthetic
AGKRIGSDGSIWFAVASF

SEQ ID NO: 13479 - protein, 5 aa, Artificial Sequence
  Synthetic
RRLGV

SEQ ID NO: 13480 - protein, 8 aa, Artificial Sequence
  Synthetic
VGPLGSTP

SEQ ID NO: 13481 - protein, 5 aa, Artificial Sequence
  Synthetic
RRIGR

SEQ ID NO: 13482 - protein, 16 aa, Artificial Sequence
  Synthetic
GQEGFYTLVPRNSRNW

SEQ ID NO: 13483 - protein, 13 aa, Artificial Sequence
  Synthetic
DLTNHCGNYDKGF

SEQ ID NO: 13484 - protein, 12 aa, Artificial Sequence
  Synthetic
RSYYSASGAMYT

SEQ ID NO: 13485 - protein, 16 aa, Artificial Sequence
  Synthetic
YKASATAYTRGRPDEI

SEQ ID NO: 13486 - protein, 14 aa, Artificial Sequence
  Synthetic
RSGLWMATSTQGHY

SEQ ID NO: 13487 - protein, 14 aa, Artificial Sequence
  Synthetic
TDRWPGIEWYRGEY

SEQ ID NO: 13488 - skipped

SEQ ID NO: 13489 - protein, 12 aa, Artificial Sequence
  Synthetic
RWGTITTVSHQY

SEQ ID NO: 13490 - protein, 20 aa, Artificial Sequence
  Synthetic
ARLGTYYGSYIRAYFNRGRY

SEQ ID NO: 13491 - protein, 8 aa, Artificial Sequence
  Synthetic
RDQGTTEY

SEQ ID NO: 13492 - protein, 14 aa, Artificial Sequence
  Synthetic
KENYYGDYGLAQNY

SEQ ID NO: 13493 - protein, 15 aa, Artificial Sequence
  Synthetic
AYGLRDAFRMYRSEY

SEQ ID NO: 13494 - protein, 20 aa, Artificial Sequence
  Synthetic
GHLTSTGVLHPADYYNWDEY

SEQ ID NO: 13495 - protein, 14 aa, Artificial Sequence
  Synthetic
WSYYGVAYTSTTSP

SEQ ID NO: 13496 - protein, 16 aa, Artificial Sequence
  Synthetic
DLKRRCRDYARPQRGN

SEQ ID NO: 13497 - protein, 11 aa, Artificial Sequence
  Synthetic
GPNFSTLARRY

SEQ ID NO: 13498 - protein, 14 aa, Artificial Sequence
  Synthetic
RLRWDSDYTSGGRY

SEQ ID NO: 13499 - protein, 20 aa, Artificial Sequence
  Synthetic
DGSYGTILATIAENSRISLL

SEQ ID NO: 13500 - protein, 8 aa, Artificial Sequence
  Synthetic
RLWNQREY

SEQ ID NO: 13501 - protein, 8 aa, Artificial Sequence
  Synthetic
RNYGTTEY

SEQ ID NO: 13502 - protein, 15 aa, Artificial Sequence
  Synthetic
KRGMADIAYTHATSY

SEQ ID NO: 13503 - protein, 14 aa, Artificial Sequence
  Synthetic
NGFLGTSGRRVDQY

SEQ ID NO: 13504 - protein, 16 aa, Artificial Sequence
  Synthetic
RFQGGFLGCTFAPQTF

SEQ ID NO: 13505 - protein, 15 aa, Artificial Sequence
  Synthetic
SNRYGTNVLVTTALY

SEQ ID NO: 13506 - protein, 16 aa, Artificial Sequence
  Synthetic
YKASSSSYTRGRPDEI

SEQ ID NO: 13507 - protein, 16 aa, Artificial Sequence
  Synthetic
WFWISSTWSYFSENEP

SEQ ID NO: 13508 - protein, 14 aa, Artificial Sequence
  Synthetic
KVNYYGDYDLAQNY

SEQ ID NO: 13509 - protein, 10 aa, Artificial Sequence
  Synthetic
KGEYYSRSQY

SEQ ID NO: 13510 - protein, 14 aa, Artificial Sequence
  Synthetic
GPPSPYIYSRPDLY

SEQ ID NO: 13511 - protein, 15 aa, Artificial Sequence
  Synthetic
RARTLGWVSADVSAY

SEQ ID NO: 13512 - protein, 11 aa, Artificial Sequence
  Synthetic
TGHRSVTGGIY

SEQ ID NO: 13513 - protein, 14 aa, Artificial Sequence
  Synthetic
GPNIGVLTDPAYSG

SEQ ID NO: 13514 - protein, 13 aa, Artificial Sequence
  Synthetic
TARVWGSWFTSDY

SEQ ID NO: 13515 - protein, 11 aa, Artificial Sequence
  Synthetic
GTTPSMLARKY

SEQ ID NO: 13516 - protein, 12 aa, Artificial Sequence
  Synthetic
GSDFGAVVDNRP

SEQ ID NO: 13517 - protein, 13 aa, Artificial Sequence
  Synthetic
GSRYYTDIIPNYY

SEQ ID NO: 13518 - protein, 14 aa, Artificial Sequence
  Synthetic
VRGDNLFHTRPRDY

SEQ ID NO: 13519 - protein, 16 aa, Artificial Sequence
  Synthetic
TSGGIFRGLYYDTRNY

SEQ ID NO: 13520 - protein, 13 aa, Artificial Sequence
  Synthetic
GGSRGYVAAPDRW

SEQ ID NO: 13521 - protein, 5 aa, Artificial Sequence
  Synthetic
HNGQG

SEQ ID NO: 13522 - protein, 17 aa, Artificial Sequence
  Synthetic
DGGGYSAYYYYTHQTEY

SEQ ID NO: 13523 - protein, 14 aa, Artificial Sequence
  Synthetic
SGRYYTAAVEGANY

SEQ ID NO: 13524 - protein, 8 aa, Artificial Sequence
  Synthetic
DRGRTTAW

SEQ ID NO: 13525 - protein, 14 aa, Artificial Sequence
  Synthetic
RRGGGNYYTRAVDF

SEQ ID NO: 13526 - protein, 13 aa, Artificial Sequence
  Synthetic
GRDARILRNARDY

SEQ ID NO: 13527 - protein, 13 aa, Artificial Sequence
  Synthetic
ERTLGWGVNPEAY

SEQ ID NO: 13528 - protein, 10 aa, Artificial Sequence
  Synthetic
NVRTAVAGRN

SEQ ID NO: 13529 - protein, 8 aa, Artificial Sequence
  Synthetic
GKSAYGGY

SEQ ID NO: 13530 - protein, 5 aa, Artificial Sequence
  Synthetic
LLGNI

SEQ ID NO: 13531 - protein, 11 aa, Artificial Sequence
  Synthetic
RGFPVVQGALS

SEQ ID NO: 13532 - protein, 8 aa, Artificial Sequence
  Synthetic
VSPRYPYT

SEQ ID NO: 13533 - protein, 4 aa, Artificial Sequence
  Synthetic
YAEA

SEQ ID NO: 13534 - protein, 5 aa, Artificial Sequence
  Synthetic
YDDGT

SEQ ID NO: 13535 - protein, 8 aa, Artificial Sequence
  Synthetic
RNWGGGLD

SEQ ID NO: 13536 - protein, 8 aa, Artificial Sequence
  Synthetic
DPYGMESL

SEQ ID NO: 13537 - protein, 7 aa, Artificial Sequence
  Synthetic
YSSAYDR

SEQ ID NO: 13538 - protein, 14 aa, Artificial Sequence
  Synthetic
GRGAPSDTGRPDEY

SEQ ID NO: 13539 - protein, 14 aa, Artificial Sequence
  Synthetic
GRGSPSDTGRPDDY

SEQ ID NO: 13540 - protein, 14 aa, Artificial Sequence
  Synthetic
GRGAPSDTGRPDDY

SEQ ID NO: 13541 - protein, 12 aa, Artificial Sequence
  Synthetic
LRASTAGWEPRF

SEQ ID NO: 13542 - protein, 17 aa, Artificial Sequence
  Synthetic
DYGWARPSRHSVRPEMY

SEQ ID NO: 13543 - protein, 16 aa, Artificial Sequence
  Synthetic
TLDWGTIARMSRAGMY

SEQ ID NO: 13544 - protein, 7 aa, Artificial Sequence
  Synthetic
GFALPPS

SEQ ID NO: 13545 - protein, 6 aa, Artificial Sequence
  Synthetic
FSKWSS

SEQ ID NO: 13546 - protein, 14 aa, Artificial Sequence
  Synthetic
DSKYYTVYRSRVTY

SEQ ID NO: 13547 - protein, 17 aa, Artificial Sequence
  Synthetic
DLGWARVRRLITRPEMY

SEQ ID NO: 13548 - protein, 17 aa, Artificial Sequence
  Synthetic
SSWWATAGTGYRAPSWY

SEQ ID NO: 13549 - protein, 17 aa, Artificial Sequence
  Synthetic
DAGWIRSPRHIARPEMY

SEQ ID NO: 13550 - protein, 12 aa, Artificial Sequence
  Synthetic
LRASNAGWEPRF

SEQ ID NO: 13551 - protein, 12 aa, Artificial Sequence
  Synthetic
LRATSAGWELRF

SEQ ID NO: 13552 - protein, 14 aa, Artificial Sequence
  Synthetic
ERGTYFAGRSQDEY

SEQ ID NO: 13553 - protein, 14 aa, Artificial Sequence
  Synthetic
GYRIDTQPMDRDFY

SEQ ID NO: 13554 - protein, 11 aa, Artificial Sequence
  Synthetic
DRSLTVVASSW

SEQ ID NO: 13555 - protein, 13 aa, Artificial Sequence
  Synthetic
RDYRLWSPYQYEY

SEQ ID NO: 13556 - protein, 16 aa, Artificial Sequence
  Synthetic
GFAYRSVTYSTRPSFY

SEQ ID NO: 13557 - protein, 13 aa, Artificial Sequence
  Synthetic
GGGGTYYRRNYKY

SEQ ID NO: 13558 - protein, 13 aa, Artificial Sequence
  Synthetic
GGGGTYYQQNYKY

SEQ ID NO: 13559 - protein, 14 aa, Artificial Sequence
  Synthetic
DLPPYGSSWYPPRY

SEQ ID NO: 13560 - protein, 13 aa, Artificial Sequence
  Synthetic
RHYRLWSPYQYDY

SEQ ID NO: 13561 - protein, 13 aa, Artificial Sequence
  Synthetic
RDYRLWSPYQYDY

SEQ ID NO: 13562 - protein, 16 aa, Artificial Sequence
  Synthetic
GFAYRSVTYSSRPSFY

SEQ ID NO: 13563 - protein, 9 aa, Artificial Sequence
  Synthetic
VVWVGSESY

SEQ ID NO: 13564 - protein, 13 aa, Artificial Sequence
  Synthetic
DKTTYWNIPRDEY

SEQ ID NO: 13565 - protein, 10 aa, Artificial Sequence
  Synthetic
RTTFLTEGWR

SEQ ID NO: 13566 - protein, 9 aa, Artificial Sequence
  Synthetic
RRPSSSTIL

SEQ ID NO: 13567 - protein, 13 aa, Artificial Sequence
  Synthetic
DKTTFWNIPRDEY

SEQ ID NO: 13568 - protein, 13 aa, Artificial Sequence
  Synthetic
DRTTSWNIPRDEY

SEQ ID NO: 13569 - protein, 8 aa, Artificial Sequence
  Synthetic
NTVANLGR

SEQ ID NO: 13570 - protein, 9 aa, Artificial Sequence
  Synthetic
VVWVGPKSY

SEQ ID NO: 13571 - protein, 8 aa, Artificial Sequence
  Synthetic
RTIVPVPK

SEQ ID NO: 13572 - protein, 13 aa, Artificial Sequence
  Synthetic
TRALAIATTSEKY

SEQ ID NO: 13573 - protein, 9 aa, Artificial Sequence
  Synthetic
VVWVGSKSY

SEQ ID NO: 13574 - protein, 11 aa, Artificial Sequence
  Synthetic
GLNIGTGIIPH

SEQ ID NO: 13575 - protein, 9 aa, Artificial Sequence
  Synthetic
YPGFQLTTP

SEQ ID NO: 13576 - protein, 18 aa, Artificial Sequence
  Synthetic
AAAKTRLPQIVYRTTGDY

SEQ ID NO: 13577 - protein, 18 aa, Artificial Sequence
  Synthetic
AAARTRLPQIVYRTTGDY

SEQ ID NO: 13578 - protein, 11 aa, Artificial Sequence
  Synthetic
DRGLTAVASSW

SEQ ID NO: 13579 - protein, 11 aa, Artificial Sequence
  Synthetic
DRGLTASPSSW

SEQ ID NO: 13580 - protein, 11 aa, Artificial Sequence
  Synthetic
GRSLTVVASSW

SEQ ID NO: 13581 - protein, 11 aa, Artificial Sequence
  Synthetic
DRGLTSVASSW

SEQ ID NO: 13582 - protein, 11 aa, Artificial Sequence
  Synthetic
GRSLTDVPGSW

SEQ ID NO: 13583 - protein, 11 aa, Artificial Sequence
  Synthetic
DRGLTDVPSSW

SEQ ID NO: 13584 - protein, 11 aa, Artificial Sequence
  Synthetic
DRGLTAVDSSW

SEQ ID NO: 13585 - protein, 13 aa, Artificial Sequence
  Synthetic
STGSQATMNLRSY

SEQ ID NO: 13586 - protein, 13 aa, Artificial Sequence
  Synthetic
STGSQATMSFRSY

SEQ ID NO: 13587 - protein, 14 aa, Artificial Sequence
  Synthetic
GRSYEARSFSANDY

SEQ ID NO: 13588 - protein, 15 aa, Artificial Sequence
  Synthetic
AFRLSGSHLFDRLYY

SEQ ID NO: 13589 - protein, 15 aa, Artificial Sequence
  Synthetic
DRSRAEWLVTNEADY

SEQ ID NO: 13590 - protein, 12 aa, Artificial Sequence
  Synthetic
VLSFPSTKERDY

SEQ ID NO: 13591 - protein, 14 aa, Artificial Sequence
  Synthetic
EPGTYFAGRFESEY

SEQ ID NO: 13592 - protein, 12 aa, Artificial Sequence
  Synthetic
QLPTGWVRRRGS

SEQ ID NO: 13593 - protein, 12 aa, Artificial Sequence
  Synthetic
GDSTHHIRALSP

SEQ ID NO: 13594 - protein, 12 aa, Artificial Sequence
  Synthetic
SSLYLALQRAEY

SEQ ID NO: 13595 - protein, 6 aa, Artificial Sequence
  Synthetic
RRHGEY

SEQ ID NO: 13596 - protein, 8 aa, Artificial Sequence
  Synthetic
QRRGIPRY

SEQ ID NO: 13597 - protein, 14 aa, Artificial Sequence
  Synthetic
DRDTLRISGAGGAM

SEQ ID NO: 13598 - protein, 10 aa, Artificial Sequence
  Synthetic
DETSGWASLR

SEQ ID NO: 13599 - protein, 11 aa, Artificial Sequence
  Synthetic
RAGWDLNRFDY

SEQ ID NO: 13600 - protein, 12 aa, Artificial Sequence
  Synthetic
DYSGLTTRWGAY

SEQ ID NO: 13601 - protein, 10 aa, Artificial Sequence
  Synthetic
RESAGWSSYR

SEQ ID NO: 13602 - protein, 9 aa, Artificial Sequence
  Synthetic
DWTTGWRTE

SEQ ID NO: 13603 - protein, 11 aa, Artificial Sequence
  Synthetic
DRSLTRSASSY

SEQ ID NO: 13604 - protein, 11 aa, Artificial Sequence
  Synthetic
GRSYSSNPAAY

SEQ ID NO: 13605 - protein, 11 aa, Artificial Sequence
  Synthetic
DVQGGGWGSIQ

SEQ ID NO: 13606 - protein, 15 aa, Artificial Sequence
  Synthetic
QSPGMSGTYSRSDVY

SEQ ID NO: 13607 - protein, 13 aa, Artificial Sequence
  Synthetic
AALEYCTGTGCRY

SEQ ID NO: 13608 - protein, 15 aa, Artificial Sequence
  Synthetic
TSVRGLVASVRRYEY

SEQ ID NO: 13609 - protein, 13 aa, Artificial Sequence
  Synthetic
DDNYVTASWRSGP

SEQ ID NO: 13610 - protein, 16 aa, Artificial Sequence
  Synthetic
DRSSLQLYASRVGDEY

SEQ ID NO: 13611 - protein, 13 aa, Artificial Sequence
  Synthetic
SYFWSDTPFALNY

SEQ ID NO: 13612 - protein, 7 aa, Artificial Sequence
  Synthetic
DPNGRGY

SEQ ID NO: 13613 - protein, 7 aa, Artificial Sequence
  Synthetic
DRDGRGY

SEQ ID NO: 13614 - protein, 18 aa, Artificial Sequence
  Synthetic
DRSSPSLRLVASRVGDEY

SEQ ID NO: 13615 - protein, 14 aa, Artificial Sequence
  Synthetic
HYGSRWKSVSVENY

SEQ ID NO: 13616 - protein, 18 aa, Artificial Sequence
  Synthetic
DRSSPSLRLVASRVADEY

SEQ ID NO: 13617 - protein, 18 aa, Artificial Sequence
  Synthetic
DRSNPSLRLVASRVGDEY

SEQ ID NO: 13618 - protein, 7 aa, Artificial Sequence
  Synthetic
AVGSRWY

SEQ ID NO: 13619 - protein, 13 aa, Artificial Sequence
  Synthetic
SYFWSNTPFALNY

SEQ ID NO: 13620 - protein, 14 aa, Artificial Sequence
  Synthetic
SQWDGRTWTRPHAY

SEQ ID NO: 13621 - protein, 12 aa, Artificial Sequence
  Synthetic
DLGAYGGLGLSY

SEQ ID NO: 13622 - protein, 16 aa, Artificial Sequence
  Synthetic
EILYCSGYGCRDPRLY

SEQ ID NO: 13623 - protein, 7 aa, Artificial Sequence
  Synthetic
STLLPTN

SEQ ID NO: 13624 - protein, 11 aa, Artificial Sequence
  Synthetic
GFITGIHPYEY

SEQ ID NO: 13625 - protein, 5 aa, Artificial Sequence
  Synthetic
TINGR

SEQ ID NO: 13626 - protein, 13 aa, Artificial Sequence
  Synthetic
GWTWDDCLHQETY

SEQ ID NO: 13627 - protein, 10 aa, Artificial Sequence
  Synthetic
VIVSVIRQWP

SEQ ID NO: 13628 - protein, 5 aa, Artificial Sequence
  Synthetic
PYIGR

SEQ ID NO: 13629 - protein, 9 aa, Artificial Sequence
  Synthetic
RIDWTPHEY

SEQ ID NO: 13630 - protein, 12 aa, Artificial Sequence
  Synthetic
VQRGRYGYEGDR

SEQ ID NO: 13631 - protein, 15 aa, Artificial Sequence
  Synthetic
DSESYGCGYSIVPGF

SEQ ID NO: 13632 - protein, 16 aa, Artificial Sequence
  Synthetic
VYGYYNKPCARASSEY

SEQ ID NO: 13633 - protein, 18 aa, Artificial Sequence
  Synthetic
TRGTDPDCSKRLSAPRFF

SEQ ID NO: 13634 - protein, 12 aa, Artificial Sequence
  Synthetic
EGPQLLSSRLCL

SEQ ID NO: 13635 - protein, 12 aa, Artificial Sequence
  Synthetic
GSGDCEMIETAL

SEQ ID NO: 13636 - protein, 17 aa, Artificial Sequence
  Synthetic
ASLDVTASLYYMNPAWW

SEQ ID NO: 13637 - protein, 14 aa, Artificial Sequence
  Synthetic
ECRVQVGYGPIQDY

SEQ ID NO: 13638 - protein, 15 aa, Artificial Sequence
  Synthetic
DLDDCNEGGYIVTMS

SEQ ID NO: 13639 - protein, 12 aa, Artificial Sequence
  Synthetic
VVKWCPRRLTGL

SEQ ID NO: 13640 - protein, 13 aa, Artificial Sequence
  Synthetic
DFQGGHLLDARVY

SEQ ID NO: 13641 - protein, 11 aa, Artificial Sequence
  Synthetic
TPSYSRNWRNY

SEQ ID NO: 13642 - protein, 15 aa, Artificial Sequence
  Synthetic
VYNQLWLVQLRATEY

SEQ ID NO: 13643 - protein, 16 aa, Artificial Sequence
  Synthetic
AHRIFGGCLVIHSSGY

SEQ ID NO: 13644 - protein, 15 aa, Artificial Sequence
  Synthetic
IANPVYATSRNSDDY

SEQ ID NO: 13645 - protein, 13 aa, Artificial Sequence
  Synthetic
RRINEVLTTAPDY

SEQ ID NO: 13646 - protein, 13 aa, Artificial Sequence
  Synthetic
RASMAVSTSPRVY

SEQ ID NO: 13647 - protein, 13 aa, Artificial Sequence
  Synthetic
RASMQVLTSPRVY

SEQ ID NO: 13648 - protein, 18 aa, Artificial Sequence
  Synthetic
ALRRPGSDASDYTRIPDY

SEQ ID NO: 13649 - protein, 4 aa, Artificial Sequence
  Synthetic
GRSR

SEQ ID NO: 13650 - protein, 13 aa, Artificial Sequence
  Synthetic
RAPVGQSSSPYDY

SEQ ID NO: 13651 - protein, 14 aa, Artificial Sequence
  Synthetic
QGTNGGGYSEATSY

SEQ ID NO: 13652 - protein, 14 aa, Artificial Sequence
  Synthetic
SLYRDPLGVAGGMG

SEQ ID NO: 13653 - protein, 12 aa, Artificial Sequence
  Synthetic
GTGWSPQTDNEY

SEQ ID NO: 13654 - protein, 14 aa, Artificial Sequence
  Synthetic
SITGYGLVDSASHY

SEQ ID NO: 13655 - protein, 15 aa, Artificial Sequence
  Synthetic
TPYGSRYYLRELREY

SEQ ID NO: 13656 - protein, 16 aa, Artificial Sequence
  Synthetic
DLQYGSSWPQRSSAEY

SEQ ID NO: 13657 - protein, 13 aa, Artificial Sequence
  Synthetic
KNGGAASNYPNDY

SEQ ID NO: 13658 - protein, 16 aa, Artificial Sequence
  Synthetic
RQYYSGRVYSTFREEY

SEQ ID NO: 13659 - protein, 12 aa, Artificial Sequence
  Synthetic
NVRLREYRTTSY

SEQ ID NO: 13660 - protein, 15 aa, Artificial Sequence
  Synthetic
QGQWRAAPVAVAAEY

SEQ ID NO: 13661 - protein, 13 aa, Artificial Sequence
  Synthetic
RDDGRMYQGFYDF

SEQ ID NO: 13662 - protein, 14 aa, Artificial Sequence
  Synthetic
KQYGSRADYPWDDY

SEQ ID NO: 13663 - protein, 10 aa, Artificial Sequence
  Synthetic
DRFLTRSVKY

SEQ ID NO: 13664 - protein, 14 aa, Artificial Sequence
  Synthetic
RGRRYFDFTYSDVY

SEQ ID NO: 13665 - protein, 8 aa, Artificial Sequence
  Synthetic
ITYTRGIY

SEQ ID NO: 13666 - protein, 16 aa, Artificial Sequence
  Synthetic
DLHRPYGPGSQRTDDY

SEQ ID NO: 13667 - protein, 10 aa, Artificial Sequence
  Synthetic
KDYGAVLYEY

SEQ ID NO: 13668 - protein, 10 aa, Artificial Sequence
  Synthetic
KDFGAIIYDY

SEQ ID NO: 13669 - protein, 12 aa, Artificial Sequence
  Synthetic
AMYGSRWPDWEY

SEQ ID NO: 13670 - protein, 13 aa, Artificial Sequence
  Synthetic
GVGASVSVSESWY

SEQ ID NO: 13671 - protein, 8 aa, Artificial Sequence
  Synthetic
AAWRVGTY

SEQ ID NO: 13672 - skipped

SEQ ID NO: 13673 - protein, 10 aa, Artificial Sequence
  Synthetic
ARWDLGPAPF

SEQ ID NO: 13674 - protein, 13 aa, Artificial Sequence
  Synthetic
GLATWLATQTDNY

SEQ ID NO: 13675 - protein, 12 aa, Artificial Sequence
  Synthetic
RSGGFSSNRELY

SEQ ID NO: 13676 - protein, 12 aa, Artificial Sequence
  Synthetic
RSGGFSSNRTYY

SEQ ID NO: 13677 - protein, 15 aa, Artificial Sequence
  Synthetic
GSKYGGSWSRSQDAY

SEQ ID NO: 13678 - protein, 15 aa, Artificial Sequence
  Synthetic
GIGTFGSSWTRADRY

SEQ ID NO: 13679 - protein, 4 aa, Artificial Sequence
  Synthetic
RVPL

SEQ ID NO: 13680 - protein, 14 aa, Artificial Sequence
  Synthetic
DQRFDGDDWSPSAF

SEQ ID NO: 13681 - protein, 16 aa, Artificial Sequence
  Synthetic
AVFVRTAGVPTLPGEY

SEQ ID NO: 13682 - protein, 14 aa, Artificial Sequence
  Synthetic
TKQFFPLSNESVWY

SEQ ID NO: 13683 - protein, 17 aa, Artificial Sequence
  Synthetic
SERDFYTRNYYFTESLY

SEQ ID NO: 13684 - protein, 15 aa, Artificial Sequence
  Synthetic
DYNLGTFVTRKDSMY

SEQ ID NO: 13685 - protein, 13 aa, Artificial Sequence
  Synthetic
RRNFFGNNSAGQY

SEQ ID NO: 13686 - protein, 15 aa, Artificial Sequence
  Synthetic
KASMYGSTLYPPTGY

SEQ ID NO: 13687 - protein, 7 aa, Artificial Sequence
  Synthetic
GRAVSDY

SEQ ID NO: 13688 - protein, 11 aa, Artificial Sequence
  Synthetic
LRSRAVMDTIP

SEQ ID NO: 13689 - protein, 15 aa, Artificial Sequence
  Synthetic
DRRRYYSGSYPPSEY

SEQ ID NO: 13690 - protein, 20 aa, Artificial Sequence
  Synthetic
DRDFTIVAGFIRSQYSPRAV

SEQ ID NO: 13691 - protein, 13 aa, Artificial Sequence
  Synthetic
DPMYGRSVMSTRY

SEQ ID NO: 13692 - protein, 16 aa, Artificial Sequence
  Synthetic
ATKQFSNAYSDYVHDY

SEQ ID NO: 13693 - protein, 10 aa, Artificial Sequence
  Synthetic
DPQLITTPEY

SEQ ID NO: 13694 - protein, 16 aa, Artificial Sequence
  Synthetic
SQDSGFDTPVTESHLY

SEQ ID NO: 13695 - protein, 6 aa, Artificial Sequence
  Synthetic
LSQGAM

SEQ ID NO: 13696 - protein, 8 aa, Artificial Sequence
  Synthetic
AHGGYGAF

SEQ ID NO: 13697 - protein, 7 aa, Artificial Sequence
  Synthetic
LDITTAA

SEQ ID NO: 13698 - protein, 9 aa, Artificial Sequence
  Synthetic
EALPGTYGL

SEQ ID NO: 13699 - protein, 7 aa, Artificial Sequence
  Synthetic
ILAGGLL

SEQ ID NO: 13700 - protein, 5 aa, Artificial Sequence
  Synthetic
GGSSG

SEQ ID NO: 13701 - protein, 7 aa, Artificial Sequence
  Synthetic
GTNWPPK

SEQ ID NO: 13702 - protein, 11 aa, Artificial Sequence
  Synthetic
GTVLSVATGPY

SEQ ID NO: 13703 - protein, 7 aa, Artificial Sequence
  Synthetic
WGAGEDE

SEQ ID NO: 13704 - protein, 7 aa, Artificial Sequence
  Synthetic
DFYGLGF

SEQ ID NO: 13705 - protein, 16 aa, Artificial Sequence
  Synthetic
QTRPRPYGTSRAEGDY

SEQ ID NO: 13706 - protein, 11 aa, Artificial Sequence
  Synthetic
GSTSTATPLRV

SEQ ID NO: 13707 - protein, 14 aa, Artificial Sequence
  Synthetic
TWAYDTVGALTSGY

SEQ ID NO: 13708 - protein, 20 aa, Artificial Sequence
  Synthetic
DDIGGGWMYERSWAQSRRNY

SEQ ID NO: 13709 - protein, 9 aa, Artificial Sequence
  Synthetic
TQSGSFYQV

SEQ ID NO: 13710 - protein, 14 aa, Artificial Sequence
  Synthetic
GLLDVQYVRQAAGY

SEQ ID NO: 13711 - protein, 14 aa, Artificial Sequence
  Synthetic
RTVRVVDISSPVGF

SEQ ID NO: 13712 - protein, 14 aa, Artificial Sequence
  Synthetic
RPVRVDDISLPVGF

SEQ ID NO: 13713 - protein, 5 aa, Artificial Sequence
  Synthetic
AYGNP

SEQ ID NO: 13714 - protein, 14 aa, Artificial Sequence
  Synthetic
RPVRVDDISTPDGF

SEQ ID NO: 13715 - protein, 4 aa, Artificial Sequence
  Synthetic
HYFR

SEQ ID NO: 13716 - protein, 14 aa, Artificial Sequence
  Synthetic
RPVRVDDISSPVGF

SEQ ID NO: 13717 - protein, 8 aa, Artificial Sequence
  Synthetic
EGIPETLG

SEQ ID NO: 13718 - protein, 9 aa, Artificial Sequence
  Synthetic
DVWYGSTWR

SEQ ID NO: 13719 - protein, 8 aa, Artificial Sequence
  Synthetic
KWIGIVQR

SEQ ID NO: 13720 - protein, 5 aa, Artificial Sequence
  Synthetic
INWKS

SEQ ID NO: 13721 - protein, 4 aa, Artificial Sequence
  Synthetic
DPPL

SEQ ID NO: 13722 - protein, 17 aa, Artificial Sequence
  Synthetic
VVYYGDWEGSEPVQHEY

SEQ ID NO: 13723 - protein, 11 aa, Artificial Sequence
  Synthetic
RIRRHESGYAY

SEQ ID NO: 13724 - protein, 9 aa, Artificial Sequence
  Synthetic
CRVGNWRLE

SEQ ID NO: 13725 - protein, 8 aa, Artificial Sequence
  Synthetic
DSWRIGAK

SEQ ID NO: 13726 - protein, 13 aa, Artificial Sequence
  Synthetic
SPRLRVEIKAGGY

SEQ ID NO: 13727 - protein, 5 aa, Artificial Sequence
  Synthetic
DSNGR

SEQ ID NO: 13728 - protein, 9 aa, Artificial Sequence
  Synthetic
DGLYGFTGK

SEQ ID NO: 13729 - protein, 10 aa, Artificial Sequence
  Synthetic
GAYSTRPEAY

SEQ ID NO: 13730 - protein, 5 aa, Artificial Sequence
  Synthetic
DVGPT

SEQ ID NO: 13731 - protein, 5 aa, Artificial Sequence
  Synthetic
DIFFV

SEQ ID NO: 13732 - protein, 12 aa, Artificial Sequence
  Synthetic
AEMYGSLARRDY

SEQ ID NO: 13733 - protein, 11 aa, Artificial Sequence
  Synthetic
CSDYYCSGVGA

SEQ ID NO: 13734 - protein, 11 aa, Artificial Sequence
  Synthetic
DSNYCSGYGPS

SEQ ID NO: 13735 - protein, 13 aa, Artificial Sequence
  Synthetic
PEGYYCPTRPLGL

SEQ ID NO: 13736 - protein, 19 aa, Artificial Sequence
  Synthetic
SMSLRPLDPASYSPDIQPY

SEQ ID NO: 13737 - protein, 12 aa, Artificial Sequence
  Synthetic
KASPAVVTTKQY

SEQ ID NO: 13738 - protein, 16 aa, Artificial Sequence
  Synthetic
GSNAGLLTYSDYDYLY

SEQ ID NO: 13739 - protein, 8 aa, Artificial Sequence
  Synthetic
QPFGASSY

SEQ ID NO: 13740 - protein, 7 aa, Artificial Sequence
  Synthetic
RRRFGGQ

SEQ ID NO: 13741 - protein, 13 aa, Artificial Sequence
  Synthetic
KRGWYFPLDLSEY

SEQ ID NO: 13742 - protein, 10 aa, Artificial Sequence
  Synthetic
LLYYSDYENE

SEQ ID NO: 13743 - protein, 14 aa, Artificial Sequence
  Synthetic
EATRGWGELRGRRH

SEQ ID NO: 13744 - protein, 11 aa, Artificial Sequence
  Synthetic
DSTKGWDLRDH

SEQ ID NO: 13745 - protein, 10 aa, Artificial Sequence
  Synthetic
NVLTRALVSG

SEQ ID NO: 13746 - protein, 17 aa, Artificial Sequence
  Synthetic
DGIHYYSDYDAPPIREY

SEQ ID NO: 13747 - protein, 9 aa, Artificial Sequence
  Synthetic
DAPAGYYPK

SEQ ID NO: 13748 - protein, 11 aa, Artificial Sequence
  Synthetic
GSNIGGSRWRY

SEQ ID NO: 13749 - protein, 9 aa, Artificial Sequence
  Synthetic
DVHDGMQLR

SEQ ID NO: 13750 - protein, 9 aa, Artificial Sequence
  Synthetic
DLDVGFITE

SEQ ID NO: 13751 - protein, 13 aa, Artificial Sequence
  Synthetic
ELHNSDPFNPSEY

SEQ ID NO: 13752 - protein, 11 aa, Artificial Sequence
  Synthetic
SSRHYGANCLY

SEQ ID NO: 13753 - protein, 8 aa, Artificial Sequence
  Synthetic
RAVDELLT

SEQ ID NO: 13754 - protein, 13 aa, Artificial Sequence
  Synthetic
ASRWSWNPTSDDY

SEQ ID NO: 13755 - protein, 8 aa, Artificial Sequence
  Synthetic
FPAIVGPF

SEQ ID NO: 13756 - protein, 11 aa, Artificial Sequence
  Synthetic
VIGGRWPPSEY

SEQ ID NO: 13757 - protein, 8 aa, Artificial Sequence
  Synthetic
RRWIPPGP

SEQ ID NO: 13758 - protein, 12 aa, Artificial Sequence
  Synthetic
QAAGLSRDAHEY

SEQ ID NO: 13759 - protein, 12 aa, Artificial Sequence
  Synthetic
GQSYIRSYYNPG

SEQ ID NO: 13760 - protein, 11 aa, Artificial Sequence
  Synthetic
WISADASMMTT

SEQ ID NO: 13761 - protein, 10 aa, Artificial Sequence
  Synthetic
GLEGLGYRLH

SEQ ID NO: 13762 - protein, 6 aa, Artificial Sequence
  Synthetic
EWAAMK

SEQ ID NO: 13763 - protein, 5 aa, Artificial Sequence
  Synthetic
ELPRD

SEQ ID NO: 13764 - protein, 13 aa, Artificial Sequence
  Synthetic
QGRYYGGTYDPTY

SEQ ID NO: 13765 - protein, 10 aa, Artificial Sequence
  Synthetic
DNNPIVYRPN

SEQ ID NO: 13766 - protein, 10 aa, Artificial Sequence
  Synthetic
AIYTPGRGEF

SEQ ID NO: 13767 - protein, 10 aa, Artificial Sequence
  Synthetic
HGIFGSSWTT

SEQ ID NO: 13768 - protein, 10 aa, Artificial Sequence
  Synthetic
DTGGPYGSRN

SEQ ID NO: 13769 - protein, 11 aa, Artificial Sequence
  Synthetic
NARRLYSGSYL

SEQ ID NO: 13770 - protein, 6 aa, Artificial Sequence
  Synthetic
KLFVGA

SEQ ID NO: 13771 - protein, 7 aa, Artificial Sequence
  Synthetic
RREAPPY

SEQ ID NO: 13772 - protein, 9 aa, Artificial Sequence
  Synthetic
RRPSAWGTD

SEQ ID NO: 13773 - protein, 12 aa, Artificial Sequence
  Synthetic
EGIMMHNFNWYP

SEQ ID NO: 13774 - protein, 16 aa, Artificial Sequence
  Synthetic
RFRLNGYTPSYKEDDY

SEQ ID NO: 13775 - protein, 12 aa, Artificial Sequence
  Synthetic
LISSVSRNGPFY

SEQ ID NO: 13776 - protein, 11 aa, Artificial Sequence
  Synthetic
GDYFRSAAQFY

SEQ ID NO: 13777 - protein, 16 aa, Artificial Sequence
  Synthetic
LRDSYCGATLNYYYGI

SEQ ID NO: 13778 - protein, 4 aa, Artificial Sequence
  Synthetic
YPPL

SEQ ID NO: 13779 - protein, 11 aa, Artificial Sequence
  Synthetic
DAPVDDGGSSR

SEQ ID NO: 13780 - protein, 18 aa, Artificial Sequence
  Synthetic
STLRDYSDNYYFPHDYEY

SEQ ID NO: 13781 - protein, 9 aa, Artificial Sequence
  Synthetic
HRARVTLTS

SEQ ID NO: 13782 - protein, 14 aa, Artificial Sequence
  Synthetic
YVGREFCSRSSVDF

SEQ ID NO: 13783 - protein, 16 aa, Artificial Sequence
  Synthetic
TTTRSYDDTYRNSWVY

SEQ ID NO: 13784 - protein, 12 aa, Artificial Sequence
  Synthetic
SDYRLGCDYVSD

SEQ ID NO: 13785 - protein, 13 aa, Artificial Sequence
  Synthetic
ARTVDPLFRESEY

SEQ ID NO: 13786 - protein, 5 aa, Artificial Sequence
  Synthetic
VSQWR

SEQ ID NO: 13787 - protein, 10 aa, Artificial Sequence
  Synthetic
RRAFRLSSDY

SEQ ID NO: 13788 - protein, 12 aa, Artificial Sequence
  Synthetic
ENYRRWPSTTPE

SEQ ID NO: 13789 - protein, 12 aa, Artificial Sequence
  Synthetic
ERAERVADANFV

SEQ ID NO: 13790 - protein, 9 aa, Artificial Sequence
  Synthetic
VRLGDSTVD

SEQ ID NO: 13791 - protein, 9 aa, Artificial Sequence
  Synthetic
GSSGLKGPY

SEQ ID NO: 13792 - protein, 13 aa, Artificial Sequence
  Synthetic
IQLTEWGLAVPEY

SEQ ID NO: 13793 - protein, 13 aa, Artificial Sequence
  Synthetic
REFESCSEYAGGY

SEQ ID NO: 13794 - protein, 21 aa, Artificial Sequence
  Synthetic
SRGNFGSGWYCGNDPQYYYGM

SEQ ID NO: 13795 - protein, 15 aa, Artificial Sequence
  Synthetic
DFHTRGTLSRDEADY

SEQ ID NO: 13796 - protein, 12 aa, Artificial Sequence
  Synthetic
EGAIHYCSGDFN

SEQ ID NO: 13797 - protein, 11 aa, Artificial Sequence
  Synthetic
TAGSYLAPNSF

SEQ ID NO: 13798 - protein, 20 aa, Artificial Sequence
  Synthetic
DDIGGGWLYERSWALSRRSY

SEQ ID NO: 13799 - protein, 9 aa, Artificial Sequence
  Synthetic
DRDTGIGAY

SEQ ID NO: 13800 - protein, 17 aa, Artificial Sequence
  Synthetic
TARPFLGVPRITRPNEY

SEQ ID NO: 13801 - protein, 10 aa, Artificial Sequence
  Synthetic
EGTWYSGPRG

SEQ ID NO: 13802 - protein, 15 aa, Artificial Sequence
  Synthetic
EDHKSAASVCNSWLN

SEQ ID NO: 13803 - protein, 15 aa, Artificial Sequence
  Synthetic
DLTDIWEGIREYDEY

SEQ ID NO: 13804 - protein, 12 aa, Artificial Sequence
  Synthetic
SDGALVVRSDMY

SEQ ID NO: 13805 - protein, 10 aa, Artificial Sequence
  Synthetic
DDIFATPGKY

SEQ ID NO: 13806 - protein, 8 aa, Artificial Sequence
  Synthetic
RADAEGWW

SEQ ID NO: 13807 - protein, 18 aa, Artificial Sequence
  Synthetic
SPWGGEVYGTPPCLHQGM

SEQ ID NO: 13808 - protein, 14 aa, Artificial Sequence
  Synthetic
SEFGTAQPLGIREY

SEQ ID NO: 13809 - protein, 14 aa, Artificial Sequence
  Synthetic
TRGRSTRLVLPSLV

SEQ ID NO: 13810 - protein, 16 aa, Artificial Sequence
  Synthetic
GKSAYRGGAHYTTGAY

SEQ ID NO: 13811 - protein, 16 aa, Artificial Sequence
  Synthetic
ALSEVWRGSENLREGY

SEQ ID NO: 13812 - protein, 17 aa, Artificial Sequence
  Synthetic
GNIYPSSNYDLNNSRMY

SEQ ID NO: 13813 - protein, 16 aa, Artificial Sequence
  Synthetic
GRVPHTMMVLTTTAYY

SEQ ID NO: 13814 - protein, 15 aa, Artificial Sequence
  Synthetic
RPERTYVITPFSDDY

SEQ ID NO: 13815 - protein, 15 aa, Artificial Sequence
  Synthetic
QGSLYDDYDGLPIKY

SEQ ID NO: 13816 - protein, 9 aa, Artificial Sequence
  Synthetic
NVASGLKIL

SEQ ID NO: 13817 - protein, 15 aa, Artificial Sequence
  Synthetic
DPSYQLADFLTSLPN

SEQ ID NO: 13818 - protein, 12 aa, Artificial Sequence
  Synthetic
SRDYYGHNANQY

SEQ ID NO: 13819 - protein, 14 aa, Artificial Sequence
  Synthetic
HWKAYYNCGMWIAY

SEQ ID NO: 13820 - protein, 12 aa, Artificial Sequence
  Synthetic
ALGYGSRHLDAY

SEQ ID NO: 13821 - protein, 9 aa, Artificial Sequence
  Synthetic
NAYHSGNLY

SEQ ID NO: 13822 - protein, 9 aa, Artificial Sequence
  Synthetic
RVRFFTTYV

SEQ ID NO: 13823 - protein, 13 aa, Artificial Sequence
  Synthetic
VQQSWTRGGLRSY

SEQ ID NO: 13824 - protein, 8 aa, Artificial Sequence
  Synthetic
EGSSWKKF

SEQ ID NO: 13825 - protein, 4 aa, Artificial Sequence
  Synthetic
LAPS

SEQ ID NO: 13826 - protein, 13 aa, Artificial Sequence
  Synthetic
DQTSLQLTKVSAY

SEQ ID NO: 13827 - protein, 7 aa, Artificial Sequence
  Synthetic
KNTIPYK

SEQ ID NO: 13828 - protein, 12 aa, Artificial Sequence
  Synthetic
RRGIATMAPTSY

SEQ ID NO: 13829 - protein, 6 aa, Artificial Sequence
  Synthetic
AYKHNR

SEQ ID NO: 13830 - protein, 14 aa, Artificial Sequence
  Synthetic
PGPYSDYETMAYEY

SEQ ID NO: 13831 - protein, 12 aa, Artificial Sequence
  Synthetic
TVLARRPAPEAY

SEQ ID NO: 13832 - protein, 10 aa, Artificial Sequence
  Synthetic
GRSGVTVRNS

SEQ ID NO: 13833 - protein, 14 aa, Artificial Sequence
  Synthetic
PGPYSDYETMGYEY

SEQ ID NO: 13834 - protein, 12 aa, Artificial Sequence
  Synthetic
TILARRPSPGAY

SEQ ID NO: 13835 - protein, 12 aa, Artificial Sequence
  Synthetic
TILAQRPTPGAY

SEQ ID NO: 13836 - protein, 17 aa, Artificial Sequence
  Synthetic
ADHGSRWWRQVADITTY

SEQ ID NO: 13837 - protein, 13 aa, Artificial Sequence
  Synthetic
DSVNRAIMLGTSL

SEQ ID NO: 13838 - protein, 13 aa, Artificial Sequence
  Synthetic
DSSYRAIMLGRSL

SEQ ID NO: 13839 - protein, 13 aa, Artificial Sequence
  Synthetic
DSNYRAILLGTSL

SEQ ID NO: 13840 - protein, 15 aa, Artificial Sequence
  Synthetic
DPSYARIVGSGRYII

SEQ ID NO: 13841 - protein, 13 aa, Artificial Sequence
  Synthetic
DGIAVLAGRTDQY

SEQ ID NO: 13842 - protein, 9 aa, Artificial Sequence
  Synthetic
AARTWFYNY

SEQ ID NO: 13843 - protein, 18 aa, Artificial Sequence
  Synthetic
DTGLQYFSYAYSRRPSDY

SEQ ID NO: 13844 - protein, 18 aa, Artificial Sequence
  Synthetic
DTGLAYFSYEYSRRPSDY

SEQ ID NO: 13845 - protein, 17 aa, Artificial Sequence
  Synthetic
ADHGSRWWRQMADATTY

SEQ ID NO: 13846 - protein, 13 aa, Artificial Sequence
  Synthetic
DSVNRAILLGTSL

SEQ ID NO: 13847 - protein, 13 aa, Artificial Sequence
  Synthetic
DIIATLVGRKDSY

SEQ ID NO: 13848 - protein, 7 aa, Artificial Sequence
  Synthetic
WSQWQSE

SEQ ID NO: 13849 - protein, 7 aa, Artificial Sequence
  Synthetic
WSQWESE

SEQ ID NO: 13850 - protein, 7 aa, Artificial Sequence
  Synthetic
WNQWESE

SEQ ID NO: 13851 - protein, 16 aa, Artificial Sequence
  Synthetic
RTVFSGPQYYTRAHEY

SEQ ID NO: 13852 - protein, 14 aa, Artificial Sequence
  Synthetic
GRGSPSDTGRPDEY

SEQ ID NO: 13853 - protein, 14 aa, Artificial Sequence
  Synthetic
GRGAPSDTGRADEY

SEQ ID NO: 13854 - protein, 6 aa, Artificial Sequence
  Synthetic
GEGGTW

SEQ ID NO: 13855 - protein, 14 aa, Artificial Sequence
  Synthetic
RPVRVADISLPVGF

SEQ ID NO: 13856 - protein, 16 aa, Artificial Sequence
  Synthetic
GRIGRSVFNLRRESWV

SEQ ID NO: 13857 - protein, 9 aa, Artificial Sequence
  Synthetic
EDRHRIGTV

SEQ ID NO: 13858 - protein, 14 aa, Artificial Sequence
  Synthetic
RMPYSGDYRSSGTY

SEQ ID NO: 13859 - protein, 11 aa, Artificial Sequence
  Synthetic
GAGWAGTMTDY

SEQ ID NO: 13860 - protein, 16 aa, Artificial Sequence
  Synthetic
DLHRPYGPGTQRSDEY

SEQ ID NO: 13861 - protein, 16 aa, Artificial Sequence
  Synthetic
SSRVFYTEVLQTTTGY

SEQ ID NO: 13862 - protein, 16 aa, Artificial Sequence
  Synthetic
KWRPLRYSDNPSNSDY

SEQ ID NO: 13863 - protein, 10 aa, Artificial Sequence
  Synthetic
NVKTWAGMTR

SEQ ID NO: 13864 - protein, 11 aa, Artificial Sequence
  Synthetic
RPQGDYVTAHY

SEQ ID NO: 13865 - protein, 13 aa, Artificial Sequence
  Synthetic
DLYGLGSHMENEY

SEQ ID NO: 13866 - protein, 11 aa, Artificial Sequence
  Synthetic
NLQTGTLSGAR

SEQ ID NO: 13867 - protein, 14 aa, Artificial Sequence
  Synthetic
KWRPLRYSDYPSNS

SEQ ID NO: 13868 - protein, 16 aa, Artificial Sequence
  Synthetic
DRFSPVVPGPIPVNTV

SEQ ID NO: 13869 - protein, 13 aa, Artificial Sequence
  Synthetic
SDKYNFDTSHAGY

SEQ ID NO: 13870 - protein, 13 aa, Artificial Sequence
  Synthetic
TTDCAAFVERATA

SEQ ID NO: 13871 - protein, 9 aa, Artificial Sequence
  Synthetic
VADYDMGFQ

SEQ ID NO: 13872 - protein, 16 aa, Artificial Sequence
  Synthetic
DRFPTMEVVTIMTNEY

SEQ ID NO: 13873 - protein, 7 aa, Artificial Sequence
  Synthetic
NRGLAGP

SEQ ID NO: 13874 - protein, 17 aa, Artificial Sequence
  Synthetic
DGSQYRSTYSFRDKPDY

SEQ ID NO: 13875 - protein, 18 aa, Artificial Sequence
  Synthetic
PGRPHGSSWSLNKKGQGY

SEQ ID NO: 13876 - protein, 13 aa, Artificial Sequence
  Synthetic
RVVPVFSDSTKGY

SEQ ID NO: 13877 - protein, 15 aa, Artificial Sequence
  Synthetic
DPECYRVRGYYNGEY

SEQ ID NO: 13878 - protein, 12 aa, Artificial Sequence
  Synthetic
TSLFPTSRGSHY

SEQ ID NO: 13879 - protein, 12 aa, Artificial Sequence
  Synthetic
GDNYYYTRTYEY

SEQ ID NO: 13880 - protein, 16 aa, Artificial Sequence
  Synthetic
SRISYRVWNTIPYNKL

SEQ ID NO: 13881 - protein, 16 aa, Artificial Sequence
  Synthetic
SRISYAVWNTIPYNKL

SEQ ID NO: 13882 - protein, 13 aa, Artificial Sequence
  Synthetic
DGRRFDGARWREY

SEQ ID NO: 13883 - protein, 13 aa, Artificial Sequence
  Synthetic
GLGIYIIRARGGY

SEQ ID NO: 13884 - protein, 13 aa, Artificial Sequence
  Synthetic
AAGSAWYGTLYEY

SEQ ID NO: 13885 - protein, 19 aa, Artificial Sequence
  Synthetic
TYLSSDYSRYALPQRPLDY

SEQ ID NO: 13886 - protein, 16 aa, Artificial Sequence
  Synthetic
GYQINSGNYNFKDYEY

SEQ ID NO: 13887 - protein, 12 aa, Artificial Sequence
  Synthetic
DCTVDPSLLYVM

SEQ ID NO: 13888 - protein, 10 aa, Artificial Sequence
  Synthetic
FMSTNSGRTG

SEQ ID NO: 13889 - protein, 16 aa, Artificial Sequence
  Synthetic
TTYASLSDTYIGEHIY

SEQ ID NO: 13890 - protein, 12 aa, Artificial Sequence
  Synthetic
APYGANWYRDEY

SEQ ID NO: 13891 - protein, 13 aa, Artificial Sequence
  Synthetic
NSQRTRLQDPNEY

SEQ ID NO: 13892 - protein, 12 aa, Artificial Sequence
  Synthetic
GLGWDSRYSQSY

SEQ ID NO: 13893 - protein, 11 aa, Artificial Sequence
  Synthetic
GTYYGTLSYKY

SEQ ID NO: 13894 - protein, 6 aa, Artificial Sequence
  Synthetic
RVGSEY

SEQ ID NO: 13895 - protein, 12 aa, Artificial Sequence
  Synthetic
NIEAGTYYGPGR

SEQ ID NO: 13896 - protein, 9 aa, Artificial Sequence
  Synthetic
DARTITGRA

SEQ ID NO: 13897 - protein, 10 aa, Artificial Sequence
  Synthetic
GGYQLRDRTY

SEQ ID NO: 13898 - protein, 13 aa, Artificial Sequence
  Synthetic
DKYYTGPGGESVY

SEQ ID NO: 13899 - protein, 12 aa, Artificial Sequence
  Synthetic
HPQRGWGSTLGW

SEQ ID NO: 13900 - protein, 15 aa, Artificial Sequence
  Synthetic
DLKMQVAAYMNQRSV

SEQ ID NO: 13901 - protein, 15 aa, Artificial Sequence
  Synthetic
GPFVYGRGCLGQAFY

SEQ ID NO: 13902 - protein, 18 aa, Artificial Sequence
  Synthetic
VREATYSDNRCSVRSYTY

SEQ ID NO: 13903 - protein, 11 aa, Artificial Sequence
  Synthetic
AIRTTVRTSAQ

SEQ ID NO: 13904 - protein, 10 aa, Artificial Sequence
  Synthetic
EDYSAYAPPS

SEQ ID NO: 13905 - protein, 7 aa, Artificial Sequence
  Synthetic
RVGITML

SEQ ID NO: 13906 - protein, 14 aa, Artificial Sequence
  Synthetic
RRWLGGSYFDPGNY

SEQ ID NO: 13907 - protein, 11 aa, Artificial Sequence
  Synthetic
GDTAITSWYGY

SEQ ID NO: 13908 - protein, 5 aa, Artificial Sequence
  Synthetic
ETRGF

SEQ ID NO: 13909 - protein, 13 aa, Artificial Sequence
  Synthetic
GRGIVAGRIPAEY

SEQ ID NO: 13910 - protein, 17 aa, Artificial Sequence
  Synthetic
RYQPRYYDSGDMDGYEY

SEQ ID NO: 13911 - protein, 4 aa, Artificial Sequence
  Synthetic
LPNY

SEQ ID NO: 13912 - protein, 13 aa, Artificial Sequence
  Synthetic
YSDRLTDCSNCEA

SEQ ID NO: 13913 - protein, 7 aa, Artificial Sequence
  Synthetic
GWGATPR

SEQ ID NO: 13914 - protein, 10 aa, Artificial Sequence
  Synthetic
PMIYYGGRYS

SEQ ID NO: 13915 - skipped

SEQ ID NO: 13916 - protein, 10 aa, Artificial Sequence
  Synthetic
DFACPLIREY

SEQ ID NO: 13917 - protein, 6 aa, Artificial Sequence
  Synthetic
RLSLIS

SEQ ID NO: 13918 - protein, 9 aa, Artificial Sequence
  Synthetic
KVAGTFSIY

SEQ ID NO: 13919 - protein, 14 aa, Artificial Sequence
  Synthetic
TPYYRGSYYAASTY

SEQ ID NO: 13920 - protein, 12 aa, Artificial Sequence
  Synthetic
SILPLSDDPGWN

SEQ ID NO: 13921 - protein, 13 aa, Artificial Sequence
  Synthetic
RDGIPTSRSVESY

SEQ ID NO: 13922 - protein, 9 aa, Artificial Sequence
  Synthetic
FFRRDYVGY

SEQ ID NO: 13923 - protein, 14 aa, Artificial Sequence
  Synthetic
SVRTTIQPFKGNYY

SEQ ID NO: 13924 - protein, 9 aa, Artificial Sequence
  Synthetic
RIWRGTVYD

SEQ ID NO: 13925 - protein, 24 aa, Artificial Sequence
  Synthetic
DLSSLTTVQAMCVIPRPGFSAKAY

SEQ ID NO: 13926 - protein, 4 aa, Artificial Sequence
  Synthetic
ALDT

SEQ ID NO: 13927 - protein, 14 aa, Artificial Sequence
  Synthetic
KGRYSGGLYYPTNY

SEQ ID NO: 13928 - protein, 13 aa, Artificial Sequence
  Synthetic
NPNPSGSSVYRRN

SEQ ID NO: 13929 - protein, 6 aa, Artificial Sequence
  Synthetic
GCYSWR

SEQ ID NO: 13930 - protein, 9 aa, Artificial Sequence
  Synthetic
DEAGIGGFN

SEQ ID NO: 13931 - protein, 18 aa, Artificial Sequence
  Synthetic
STVFAEITGLAGYQSGSY

SEQ ID NO: 13932 - protein, 11 aa, Artificial Sequence
  Synthetic
TFGSRWPYAHS

SEQ ID NO: 13933 - protein, 18 aa, Artificial Sequence
  Synthetic
SSVYAEMPYADSVKATSY

SEQ ID NO: 13934 - protein, 16 aa, Artificial Sequence
  Synthetic
TFTPDGSWYYTRGSSY

SEQ ID NO: 13935 - protein, 8 aa, Artificial Sequence
  Synthetic
EETIVEEA

SEQ ID NO: 13936 - protein, 15 aa, Artificial Sequence
  Synthetic
NKFVRGLVAVRAIDY

SEQ ID NO: 13937 - protein, 18 aa, Artificial Sequence
  Synthetic
SSIYSDISGAATVWATSY

SEQ ID NO: 13938 - protein, 18 aa, Artificial Sequence
  Synthetic
AARPSYSGDYGYTEALRY

SEQ ID NO: 13939 - protein, 10 aa, Artificial Sequence
  Synthetic
WGQDGWLGQY

SEQ ID NO: 13940 - protein, 12 aa, Artificial Sequence
  Synthetic
DPRPWGYDVTDY

SEQ ID NO: 13941 - protein, 12 aa, Artificial Sequence
  Synthetic
RRNPINGPYYTT

SEQ ID NO: 13942 - protein, 13 aa, Artificial Sequence
  Synthetic
RLGGWASFSPQEY

SEQ ID NO: 13943 - protein, 15 aa, Artificial Sequence
  Synthetic
DLEYSQIMPSCRGSY

SEQ ID NO: 13944 - protein, 10 aa, Artificial Sequence
  Synthetic
DLASSRDVSS

SEQ ID NO: 13945 - protein, 13 aa, Artificial Sequence
  Synthetic
RNPRATAEDVSAY

SEQ ID NO: 13946 - protein, 13 aa, Artificial Sequence
  Synthetic
RRDYGDSWFTAGG

SEQ ID NO: 13947 - protein, 5 aa, Artificial Sequence
  Synthetic
RRASA

SEQ ID NO: 13948 - protein, 10 aa, Artificial Sequence
  Synthetic
IRYSPIHAPL

SEQ ID NO: 13949 - protein, 22 aa, Artificial Sequence
  Synthetic
DTTDRYDSANGRYYCTISSDTY

SEQ ID NO: 13950 - protein, 5 aa, Artificial Sequence
  Synthetic
LPRFS

SEQ ID NO: 13951 - protein, 9 aa, Artificial Sequence
  Synthetic
TIVVFTTPM

SEQ ID NO: 13952 - protein, 16 aa, Artificial Sequence
  Synthetic
RYYSGTYSSTYDRDDY

SEQ ID NO: 13953 - protein, 12 aa, Artificial Sequence
  Synthetic
SLGYSGAYASGY

SEQ ID NO: 13954 - protein, 13 aa, Artificial Sequence
  Synthetic
FDSTGSPIVRDNY

SEQ ID NO: 13955 - protein, 8 aa, Artificial Sequence
  Synthetic
GIFDGNYR

SEQ ID NO: 13956 - protein, 5 aa, Artificial Sequence
  Synthetic
NLRTN

SEQ ID NO: 13957 - protein, 16 aa, Artificial Sequence
  Synthetic
STTYCSATTYSSDRLY

SEQ ID NO: 13958 - protein, 6 aa, Artificial Sequence
  Synthetic
RRLATY

SEQ ID NO: 13959 - protein, 15 aa, Artificial Sequence
  Synthetic
RSRFIVGVPQARDLY

SEQ ID NO: 13960 - protein, 11 aa, Artificial Sequence
  Synthetic
YIQLDSTIWFR

SEQ ID NO: 13961 - protein, 11 aa, Artificial Sequence
  Synthetic
GKWDGSYYGAP

SEQ ID NO: 13962 - protein, 12 aa, Artificial Sequence
  Synthetic
VEPNCSSGRKAF

SEQ ID NO: 13963 - protein, 6 aa, Artificial Sequence
  Synthetic
EGRGWG

SEQ ID NO: 13964 - protein, 11 aa, Artificial Sequence
  Synthetic
WDRSDYRGHGH

SEQ ID NO: 13965 - protein, 5 aa, Artificial Sequence
  Synthetic
WPMKA

SEQ ID NO: 13966 - protein, 5 aa, Artificial Sequence
  Synthetic
RVFSA

SEQ ID NO: 13967 - protein, 9 aa, Artificial Sequence
  Synthetic
STTPPIFTF

SEQ ID NO: 13968 - protein, 17 aa, Artificial Sequence
  Synthetic
DEEAVCSVATLKRRAKY

SEQ ID NO: 13969 - protein, 21 aa, Artificial Sequence
  Synthetic
DLGAGGCVLSPAGTLSIARFL

SEQ ID NO: 13970 - protein, 13 aa, Artificial Sequence
  Synthetic
PTALRWQCNPAYF

SEQ ID NO: 13971 - protein, 15 aa, Artificial Sequence
  Synthetic
ESFWVGPVQAMCNNP

SEQ ID NO: 13972 - protein, 13 aa, Artificial Sequence
  Synthetic
ANKGFCTLDANDY

SEQ ID NO: 13973 - protein, 18 aa, Artificial Sequence
  Synthetic
DSGSRSSWSLCPRGSVGY

SEQ ID NO: 13974 - protein, 13 aa, Artificial Sequence
  Synthetic
DPARFTTCSPDEY

SEQ ID NO: 13975 - protein, 16 aa, Artificial Sequence
  Synthetic
APGLTTFQTLCLMIGG

SEQ ID NO: 13976 - protein, 18 aa, Artificial Sequence
  Synthetic
GSGSTYYDCSGYETGWRI

SEQ ID NO: 13977 - protein, 19 aa, Artificial Sequence
  Synthetic
VYTGAGQLLPSLCLDENGY

SEQ ID NO: 13978 - protein, 15 aa, Artificial Sequence
  Synthetic
ASDLWYSGLYCGPDY

SEQ ID NO: 13979 - protein, 24 aa, Artificial Sequence
  Synthetic
LGGDVCVRFGRPGAYYCIANRCYD

SEQ ID NO: 13980 - protein, 15 aa, Artificial Sequence
  Synthetic
VTPGYYGGSYSCIPD

SEQ ID NO: 13981 - protein, 11 aa, Artificial Sequence
  Synthetic
DIATMTAVGGF

SEQ ID NO: 13982 - protein, 7 aa, Artificial Sequence
  Synthetic
EHDLGYY

SEQ ID NO: 13983 - protein, 14 aa, Artificial Sequence
  Synthetic
DDFRCGSRWAAYLR

SEQ ID NO: 13984 - protein, 5 aa, Artificial Sequence
  Synthetic
PDDEY

SEQ ID NO: 13985 - protein, 17 aa, Artificial Sequence
  Synthetic
VVNYYCTAGGSIHASPY

SEQ ID NO: 13986 - skipped

SEQ ID NO: 13987 - protein, 4 aa, Artificial Sequence
  Synthetic
YGSG

SEQ ID NO: 13988 - protein, 14 aa, Artificial Sequence
  Synthetic
APLVGNYCPASYEY

SEQ ID NO: 13989 - protein, 14 aa, Artificial Sequence
  Synthetic
RTQYGGSSADPKNY

SEQ ID NO: 13990 - protein, 14 aa, Artificial Sequence
  Synthetic
GPPTMLDVSTDREY

SEQ ID NO: 13991 - protein, 6 aa, Artificial Sequence
  Synthetic
GLRMDS

SEQ ID NO: 13992 - protein, 15 aa, Artificial Sequence
  Synthetic
PGAPYSDRGRNASEY

SEQ ID NO: 13993 - skipped

SEQ ID NO: 13994 - protein, 13 aa, Artificial Sequence
  Synthetic
KNRGSDSDVVRGY

SEQ ID NO: 13995 - protein, 9 aa, Artificial Sequence
  Synthetic
GGFTIAPLD

SEQ ID NO: 13996 - protein, 10 aa, Artificial Sequence
  Synthetic
GGDIYYGGSP

SEQ ID NO: 13997 - protein, 13 aa, Artificial Sequence
  Synthetic
GHYTDFPTYFKEY

SEQ ID NO: 13998 - protein, 19 aa, Artificial Sequence
  Synthetic
IRPARLRAYRECLSSQAEY

SEQ ID NO: 13999 - protein, 14 aa, Artificial Sequence
  Synthetic
SRLRPALASMASDY

SEQ ID NO: 14000 - protein, 12 aa, Artificial Sequence
  Synthetic
RPCFLGVPLIDF

SEQ ID NO: 14001 - protein, 13 aa, Artificial Sequence
  Synthetic
SISGYAYNTIERY

SEQ ID NO: 14002 - protein, 17 aa, Artificial Sequence
  Synthetic
RRSWYRDALSPSRVYEY

SEQ ID NO: 14003 - protein, 8 aa, Artificial Sequence
  Synthetic
DAAGWGDQ

SEQ ID NO: 14004 - protein, 7 aa, Artificial Sequence
  Synthetic
WPRTMPD

SEQ ID NO: 14005 - protein, 6 aa, Artificial Sequence
  Synthetic
ASPASW

SEQ ID NO: 14006 - protein, 5 aa, Artificial Sequence
  Synthetic
WPREG

SEQ ID NO: 14007 - protein, 6 aa, Artificial Sequence
  Synthetic
KNSIYW

SEQ ID NO: 14008 - protein, 13 aa, Artificial Sequence
  Synthetic
RRGPGTSVLSDDY

SEQ ID NO: 14009 - protein, 15 aa, Artificial Sequence
  Synthetic
TRTPRVRLPTESREY

SEQ ID NO: 14010 - protein, 7 aa, Artificial Sequence
  Synthetic
EWLGRSE

SEQ ID NO: 14011 - protein, 7 aa, Artificial Sequence
  Synthetic
VRTTVSR

SEQ ID NO: 14012 - protein, 7 aa, Artificial Sequence
  Synthetic
RRGPGIK

SEQ ID NO: 14013 - protein, 12 aa, Artificial Sequence
  Synthetic
RIIPLGLGSEYR

SEQ ID NO: 14014 - protein, 15 aa, Artificial Sequence
  Synthetic
RRNTYTSDYNIPARY

SEQ ID NO: 14015 - protein, 8 aa, Artificial Sequence
  Synthetic
KPWRLQGW

SEQ ID NO: 14016 - protein, 4 aa, Artificial Sequence
  Synthetic
LLST

SEQ ID NO: 14017 - protein, 4 aa, Artificial Sequence
  Synthetic
LLRT

SEQ ID NO: 14018 - protein, 7 aa, Artificial Sequence
  Synthetic
PRLHTSV

SEQ ID NO: 14019 - protein, 16 aa, Artificial Sequence
  Synthetic
YLSPRVQSPYITDSRY

SEQ ID NO: 14020 - protein, 10 aa, Artificial Sequence
  Synthetic
GRGATFNPEY

SEQ ID NO: 14021 - protein, 10 aa, Artificial Sequence
  Synthetic
GSYNSDWWNY

SEQ ID NO: 14022 - protein, 22 aa, Artificial Sequence
  Synthetic
EGARTHLSDSYYFPGLWAEPPV

SEQ ID NO: 14023 - protein, 12 aa, Artificial Sequence
  Synthetic
DYGSGIRAWYNW

SEQ ID NO: 14024 - protein, 8 aa, Artificial Sequence
  Synthetic
KRTIGTKS

SEQ ID NO: 14025 - protein, 4 aa, Artificial Sequence
  Synthetic
LLAT

SEQ ID NO: 14026 - protein, 16 aa, Artificial Sequence
  Synthetic
AVAASAEFVTARSNFY

SEQ ID NO: 14027 - protein, 11 aa, Artificial Sequence
  Synthetic
ARSEWGSRAVY

SEQ ID NO: 14028 - protein, 12 aa, Artificial Sequence
  Synthetic
GSGVGYAFQPTR

SEQ ID NO: 14029 - protein, 10 aa, Artificial Sequence
  Synthetic
GNWNSRAREY

SEQ ID NO: 14030 - protein, 16 aa, Artificial Sequence
  Synthetic
ADPVRRPYYYENNNNY

SEQ ID NO: 14031 - protein, 11 aa, Artificial Sequence
  Synthetic
ARSEWGSRAEY

SEQ ID NO: 14032 - protein, 9 aa, Artificial Sequence
  Synthetic
RRSMASNPY

SEQ ID NO: 14033 - protein, 5 aa, Artificial Sequence
  Synthetic
PLRTM

SEQ ID NO: 14034 - protein, 15 aa, Artificial Sequence
  Synthetic
SIYFASATGDQSRVY

SEQ ID NO: 14035 - protein, 13 aa, Artificial Sequence
  Synthetic
GHRSTWAGYPAAD

SEQ ID NO: 14036 - protein, 9 aa, Artificial Sequence
  Synthetic
RAPTGEGGW

SEQ ID NO: 14037 - protein, 18 aa, Artificial Sequence
  Synthetic
SSVYAEMPYAASVKTTSY

SEQ ID NO: 14038 - protein, 6 aa, Artificial Sequence
  Synthetic
WPFTKL

SEQ ID NO: 14039 - protein, 6 aa, Artificial Sequence
  Synthetic
RNELRD

SEQ ID NO: 14040 - protein, 5 aa, Artificial Sequence
  Synthetic
LIQWR

SEQ ID NO: 14041 - protein, 5 aa, Artificial Sequence
  Synthetic
ERLGK

SEQ ID NO: 14042 - protein, 6 aa, Artificial Sequence
  Synthetic
PSPASW

SEQ ID NO: 14043 - protein, 8 aa, Artificial Sequence
  Synthetic
RFGNDTNR

SEQ ID NO: 14044 - protein, 11 aa, Artificial Sequence
  Synthetic
EAYGSGCPRVR

SEQ ID NO: 14045 - protein, 14 aa, Artificial Sequence
  Synthetic
GLRGGTYARIQYDY

SEQ ID NO: 14046 - protein, 9 aa, Artificial Sequence
  Synthetic
RKWERSVLE

SEQ ID NO: 14047 - protein, 7 aa, Artificial Sequence
  Synthetic
PAGRIED

SEQ ID NO: 14048 - protein, 7 aa, Artificial Sequence
  Synthetic
PARQIEY

SEQ ID NO: 14049 - protein, 14 aa, Artificial Sequence
  Synthetic
GLRGGTYARTIYEY

SEQ ID NO: 14050 - protein, 5 aa, Artificial Sequence
  Synthetic
YREGI

SEQ ID NO: 14051 - protein, 13 aa, Artificial Sequence
  Synthetic
DTSLDRWLRNGNP

SEQ ID NO: 14052 - protein, 6 aa, Artificial Sequence
  Synthetic
RRILRP

SEQ ID NO: 14053 - protein, 16 aa, Artificial Sequence
  Synthetic
DLGAWSSVIVEPTYEW

SEQ ID NO: 14054 - protein, 9 aa, Artificial Sequence
  Synthetic
EKLRAGIPY

SEQ ID NO: 14055 - protein, 8 aa, Artificial Sequence
  Synthetic
KYSLRSSW

SEQ ID NO: 14056 - protein, 12 aa, Artificial Sequence
  Synthetic
TGERGYGDQGYL

SEQ ID NO: 14057 - protein, 7 aa, Artificial Sequence
  Synthetic
VDLGGSF

SEQ ID NO: 14058 - protein, 6 aa, Artificial Sequence
  Synthetic
YYSDNF

SEQ ID NO: 14059 - protein, 7 aa, Artificial Sequence
  Synthetic
PARTIEL

SEQ ID NO: 14060 - protein, 16 aa, Artificial Sequence
  Synthetic
PAHFSGNYLSPHVYEY

SEQ ID NO: 14061 - protein, 17 aa, Artificial Sequence
  Synthetic
DRYLYSGSGIVTYCPNP

SEQ ID NO: 14062 - protein, 13 aa, Artificial Sequence
  Synthetic
SISGYAYNAIERY

SEQ ID NO: 14063 - protein, 9 aa, Artificial Sequence
  Synthetic
DVADPGYDD

SEQ ID NO: 14064 - protein, 11 aa, Artificial Sequence
  Synthetic
DVSTGFRYQRK

SEQ ID NO: 14065 - protein, 15 aa, Artificial Sequence
  Synthetic
DRPPCYYCSGYGCYR

SEQ ID NO: 14066 - protein, 10 aa, Artificial Sequence
  Synthetic
ESSWAEGGYL

SEQ ID NO: 14067 - protein, 15 aa, Artificial Sequence
  Synthetic
EAVVAGLLRPPPYEY

SEQ ID NO: 14068 - protein, 14 aa, Artificial Sequence
  Synthetic
DRSYTVVAGPRYEY

SEQ ID NO: 14069 - protein, 12 aa, Artificial Sequence
  Synthetic
DKDSDYDVQYGM

SEQ ID NO: 14070 - protein, 20 aa, Artificial Sequence
  Synthetic
APFPDGVLALGTIATMPGFF

SEQ ID NO: 14071 - protein, 16 aa, Artificial Sequence
  Synthetic
DPNTDYGLEDLNPQEY

SEQ ID NO: 14072 - protein, 13 aa, Artificial Sequence
  Synthetic
DYWGQGTQVTVSS

SEQ ID NO: 14073 - protein, 13 aa, Artificial Sequence
  Synthetic
DYWGQGTQVTVSS

SEQ ID NO: 14074 - protein, 13 aa, Artificial Sequence
  Synthetic
RYWGQGTQVTVSS

SEQ ID NO: 14075 - protein, 13 aa, Artificial Sequence
  Synthetic
DSWGQGTQVTVSS

SEQ ID NO: 14076 - protein, 13 aa, Artificial Sequence
  Synthetic
TNWGRGTQVTVSS

SEQ ID NO: 14077 - protein, 13 aa, Artificial Sequence
  Synthetic
DYWGQGTQVTVSS

SEQ ID NO: 14078 - protein, 13 aa, Artificial Sequence
  Synthetic
QYWGQGTQVTVSS

SEQ ID NO: 14079 - protein, 12 aa, Artificial Sequence
  Synthetic
DYWGQGTQVTVS

SEQ ID NO: 14080 - protein, 13 aa, Artificial Sequence
  Synthetic
NVWGQGTQVTVSS

SEQ ID NO: 14081 - protein, 13 aa, Artificial Sequence
  Synthetic
HYWGPGTQVTVSS

SEQ ID NO: 14082 - protein, 13 aa, Artificial Sequence
  Synthetic
DYWGQGTQVTVSS

SEQ ID NO: 14083 - protein, 13 aa, Artificial Sequence
  Synthetic
DYWGQGTQVTVSS

SEQ ID NO: 14084 - protein, 13 aa, Artificial Sequence
  Synthetic
PYWGQGTQVTVSS

SEQ ID NO: 14085 - protein, 13 aa, Artificial Sequence
  Synthetic
MYWGQGTQVTVSS

SEQ ID NO: 14086 - protein, 13 aa, Artificial Sequence
  Synthetic
DYWGQGTQVTVSS

SEQ ID NO: 14087 - protein, 13 aa, Artificial Sequence
  Synthetic
SFWGQGTQVTVSS

SEQ ID NO: 14088 - protein, 13 aa, Artificial Sequence
  Synthetic
DYWGQGTQVTVSS

SEQ ID NO: 14089 - protein, 13 aa, Artificial Sequence
  Synthetic
DYWGQGTQVTVSS

SEQ ID NO: 14090 - protein, 13 aa, Artificial Sequence
  Synthetic
DYWGQGTQVTVSS

SEQ ID NO: 14091 - protein, 13 aa, Artificial Sequence
  Synthetic
RSWGQGTQVTVSS

SEQ ID NO: 14092 - protein, 13 aa, Artificial Sequence
  Synthetic
NDWGQGTQVTVSS

SEQ ID NO: 14093 - protein, 13 aa, Artificial Sequence
  Synthetic
DYWGQGTQVTVSS

SEQ ID NO: 14094 - protein, 13 aa, Artificial Sequence
  Synthetic
GSRGRGTQVTVSS

SEQ ID NO: 14095 - protein, 13 aa, Artificial Sequence
  Synthetic
AYWGRGTQVTVSS

SEQ ID NO: 14096 - protein, 13 aa, Artificial Sequence
  Synthetic
EYWGQGTQVTVSS

SEQ ID NO: 14097 - protein, 13 aa, Artificial Sequence
  Synthetic
KYWGQGTQVTVSS

SEQ ID NO: 14098 - protein, 13 aa, Artificial Sequence
  Synthetic
ARRGQGTQVTVSS

SEQ ID NO: 14099 - protein, 13 aa, Artificial Sequence
  Synthetic
DIWGQGTQVTVSS

SEQ ID NO: 14100 - protein, 13 aa, Artificial Sequence
  Synthetic
GHWGQGTQVTVSS

SEQ ID NO: 14101 - protein, 13 aa, Artificial Sequence
  Synthetic
NYWGQGTQVTVSS

SEQ ID NO: 14102 - protein, 13 aa, Artificial Sequence
  Synthetic
DYWGQGTQVTVSS

SEQ ID NO: 14103 - protein, 13 aa, Artificial Sequence
  Synthetic
AYWGQGTQVTVFS

SEQ ID NO: 14104 - protein, 13 aa, Artificial Sequence
  Synthetic
GYWGQGTQVTVST

SEQ ID NO: 14105 - protein, 13 aa, Artificial Sequence
  Synthetic
ATWGQGIQVTVSS

SEQ ID NO: 14106 - protein, 13 aa, Artificial Sequence
  Synthetic
TYRGQGTQVTVSS

SEQ ID NO: 14107 - protein, 13 aa, Artificial Sequence
  Synthetic
NYWGQGTQVTVSS

SEQ ID NO: 14108 - protein, 13 aa, Artificial Sequence
  Synthetic
NYWGQGTQVTVSS

SEQ ID NO: 14109 - protein, 13 aa, Artificial Sequence
  Synthetic
GAWGQGTQVTVSS

SEQ ID NO: 14110 - protein, 13 aa, Artificial Sequence
  Synthetic
EVRGQGTLVIVSS

SEQ ID NO: 14111 - protein, 13 aa, Artificial Sequence
  Synthetic
DYWGQGTQVTVTE

SEQ ID NO: 14112 - protein, 13 aa, Artificial Sequence
  Synthetic
TYWGRGTQVTVSA

SEQ ID NO: 14113 - protein, 13 aa, Artificial Sequence
  Synthetic
DYWGQGTQVTVSS

SEQ ID NO: 14114 - protein, 13 aa, Artificial Sequence
  Synthetic
KYWGQGTQVTVSS

SEQ ID NO: 14115 - protein, 13 aa, Artificial Sequence
  Synthetic
NFWGQGTQVTVSS

SEQ ID NO: 14116 - protein, 13 aa, Artificial Sequence
  Synthetic
NYWGQGTQVTVSS

SEQ ID NO: 14117 - protein, 13 aa, Artificial Sequence
  Synthetic
TYYGSCTRVVGAY

SEQ ID NO: 14118 - protein, 13 aa, Artificial Sequence
  Synthetic
KYWGQGTLVTVSS

SEQ ID NO: 14119 - protein, 13 aa, Artificial Sequence
  Synthetic
DYWGKGTQVTVSS

SEQ ID NO: 14120 - protein, 13 aa, Artificial Sequence
  Synthetic
YDWGQGTQVTVSS

SEQ ID NO: 14121 - protein, 13 aa, Artificial Sequence
  Synthetic
NYWGQGTQVTVSS

SEQ ID NO: 14122 - protein, 13 aa, Artificial Sequence
  Synthetic
PCWGQGTQVTVSS

SEQ ID NO: 14123 - protein, 13 aa, Artificial Sequence
  Synthetic
AYRGQGTQVTVSS

SEQ ID NO: 14124 - protein, 13 aa, Artificial Sequence
  Synthetic
NYWGQGTQVTVSS

SEQ ID NO: 14125 - protein, 13 aa, Artificial Sequence
  Synthetic
RYRGQGTQVTVSS

SEQ ID NO: 14126 - protein, 13 aa, Artificial Sequence
  Synthetic
AYWGQGTQVTVSS

SEQ ID NO: 14127 - protein, 13 aa, Artificial Sequence
  Synthetic
RYWGQGTQVTVSS

SEQ ID NO: 14128 - protein, 13 aa, Artificial Sequence
  Synthetic
GIGVQGTQVTVSS

SEQ ID NO: 14129 - protein, 13 aa, Artificial Sequence
  Synthetic
NYWGQGTQVTVSS

SEQ ID NO: 14130 - protein, 13 aa, Artificial Sequence
  Synthetic
NFWGQGTQVTVSS

SEQ ID NO: 14131 - protein, 13 aa, Artificial Sequence
  Synthetic
YWWGQGTLVTVSS

SEQ ID NO: 14132 - protein, 13 aa, Artificial Sequence
  Synthetic
NYWGQGTLVTVSS

SEQ ID NO: 14133 - protein, 13 aa, Artificial Sequence
  Synthetic
NYWGQGTQVTVSS

SEQ ID NO: 14134 - protein, 13 aa, Artificial Sequence
  Synthetic
GFWGQGTLVTVSS

SEQ ID NO: 14135 - protein, 13 aa, Artificial Sequence
  Synthetic
GYWGQGTQVTVSS

SEQ ID NO: 14136 - protein, 13 aa, Artificial Sequence
  Synthetic
KNWGQGTLVTVSS

SEQ ID NO: 14137 - protein, 13 aa, Artificial Sequence
  Synthetic
NYWGQGTQVTVSS

SEQ ID NO: 14138 - protein, 13 aa, Artificial Sequence
  Synthetic
NYWGQGTQVTVSS

SEQ ID NO: 14139 - protein, 13 aa, Artificial Sequence
  Synthetic
NYWGQGTQVTVSS

SEQ ID NO: 14140 - protein, 13 aa, Artificial Sequence
  Synthetic
GYWGQGTLVTVSS

SEQ ID NO: 14141 - protein, 13 aa, Artificial Sequence
  Synthetic
GYWGQGTLVTVSS

SEQ ID NO: 14142 - protein, 13 aa, Artificial Sequence
  Synthetic
NYWGQGTQVTVSS

SEQ ID NO: 14143 - protein, 13 aa, Artificial Sequence
  Synthetic
GIRGQGTLVTVSS

SEQ ID NO: 14144 - protein, 13 aa, Artificial Sequence
  Synthetic
NYRGQGTLVTVSS

SEQ ID NO: 14145 - protein, 13 aa, Artificial Sequence
  Synthetic
NYWGQGTQVTVSS

SEQ ID NO: 14146 - protein, 12 aa, Artificial Sequence
  Synthetic
IYWGQGTQVTVS

SEQ ID NO: 14147 - protein, 12 aa, Artificial Sequence
  Synthetic
IYWGQGTQVTVS

SEQ ID NO: 14148 - protein, 12 aa, Artificial Sequence
  Synthetic
GDWGQGTQVTVS

SEQ ID NO: 14149 - protein, 13 aa, Artificial Sequence
  Synthetic
NYWGQGTQVTVSS

SEQ ID NO: 14150 - protein, 13 aa, Artificial Sequence
  Synthetic
DYWGQGTQVTVSS

SEQ ID NO: 14151 - protein, 13 aa, Artificial Sequence
  Synthetic
NDWGQGTQVTVSS

SEQ ID NO: 14152 - protein, 13 aa, Artificial Sequence
  Synthetic
KYGGQGTQVTVSS

SEQ ID NO: 14153 - protein, 13 aa, Artificial Sequence
  Synthetic
CTEGQGTQVTVSS

SEQ ID NO: 14154 - protein, 13 aa, Artificial Sequence
  Synthetic
TYWGQGTQVTVSS

SEQ ID NO: 14155 - protein, 13 aa, Artificial Sequence
  Synthetic
DYWGQGTQVTVSS

SEQ ID NO: 14156 - protein, 13 aa, Artificial Sequence
  Synthetic
SDWGQGTQVTVSS

SEQ ID NO: 14157 - protein, 13 aa, Artificial Sequence
  Synthetic
RYWGQGTQVTVSS

SEQ ID NO: 14158 - protein, 13 aa, Artificial Sequence
  Synthetic
RYWGQGTQVTVSS

SEQ ID NO: 14159 - protein, 13 aa, Artificial Sequence
  Synthetic
EYWGQGTQVTVSS

SEQ ID NO: 14160 - protein, 13 aa, Artificial Sequence
  Synthetic
EVWGQGTMVTVSS

SEQ ID NO: 14161 - protein, 13 aa, Artificial Sequence
  Synthetic
TYWGQGTLVTVSS

SEQ ID NO: 14162 - protein, 13 aa, Artificial Sequence
  Synthetic
TYWGQGTQVTVSS

SEQ ID NO: 14163 - protein, 13 aa, Artificial Sequence
  Synthetic
NYWGQGTQVTVSS

SEQ ID NO: 14164 - protein, 13 aa, Artificial Sequence
  Synthetic
DYWGQGTQVTVSS

SEQ ID NO: 14165 - protein, 13 aa, Artificial Sequence
  Synthetic
NYRGQGTQVTVSS

SEQ ID NO: 14166 - protein, 13 aa, Artificial Sequence
  Synthetic
KYWGQGTQVTVST

SEQ ID NO: 14167 - protein, 13 aa, Artificial Sequence
  Synthetic
KYWGQGTQVTVSS

SEQ ID NO: 14168 - protein, 13 aa, Artificial Sequence
  Synthetic
GYEGQGTQVTVSS

SEQ ID NO: 14169 - protein, 13 aa, Artificial Sequence
  Synthetic
NDWGQGTQVTVSS

SEQ ID NO: 14170 - protein, 13 aa, Artificial Sequence
  Synthetic
SYWGQGTQVTVSS

SEQ ID NO: 14171 - protein, 13 aa, Artificial Sequence
  Synthetic
SAWGQGTQVTVSS

SEQ ID NO: 14172 - protein, 13 aa, Artificial Sequence
  Synthetic
SYWGQGTQVTVSS

SEQ ID NO: 14173 - protein, 13 aa, Artificial Sequence
  Synthetic
TYWGQGTQVTVSS

SEQ ID NO: 14174 - protein, 13 aa, Artificial Sequence
  Synthetic
TDWGQGTQVTVSS

SEQ ID NO: 14175 - protein, 13 aa, Artificial Sequence
  Synthetic
PYWGQGTQVTVSS

SEQ ID NO: 14176 - protein, 13 aa, Artificial Sequence
  Synthetic
RVRGQGTQVTVSS

SEQ ID NO: 14177 - protein, 13 aa, Artificial Sequence
  Synthetic
DYWGQGTQVTVSS

SEQ ID NO: 14178 - protein, 13 aa, Artificial Sequence
  Synthetic
SDWGQGTQVTVSS

SEQ ID NO: 14179 - protein, 13 aa, Artificial Sequence
  Synthetic
TIWGQGTQVTVSS

SEQ ID NO: 14180 - protein, 13 aa, Artificial Sequence
  Synthetic
GYFGQGTQVTVSS

SEQ ID NO: 14181 - protein, 13 aa, Artificial Sequence
  Synthetic
GVWAQGTQVTVSS

SEQ ID NO: 14182 - protein, 13 aa, Artificial Sequence
  Synthetic
NYWGQGTQVTVSS

SEQ ID NO: 14183 - protein, 13 aa, Artificial Sequence
  Synthetic
DYWGQGTQVAVSS

SEQ ID NO: 14184 - protein, 13 aa, Artificial Sequence
  Synthetic
NYWGQGTQVTVSS

SEQ ID NO: 14185 - protein, 13 aa, Artificial Sequence
  Synthetic
TNWGQGTQVTVSS

SEQ ID NO: 14186 - protein, 13 aa, Artificial Sequence
  Synthetic
DYWGKGTLVTISS

SEQ ID NO: 14187 - protein, 13 aa, Artificial Sequence
  Synthetic
RYWGQGTQVTVSS

SEQ ID NO: 14188 - protein, 13 aa, Artificial Sequence
  Synthetic
ELWGQGILVNVSS

SEQ ID NO: 14189 - protein, 13 aa, Artificial Sequence
  Synthetic
HAWGQGSQVTVSS

SEQ ID NO: 14190 - protein, 13 aa, Artificial Sequence
  Synthetic
NYWGQGTQVTVSS

SEQ ID NO: 14191 - protein, 13 aa, Artificial Sequence
  Synthetic
NYWGQGTQVTVSS

SEQ ID NO: 14192 - protein, 13 aa, Artificial Sequence
  Synthetic
PYWGQGTQVTVSS

SEQ ID NO: 14193 - protein, 13 aa, Artificial Sequence
  Synthetic
KYWGQGTQVTVSS

SEQ ID NO: 14194 - protein, 13 aa, Artificial Sequence
  Synthetic
KSWGQGTQVTVSS

SEQ ID NO: 14195 - protein, 13 aa, Artificial Sequence
  Synthetic
NYWGQGTQVTVSS

SEQ ID NO: 14196 - protein, 13 aa, Artificial Sequence
  Synthetic
GYRGQGTQVTVSS

SEQ ID NO: 14197 - protein, 13 aa, Artificial Sequence
  Synthetic
GTWGQGTQVTVSS

SEQ ID NO: 14198 - protein, 13 aa, Artificial Sequence
  Synthetic
NYWGQGTQVTVSS

SEQ ID NO: 14199 - protein, 13 aa, Artificial Sequence
  Synthetic
NDRGQGTQVAVSS

SEQ ID NO: 14200 - protein, 13 aa, Artificial Sequence
  Synthetic
ESRGQGTQVTVSS

SEQ ID NO: 14201 - protein, 13 aa, Artificial Sequence
  Synthetic
GYWGQGTQVTVSS

SEQ ID NO: 14202 - protein, 13 aa, Artificial Sequence
  Synthetic
NFWGQGTQVTVSS

SEQ ID NO: 14203 - protein, 13 aa, Artificial Sequence
  Synthetic
AAWGQGTQVTVSS

SEQ ID NO: 14204 - protein, 13 aa, Artificial Sequence
  Synthetic
DYVGQGVQVTVSS

SEQ ID NO: 14205 - protein, 13 aa, Artificial Sequence
  Synthetic
NYWGQGTQVTVSS

SEQ ID NO: 14206 - protein, 13 aa, Artificial Sequence
  Synthetic
GYWGQGTQVIVSS

SEQ ID NO: 14207 - protein, 13 aa, Artificial Sequence
  Synthetic
GAWGQGTQVTVSS

SEQ ID NO: 14208 - protein, 13 aa, Artificial Sequence
  Synthetic
NYWGQGTQVTVSS

SEQ ID NO: 14209 - protein, 13 aa, Artificial Sequence
  Synthetic
ALWGQGTQVNVSS

SEQ ID NO: 14210 - protein, 13 aa, Artificial Sequence
  Synthetic
DCWGQGTQVTVYS

SEQ ID NO: 14211 - protein, 13 aa, Artificial Sequence
  Synthetic
SFWGQGIQVTVSS

SEQ ID NO: 14212 - protein, 13 aa, Artificial Sequence
  Synthetic
DYWGQGTQVTVSS

SEQ ID NO: 14213 - protein, 13 aa, Artificial Sequence
  Synthetic
RFWGQGTQVTVSS

SEQ ID NO: 14214 - protein, 13 aa, Artificial Sequence
  Synthetic
NDWGPGTQVTVSS

SEQ ID NO: 14215 - protein, 13 aa, Artificial Sequence
  Synthetic
NRWGRGTQVTVSS

SEQ ID NO: 14216 - protein, 13 aa, Artificial Sequence
  Synthetic
GYWGQGTQVTVSS

SEQ ID NO: 14217 - protein, 13 aa, Artificial Sequence
  Synthetic
EVWGQGTLVNVSS

SEQ ID NO: 14218 - protein, 13 aa, Artificial Sequence
  Synthetic
HDWGQGTQVTVSS

SEQ ID NO: 14219 - protein, 13 aa, Artificial Sequence
  Synthetic
ASWGQGTQVTVSS

SEQ ID NO: 14220 - protein, 13 aa, Artificial Sequence
  Synthetic
RYWGRGTQVTVSS

SEQ ID NO: 14221 - protein, 13 aa, Artificial Sequence
  Synthetic
NYWGQGIQATVSS

SEQ ID NO: 14222 - protein, 13 aa, Artificial Sequence
  Synthetic
HLWGHGTQVTVSS

SEQ ID NO: 14223 - protein, 13 aa, Artificial Sequence
  Synthetic
NYWGQGTQVTVSS

SEQ ID NO: 14224 - protein, 13 aa, Artificial Sequence
  Synthetic
GYWGQGTQVTVSS

SEQ ID NO: 14225 - protein, 13 aa, Artificial Sequence
  Synthetic
GDWGQGTQVTVSS

SEQ ID NO: 14226 - protein, 13 aa, Artificial Sequence
  Synthetic
NFWGQGTQVTVSS

SEQ ID NO: 14227 - protein, 13 aa, Artificial Sequence
  Synthetic
RYWGQGTQVNVSS

SEQ ID NO: 14228 - protein, 13 aa, Artificial Sequence
  Synthetic
DYWGQGTQVTVSS

SEQ ID NO: 14229 - protein, 13 aa, Artificial Sequence
  Synthetic
THWGQGTQVTVSS

SEQ ID NO: 14230 - protein, 13 aa, Artificial Sequence
  Synthetic
DYWGQGTQVTVSS

SEQ ID NO: 14231 - protein, 13 aa, Artificial Sequence
  Synthetic
IFWGEGTQVTVSS

SEQ ID NO: 14232 - protein, 13 aa, Artificial Sequence
  Synthetic
GYWGQGTQVTVSS

SEQ ID NO: 14233 - protein, 13 aa, Artificial Sequence
  Synthetic
DYWGQGTQVTVSS

SEQ ID NO: 14234 - protein, 13 aa, Artificial Sequence
  Synthetic
DYWGQGTQVTVSS

SEQ ID NO: 14235 - protein, 13 aa, Artificial Sequence
  Synthetic
PYWGKGTLVTVSS

SEQ ID NO: 14236 - protein, 13 aa, Artificial Sequence
  Synthetic
HYWGQGTPVTVSS

SEQ ID NO: 14237 - protein, 13 aa, Artificial Sequence
  Synthetic
CLLGPGDQVTVSS

SEQ ID NO: 14238 - protein, 13 aa, Artificial Sequence
  Synthetic
GDWGQGIQVNVSS

SEQ ID NO: 14239 - protein, 13 aa, Artificial Sequence
  Synthetic
YYWGQGTQVTVSS

SEQ ID NO: 14240 - protein, 13 aa, Artificial Sequence
  Synthetic
SDWGQGTQVTVSS

SEQ ID NO: 14241 - protein, 13 aa, Artificial Sequence
  Synthetic
QSWGRGTQVTVSS

SEQ ID NO: 14242 - protein, 13 aa, Artificial Sequence
  Synthetic
VHWGQGTQVTVSS

SEQ ID NO: 14243 - protein, 13 aa, Artificial Sequence
  Synthetic
DYWGQGTQVTVSS

SEQ ID NO: 14244 - protein, 13 aa, Artificial Sequence
  Synthetic
YRWGQGTQVTVSS

SEQ ID NO: 14245 - protein, 13 aa, Artificial Sequence
  Synthetic
FDYGQGTQVTVSS

SEQ ID NO: 14246 - protein, 13 aa, Artificial Sequence
  Synthetic
LYWGQGTQVTVSS

SEQ ID NO: 14247 - protein, 13 aa, Artificial Sequence
  Synthetic
SYWGQGTQVTVSS

SEQ ID NO: 14248 - protein, 13 aa, Artificial Sequence
  Synthetic
NYWGQGTQVTVSS

SEQ ID NO: 14249 - protein, 13 aa, Artificial Sequence
  Synthetic
NYWGQGTQVTVSS

SEQ ID NO: 14250 - protein, 13 aa, Artificial Sequence
  Synthetic
DYWGRGTQVTVSS

SEQ ID NO: 14251 - protein, 13 aa, Artificial Sequence
  Synthetic
DYWGKGTLVTISS

SEQ ID NO: 14252 - protein, 13 aa, Artificial Sequence
  Synthetic
GRWSQGTRVTVSS

SEQ ID NO: 14253 - protein, 13 aa, Artificial Sequence
  Synthetic
RYWGQGTQVIVSS

SEQ ID NO: 14254 - protein, 13 aa, Artificial Sequence
  Synthetic
GYWGQGTQVTVSS

SEQ ID NO: 14255 - protein, 13 aa, Artificial Sequence
  Synthetic
YVWGQGTQVTVSS

SEQ ID NO: 14256 - protein, 13 aa, Artificial Sequence
  Synthetic
DYWGKGTLVTISS

SEQ ID NO: 14257 - protein, 13 aa, Artificial Sequence
  Synthetic
DDWGQGTQVTVSS

SEQ ID NO: 14258 - protein, 13 aa, Artificial Sequence
  Synthetic
TYWGQGTQVTVSS

SEQ ID NO: 14259 - protein, 13 aa, Artificial Sequence
  Synthetic
ILWGQGTQVTVSS

SEQ ID NO: 14260 - protein, 13 aa, Artificial Sequence
  Synthetic
DVWGQGTQVTVSS

SEQ ID NO: 14261 - protein, 13 aa, Artificial Sequence
  Synthetic
NFWGQGLQVTVSS

SEQ ID NO: 14262 - protein, 13 aa, Artificial Sequence
  Synthetic
YRSQQGTQVTVSS

SEQ ID NO: 14263 - protein, 13 aa, Artificial Sequence
  Synthetic
NFWGQGTQVTVSS

SEQ ID NO: 14264 - protein, 13 aa, Artificial Sequence
  Synthetic
NYWGQGTQVTVSS

SEQ ID NO: 14265 - protein, 13 aa, Artificial Sequence
  Synthetic
DYWGQGTQVTVSS

SEQ ID NO: 14266 - protein, 13 aa, Artificial Sequence
  Synthetic
TYWGQGTQVTVSS

SEQ ID NO: 14267 - protein, 13 aa, Artificial Sequence
  Synthetic
AYWGQGTQVTVSS

SEQ ID NO: 14268 - protein, 13 aa, Artificial Sequence
  Synthetic
EFWGQGTQVTVSS

SEQ ID NO: 14269 - protein, 13 aa, Artificial Sequence
  Synthetic
CLWGQGTQVTVSS

SEQ ID NO: 14270 - protein, 13 aa, Artificial Sequence
  Synthetic
GCRGQGTQVTVSL

SEQ ID NO: 14271 - protein, 13 aa, Artificial Sequence
  Synthetic
KYWGQGTQVTVSS

SEQ ID NO: 14272 - protein, 13 aa, Artificial Sequence
  Synthetic
DYWGQGTQVTVSS

SEQ ID NO: 14273 - protein, 13 aa, Artificial Sequence
  Synthetic
GQWGQGAQVTVSS

SEQ ID NO: 14274 - protein, 13 aa, Artificial Sequence
  Synthetic
NYWGQGIQVTASS

SEQ ID NO: 14275 - protein, 13 aa, Artificial Sequence
  Synthetic
KYWGQGTQVTVSS

SEQ ID NO: 14276 - protein, 13 aa, Artificial Sequence
  Synthetic
DDFGQGTQVTVSS

SEQ ID NO: 14277 - protein, 13 aa, Artificial Sequence
  Synthetic
NVWGQGTQVTVSS

SEQ ID NO: 14278 - protein, 13 aa, Artificial Sequence
  Synthetic
TRWGQGTQVTVSS

SEQ ID NO: 14279 - protein, 13 aa, Artificial Sequence
  Synthetic
AIWGQGTHVTVSS

SEQ ID NO: 14280 - protein, 13 aa, Artificial Sequence
  Synthetic
NYWGRGTQVTVSS

SEQ ID NO: 14281 - protein, 13 aa, Artificial Sequence
  Synthetic
DVWGQGTQVTVSS

SEQ ID NO: 14282 - protein, 13 aa, Artificial Sequence
  Synthetic
TCGGQGTQVTVSS

SEQ ID NO: 14283 - protein, 13 aa, Artificial Sequence
  Synthetic
NYWGQGTQVTVSS

SEQ ID NO: 14284 - protein, 13 aa, Artificial Sequence
  Synthetic
NYWGQGTQVTVSS

SEQ ID NO: 14285 - protein, 13 aa, Artificial Sequence
  Synthetic
NFWGQGTQVTVSS

SEQ ID NO: 14286 - protein, 13 aa, Artificial Sequence
  Synthetic
IPWGQGTQVTVSS

SEQ ID NO: 14287 - protein, 13 aa, Artificial Sequence
  Synthetic
FYWGQGTQVTVSS

SEQ ID NO: 14288 - protein, 13 aa, Artificial Sequence
  Synthetic
RYWGQGTQVTVSS

SEQ ID NO: 14289 - protein, 13 aa, Artificial Sequence
  Synthetic
HYRGQGTQVTVSS

SEQ ID NO: 14290 - protein, 13 aa, Artificial Sequence
  Synthetic
AFWGQGTQVTVSS

SEQ ID NO: 14291 - protein, 13 aa, Artificial Sequence
  Synthetic
KHWGQGTQVTVSS

SEQ ID NO: 14292 - protein, 13 aa, Artificial Sequence
  Synthetic
GHWGQGTQVTVSS

SEQ ID NO: 14293 - protein, 13 aa, Artificial Sequence
  Synthetic
NSWGQGTQVTVSS

SEQ ID NO: 14294 - protein, 13 aa, Artificial Sequence
  Synthetic
DYWGQGTQVTVSS

SEQ ID NO: 14295 - protein, 13 aa, Artificial Sequence
  Synthetic
NYWGQGTQVTVSS

SEQ ID NO: 14296 - protein, 13 aa, Artificial Sequence
  Synthetic
DSWGQGTQVTVSS

SEQ ID NO: 14297 - protein, 13 aa, Artificial Sequence
  Synthetic
RYWGQGTQVTVSS

SEQ ID NO: 14298 - protein, 13 aa, Artificial Sequence
  Synthetic
DYWGQGTQVTVSS

SEQ ID NO: 14299 - protein, 13 aa, Artificial Sequence
  Synthetic
GRWGQGTQVTVSS

SEQ ID NO: 14300 - protein, 13 aa, Artificial Sequence
  Synthetic
RYWGQGTLVTVSS

SEQ ID NO: 14301 - protein, 13 aa, Artificial Sequence
  Synthetic
DYWGKGTQVTVSS

SEQ ID NO: 14302 - protein, 13 aa, Artificial Sequence
  Synthetic
NAWGQGTQVTVSS

SEQ ID NO: 14303 - protein, 13 aa, Artificial Sequence
  Synthetic
MFWGQGTQVTVSS

SEQ ID NO: 14304 - protein, 13 aa, Artificial Sequence
  Synthetic
NYWGQGTQVTVSS

SEQ ID NO: 14305 - protein, 13 aa, Artificial Sequence
  Synthetic
RSWGQGTQVTVSS

SEQ ID NO: 14306 - protein, 13 aa, Artificial Sequence
  Synthetic
EYWGQGTQVTVSS

SEQ ID NO: 14307 - protein, 13 aa, Artificial Sequence
  Synthetic
GQWGQGTQVTVSS

SEQ ID NO: 14308 - protein, 13 aa, Artificial Sequence
  Synthetic
VYWGQGTQVTVSS

SEQ ID NO: 14309 - protein, 13 aa, Artificial Sequence
  Synthetic
GYWGQGTQVTVSS

SEQ ID NO: 14310 - protein, 13 aa, Artificial Sequence
  Synthetic
KDWGQGTQVTVSS

SEQ ID NO: 14311 - protein, 13 aa, Artificial Sequence
  Synthetic
AHWGQGTQVTVSS

SEQ ID NO: 14312 - protein, 13 aa, Artificial Sequence
  Synthetic
RYWGQGTQVTVSS

SEQ ID NO: 14313 - protein, 13 aa, Artificial Sequence
  Synthetic
TYWGQGTQVTVSS

SEQ ID NO: 14314 - protein, 13 aa, Artificial Sequence
  Synthetic
NYWGQGTQVTVSS

SEQ ID NO: 14315 - protein, 13 aa, Artificial Sequence
  Synthetic
DYYGQGTQVTVSS

SEQ ID NO: 14316 - protein, 13 aa, Artificial Sequence
  Synthetic
FERGQGTQVTVSS

SEQ ID NO: 14317 - protein, 13 aa, Artificial Sequence
  Synthetic
DWWGRGTQVFVSS

SEQ ID NO: 14318 - protein, 13 aa, Artificial Sequence
  Synthetic
NDWGQGTQVTVSS

SEQ ID NO: 14319 - protein, 13 aa, Artificial Sequence
  Synthetic
NGWGQGTQVTVSS

SEQ ID NO: 14320 - protein, 13 aa, Artificial Sequence
  Synthetic
RYWGQGTQVTVSS

SEQ ID NO: 14321 - protein, 13 aa, Artificial Sequence
  Synthetic
KYWGQGTQVTVSS

SEQ ID NO: 14322 - protein, 13 aa, Artificial Sequence
  Synthetic
THWGQGTQVTVSS

SEQ ID NO: 14323 - protein, 13 aa, Artificial Sequence
  Synthetic
AKWGQGTQVTVSS

SEQ ID NO: 14324 - protein, 13 aa, Artificial Sequence
  Synthetic
KYWGQGTQVTVSS

SEQ ID NO: 14325 - protein, 13 aa, Artificial Sequence
  Synthetic
KYWGQGTQVTVSS

SEQ ID NO: 14326 - protein, 13 aa, Artificial Sequence
  Synthetic
DYWGQGTQVTVSS

SEQ ID NO: 14327 - protein, 13 aa, Artificial Sequence
  Synthetic
KYWGHGTQVTVSS

SEQ ID NO: 14328 - protein, 13 aa, Artificial Sequence
  Synthetic
TYWGQGTQVTVSS

SEQ ID NO: 14329 - protein, 13 aa, Artificial Sequence
  Synthetic
THWGQGTQVTVSS

SEQ ID NO: 14330 - protein, 13 aa, Artificial Sequence
  Synthetic
NAWGQGTQVTVSS

SEQ ID NO: 14331 - protein, 13 aa, Artificial Sequence
  Synthetic
NYWGQGTQVTVSS

SEQ ID NO: 14332 - protein, 13 aa, Artificial Sequence
  Synthetic
RSRGQGTQVTVSS

SEQ ID NO: 14333 - protein, 13 aa, Artificial Sequence
  Synthetic
NYWGQGTRVTVSS

SEQ ID NO: 14334 - protein, 13 aa, Artificial Sequence
  Synthetic
GWWGQGTQVTVSS

SEQ ID NO: 14335 - protein, 13 aa, Artificial Sequence
  Synthetic
NYWGQGTQVTVSS

SEQ ID NO: 14336 - protein, 13 aa, Artificial Sequence
  Synthetic
NSWGQGTQVTVSS

SEQ ID NO: 14337 - protein, 13 aa, Artificial Sequence
  Synthetic
GYWGQGTQVTASS

SEQ ID NO: 14338 - protein, 13 aa, Artificial Sequence
  Synthetic
SQWGQGTQVTVSS

SEQ ID NO: 14339 - protein, 13 aa, Artificial Sequence
  Synthetic
DYWGQGTQVTVSS

SEQ ID NO: 14340 - protein, 13 aa, Artificial Sequence
  Synthetic
QYWGQGTQVTVSS

SEQ ID NO: 14341 - protein, 13 aa, Artificial Sequence
  Synthetic
DYWGKGTLVTISS

SEQ ID NO: 14342 - protein, 13 aa, Artificial Sequence
  Synthetic
RYWGQGTQVTVSS

SEQ ID NO: 14343 - protein, 13 aa, Artificial Sequence
  Synthetic
NYWGQGTQVTVSS

SEQ ID NO: 14344 - protein, 13 aa, Artificial Sequence
  Synthetic
SHWGPGTQVTVSS

SEQ ID NO: 14345 - protein, 13 aa, Artificial Sequence
  Synthetic
TTWGQGTQVTVSS

SEQ ID NO: 14346 - protein, 13 aa, Artificial Sequence
  Synthetic
NAWGQGTQVTVSS

SEQ ID NO: 14347 - protein, 13 aa, Artificial Sequence
  Synthetic
KTWGQGTQVTVSS

SEQ ID NO: 14348 - protein, 13 aa, Artificial Sequence
  Synthetic
KYWGQGTQVTVSS

SEQ ID NO: 14349 - protein, 13 aa, Artificial Sequence
  Synthetic
NGGGQGTQVTVSS

SEQ ID NO: 14350 - protein, 13 aa, Artificial Sequence
  Synthetic
NYWGQGTQVTVSS

SEQ ID NO: 14351 - protein, 13 aa, Artificial Sequence
  Synthetic
LSWGQGTQVTVSS

SEQ ID NO: 14352 - protein, 13 aa, Artificial Sequence
  Synthetic
PCGGQGTQVTVSS

SEQ ID NO: 14353 - protein, 13 aa, Artificial Sequence
  Synthetic
NYWDWGQGTQVTV

SEQ ID NO: 14354 - protein, 13 aa, Artificial Sequence
  Synthetic
SFWGQGTQVTVSS

SEQ ID NO: 14355 - protein, 13 aa, Artificial Sequence
  Synthetic
NTWGQGTQVTVSS

SEQ ID NO: 14356 - protein, 13 aa, Artificial Sequence
  Synthetic
ITFGQGTQVTVSS

SEQ ID NO: 14357 - protein, 13 aa, Artificial Sequence
  Synthetic
AHRGQGTQVTVTS

SEQ ID NO: 14358 - protein, 13 aa, Artificial Sequence
  Synthetic
NYWGQGTQVTVSS

SEQ ID NO: 14359 - protein, 13 aa, Artificial Sequence
  Synthetic
GYWGQGTQVTVSS

SEQ ID NO: 14360 - protein, 13 aa, Artificial Sequence
  Synthetic
AYWGQGTRVTASS

SEQ ID NO: 14361 - protein, 13 aa, Artificial Sequence
  Synthetic
AYWGQGTQVTVSS

SEQ ID NO: 14362 - protein, 13 aa, Artificial Sequence
  Synthetic
NFWGQGTQVTVSS

SEQ ID NO: 14363 - protein, 13 aa, Artificial Sequence
  Synthetic
MHWGQGTQVTVSS

SEQ ID NO: 14364 - protein, 13 aa, Artificial Sequence
  Synthetic
EFWHWGQGTQVTV

SEQ ID NO: 14365 - protein, 13 aa, Artificial Sequence
  Synthetic
NYWGQGTQVTVSS

SEQ ID NO: 14366 - protein, 13 aa, Artificial Sequence
  Synthetic
DWWGQGTPVTVSS

SEQ ID NO: 14367 - protein, 13 aa, Artificial Sequence
  Synthetic
NYRGQGTQVTVSS

SEQ ID NO: 14368 - protein, 13 aa, Artificial Sequence
  Synthetic
TDWGRGTQVTVSS

SEQ ID NO: 14369 - protein, 13 aa, Artificial Sequence
  Synthetic
LTWGSGLQVTVSS

SEQ ID NO: 14370 - protein, 13 aa, Artificial Sequence
  Synthetic
EFWGPGMQVTVFS

SEQ ID NO: 14371 - protein, 13 aa, Artificial Sequence
  Synthetic
DYWGQGTQVTVSS

SEQ ID NO: 14372 - protein, 13 aa, Artificial Sequence
  Synthetic
TYWGQGTQVTVSS

SEQ ID NO: 14373 - protein, 13 aa, Artificial Sequence
  Synthetic
TDWGQGAQDTVSS

SEQ ID NO: 14374 - protein, 13 aa, Artificial Sequence
  Synthetic
YNWGQGTQVTVSS

SEQ ID NO: 14375 - protein, 13 aa, Artificial Sequence
  Synthetic
AYWGQGTQVTVSS

SEQ ID NO: 14376 - protein, 13 aa, Artificial Sequence
  Synthetic
FYWGRGTQVTVSS

SEQ ID NO: 14377 - protein, 13 aa, Artificial Sequence
  Synthetic
GYWGQGTQVTVSS

SEQ ID NO: 14378 - protein, 13 aa, Artificial Sequence
  Synthetic
RFWGQGTQVTVSS

SEQ ID NO: 14379 - protein, 13 aa, Artificial Sequence
  Synthetic
DVWGQGTQVTVSS

SEQ ID NO: 14380 - protein, 13 aa, Artificial Sequence
  Synthetic
TYWGQGTRVTVSA

SEQ ID NO: 14381 - protein, 13 aa, Artificial Sequence
  Synthetic
GAWGQGTQVTVSS

SEQ ID NO: 14382 - protein, 13 aa, Artificial Sequence
  Synthetic
VHWGQGTQVTVSS

SEQ ID NO: 14383 - protein, 13 aa, Artificial Sequence
  Synthetic
NFWGQGTQVTVSS

SEQ ID NO: 14384 - protein, 13 aa, Artificial Sequence
  Synthetic
AYWGRGTQVTVSS

SEQ ID NO: 14385 - protein, 13 aa, Artificial Sequence
  Synthetic
NYWGQGTQVTVSS

SEQ ID NO: 14386 - protein, 13 aa, Artificial Sequence
  Synthetic
NYWGQGTQVTVSS

SEQ ID NO: 14387 - protein, 13 aa, Artificial Sequence
  Synthetic
GYWGQGTQVTVSS

SEQ ID NO: 14388 - protein, 13 aa, Artificial Sequence
  Synthetic
HYWGKGTLVTISS

SEQ ID NO: 14389 - protein, 13 aa, Artificial Sequence
  Synthetic
NYWGQGTQVTVSS

SEQ ID NO: 14390 - protein, 13 aa, Artificial Sequence
  Synthetic
RYWGQGTQVTVSS

SEQ ID NO: 14391 - protein, 13 aa, Artificial Sequence
  Synthetic
SNWGQGTQVTVSS

SEQ ID NO: 14392 - protein, 13 aa, Artificial Sequence
  Synthetic
HLWGQGTQVTVSS

SEQ ID NO: 14393 - protein, 13 aa, Artificial Sequence
  Synthetic
NIWGQGTQVTVSS

SEQ ID NO: 14394 - protein, 13 aa, Artificial Sequence
  Synthetic
EYSGQGTQVTVSS

SEQ ID NO: 14395 - protein, 13 aa, Artificial Sequence
  Synthetic
NYWGQGTQVTVSS

SEQ ID NO: 14396 - protein, 13 aa, Artificial Sequence
  Synthetic
TYWGQGTQVTVSS

SEQ ID NO: 14397 - protein, 13 aa, Artificial Sequence
  Synthetic
GDWGQGTQVTVSS

SEQ ID NO: 14398 - protein, 13 aa, Artificial Sequence
  Synthetic
MYWGQGTQVTVSS

SEQ ID NO: 14399 - protein, 13 aa, Artificial Sequence
  Synthetic
PYQGQGTQVTVSS

SEQ ID NO: 14400 - protein, 13 aa, Artificial Sequence
  Synthetic
VHWGQGTQVTVSS

SEQ ID NO: 14401 - protein, 13 aa, Artificial Sequence
  Synthetic
DNWGQGTQVTVSS

SEQ ID NO: 14402 - protein, 13 aa, Artificial Sequence
  Synthetic
NSWGQGTQVSVSS

SEQ ID NO: 14403 - protein, 13 aa, Artificial Sequence
  Synthetic
NFWGQGTQVTVSS

SEQ ID NO: 14404 - protein, 13 aa, Artificial Sequence
  Synthetic
DAWGQGTQVTVSS

SEQ ID NO: 14405 - protein, 13 aa, Artificial Sequence
  Synthetic
HNWGQGIQVTVSS

SEQ ID NO: 14406 - protein, 13 aa, Artificial Sequence
  Synthetic
EFWGQGTQVTVSS

SEQ ID NO: 14407 - protein, 13 aa, Artificial Sequence
  Synthetic
RNWGQGIQVTVSS

SEQ ID NO: 14408 - protein, 13 aa, Artificial Sequence
  Synthetic
TYWGQGTQVTVSS

SEQ ID NO: 14409 - protein, 13 aa, Artificial Sequence
  Synthetic
DAWGQGTQVAVSS

SEQ ID NO: 14410 - protein, 13 aa, Artificial Sequence
  Synthetic
SYWGLGTQVNVSS

SEQ ID NO: 14411 - protein, 13 aa, Artificial Sequence
  Synthetic
NSWGQGTQVTVSS

SEQ ID NO: 14412 - protein, 13 aa, Artificial Sequence
  Synthetic
HNWGQGIQVTVSS

SEQ ID NO: 14413 - protein, 13 aa, Artificial Sequence
  Synthetic
TYWGQGTQVTVSS

SEQ ID NO: 14414 - protein, 13 aa, Artificial Sequence
  Synthetic
EYWGQGTQVIVSS

SEQ ID NO: 14415 - protein, 13 aa, Artificial Sequence
  Synthetic
NTWGQGIQVTVSS

SEQ ID NO: 14416 - protein, 13 aa, Artificial Sequence
  Synthetic
DYWGQGTQVTVSS

SEQ ID NO: 14417 - protein, 13 aa, Artificial Sequence
  Synthetic
NYRGQGTQVTVSS

SEQ ID NO: 14418 - protein, 13 aa, Artificial Sequence
  Synthetic
SSWGQGTQVTVSS

SEQ ID NO: 14419 - protein, 13 aa, Artificial Sequence
  Synthetic
NYWGQGTQVTVSS

SEQ ID NO: 14420 - protein, 13 aa, Artificial Sequence
  Synthetic
DYWGQGTQVTVSS

SEQ ID NO: 14421 - protein, 13 aa, Artificial Sequence
  Synthetic
QHWGQGTQVTVSS

SEQ ID NO: 14422 - protein, 13 aa, Artificial Sequence
  Synthetic
NYWGQGTQVTVSS

SEQ ID NO: 14423 - protein, 13 aa, Artificial Sequence
  Synthetic
TYWGQGTQVTVSA

SEQ ID NO: 14424 - protein, 13 aa, Artificial Sequence
  Synthetic
NYWGQGTQVTVSS

SEQ ID NO: 14425 - protein, 13 aa, Artificial Sequence
  Synthetic
NYWGQGTQVTVSS

SEQ ID NO: 14426 - protein, 13 aa, Artificial Sequence
  Synthetic
NAWGQGTQVTVSS

SEQ ID NO: 14427 - protein, 13 aa, Artificial Sequence
  Synthetic
DHWGQGTQVTVSS

SEQ ID NO: 14428 - protein, 13 aa, Artificial Sequence
  Synthetic
GYWGQGTQVTVSL

SEQ ID NO: 14429 - protein, 13 aa, Artificial Sequence
  Synthetic
DNWTKGTLVTISS

SEQ ID NO: 14430 - protein, 13 aa, Artificial Sequence
  Synthetic
SFWGQGTQVTVAS

SEQ ID NO: 14431 - protein, 13 aa, Artificial Sequence
  Synthetic
NYWGQGTQVTVSS

SEQ ID NO: 14432 - protein, 13 aa, Artificial Sequence
  Synthetic
DYWGAGTQVTVSS

SEQ ID NO: 14433 - protein, 13 aa, Artificial Sequence
  Synthetic
SYWGQGTQVTVSS

SEQ ID NO: 14434 - protein, 13 aa, Artificial Sequence
  Synthetic
GSWGQGIQVTVSS

SEQ ID NO: 14435 - protein, 13 aa, Artificial Sequence
  Synthetic
LYWGQGTQVTVSS

SEQ ID NO: 14436 - protein, 13 aa, Artificial Sequence
  Synthetic
DQWGQGTQVTVSS

SEQ ID NO: 14437 - protein, 13 aa, Artificial Sequence
  Synthetic
DYWGQGTQVTVSS

SEQ ID NO: 14438 - protein, 13 aa, Artificial Sequence
  Synthetic
GYWGQGTQVTVSS

SEQ ID NO: 14439 - protein, 13 aa, Artificial Sequence
  Synthetic
PYWGQGAQVTVSS

SEQ ID NO: 14440 - protein, 13 aa, Artificial Sequence
  Synthetic
DYWGQGTQVTVSS

SEQ ID NO: 14441 - protein, 13 aa, Artificial Sequence
  Synthetic
DYWGPGTQVTVSS

SEQ ID NO: 14442 - protein, 13 aa, Artificial Sequence
  Synthetic
KYWGQGTQVTVSS

SEQ ID NO: 14443 - protein, 13 aa, Artificial Sequence
  Synthetic
NYWGQGTQVTVSS

SEQ ID NO: 14444 - protein, 6 aa, Artificial Sequence
  Synthetic
HYWGQG

SEQ ID NO: 14445 - protein, 6 aa, Artificial Sequence
  Synthetic
PVWGQG

SEQ ID NO: 14446 - protein, 6 aa, Artificial Sequence
  Synthetic
DYWGQG

SEQ ID NO: 14447 - protein, 6 aa, Artificial Sequence
  Synthetic
AFWGQG

SEQ ID NO: 14448 - protein, 6 aa, Artificial Sequence
  Synthetic
ASWGQG

SEQ ID NO: 14449 - protein, 6 aa, Artificial Sequence
  Synthetic
GSWGQG

SEQ ID NO: 14450 - protein, 6 aa, Artificial Sequence
  Synthetic
DYWGQG

SEQ ID NO: 14451 - protein, 13 aa, Artificial Sequence
  Synthetic
TVWGQGTQVTVSS

SEQ ID NO: 14452 - protein, 13 aa, Artificial Sequence
  Synthetic
TYWGQGTQVTVSS

SEQ ID NO: 14453 - protein, 13 aa, Artificial Sequence
  Synthetic
EYWGQGTQVTVSS

SEQ ID NO: 14454 - protein, 13 aa, Artificial Sequence
  Synthetic
EYWGQGTQVTVSS

SEQ ID NO: 14455 - protein, 13 aa, Artificial Sequence
  Synthetic
RNWGQGTQVTVSS

SEQ ID NO: 14456 - protein, 13 aa, Artificial Sequence
  Synthetic
RSWGQGTQVTVSS

SEQ ID NO: 14457 - protein, 13 aa, Artificial Sequence
  Synthetic
RSWGQGTQVTVSS

SEQ ID NO: 14458 - protein, 13 aa, Artificial Sequence
  Synthetic
RTWGQGTQVTVTS

SEQ ID NO: 14459 - protein, 13 aa, Artificial Sequence
  Synthetic
YHWGQGTQVTVSS

SEQ ID NO: 14460 - protein, 13 aa, Artificial Sequence
  Synthetic
DYWGQGTQVTVSS

SEQ ID NO: 14461 - protein, 13 aa, Artificial Sequence
  Synthetic
DYDGWGQGTQVTV

SEQ ID NO: 14462 - protein, 13 aa, Artificial Sequence
  Synthetic
KEWGQGTQVTVSS

SEQ ID NO: 14463 - protein, 13 aa, Artificial Sequence
  Synthetic
NSWGQGTQVTVSS

SEQ ID NO: 14464 - protein, 13 aa, Artificial Sequence
  Synthetic
NSWGQGTQVTVSS

SEQ ID NO: 14465 - protein, 13 aa, Artificial Sequence
  Synthetic
LYWGQGTQVTVSS

SEQ ID NO: 14466 - protein, 13 aa, Artificial Sequence
  Synthetic
PYWGQGTQVTVSS

SEQ ID NO: 14467 - protein, 13 aa, Artificial Sequence
  Synthetic
DYWGQGTLVTVSS

SEQ ID NO: 14468 - protein, 13 aa, Artificial Sequence
  Synthetic
RSWGQGTLVTVSS

SEQ ID NO: 14469 - protein, 13 aa, Artificial Sequence
  Synthetic
DYWGQGTLVTVSS

SEQ ID NO: 14470 - protein, 13 aa, Artificial Sequence
  Synthetic
DYWGQGTQVTVSS

SEQ ID NO: 14471 - protein, 13 aa, Artificial Sequence
  Synthetic
HFWGPGTLVTVSS

SEQ ID NO: 14472 - protein, 13 aa, Artificial Sequence
  Synthetic
DYWGQGTQVTVSS

SEQ ID NO: 14473 - protein, 6 aa, Artificial Sequence
  Synthetic
DYWGPG

SEQ ID NO: 14474 - protein, 13 aa, Artificial Sequence
  Synthetic
DYWGQGTQVTVSS

SEQ ID NO: 14475 - protein, 13 aa, Artificial Sequence
  Synthetic
DYWGQGTQVTVSS

SEQ ID NO: 14476 - protein, 13 aa, Artificial Sequence
  Synthetic
DYWGQGTQVTVSS

SEQ ID NO: 14477 - protein, 12 aa, Artificial Sequence
  Synthetic
EYWGQVTVTVSS

SEQ ID NO: 14478 - protein, 12 aa, Artificial Sequence
  Synthetic
NYWGQVTVTVSS

SEQ ID NO: 14479 - protein, 13 aa, Artificial Sequence
  Synthetic
SYWGQGTQVTVTV

SEQ ID NO: 14480 - protein, 13 aa, Artificial Sequence
  Synthetic
DYWGQGTQVTVTV

SEQ ID NO: 14481 - protein, 13 aa, Artificial Sequence
  Synthetic
HYWGQGTQVTVTV

SEQ ID NO: 14482 - protein, 13 aa, Artificial Sequence
  Synthetic
HYWGQGTQVTVTV

SEQ ID NO: 14483 - protein, 13 aa, Artificial Sequence
  Synthetic
GSWGQGTQVTVTV

SEQ ID NO: 14484 - protein, 13 aa, Artificial Sequence
  Synthetic
DYWGQGTQVTVTV

SEQ ID NO: 14485 - protein, 13 aa, Artificial Sequence
  Synthetic
QHWGQGTQVTVTV

SEQ ID NO: 14486 - protein, 13 aa, Artificial Sequence
  Synthetic
EHWGKGTQVTVSS

SEQ ID NO: 14487 - protein, 13 aa, Artificial Sequence
  Synthetic
DHWGKGTQVTVSS

SEQ ID NO: 14488 - protein, 13 aa, Artificial Sequence
  Synthetic
DYWGQGTQVTVSS

SEQ ID NO: 14489 - protein, 13 aa, Artificial Sequence
  Synthetic
DYWGQGTQVTVSS

SEQ ID NO: 14490 - protein, 13 aa, Artificial Sequence
  Synthetic
DHWGQGTQVTVSS

SEQ ID NO: 14491 - protein, 13 aa, Artificial Sequence
  Synthetic
PYWGQGTQVTVSS

SEQ ID NO: 14492 - protein, 13 aa, Artificial Sequence
  Synthetic
GFWGQGTQVTVSS

SEQ ID NO: 14493 - protein, 13 aa, Artificial Sequence
  Synthetic
QHWGQGTQVTVTV

SEQ ID NO: 14494 - protein, 13 aa, Artificial Sequence
  Synthetic
DRYQHWGQVTVTV

SEQ ID NO: 14495 - protein, 13 aa, Artificial Sequence
  Synthetic
QHWGQGTQVTVTV

SEQ ID NO: 14496 - protein, 13 aa, Artificial Sequence
  Synthetic
QYWGQGTQVTVSS

SEQ ID NO: 14497 - protein, 13 aa, Artificial Sequence
  Synthetic
GSWGQGTQVTVSS

SEQ ID NO: 14498 - protein, 13 aa, Artificial Sequence
  Synthetic
DYWGQGTQVTVSS

SEQ ID NO: 14499 - protein, 13 aa, Artificial Sequence
  Synthetic
REWGQGTQVTVSS

SEQ ID NO: 14500 - protein, 13 aa, Artificial Sequence
  Synthetic
DYWGQGTQVTVSS

SEQ ID NO: 14501 - protein, 13 aa, Artificial Sequence
  Synthetic
SYWGQGTQVTVSS

SEQ ID NO: 14502 - protein, 13 aa, Artificial Sequence
  Synthetic
GSWGQGTQVTVSS

SEQ ID NO: 14503 - protein, 13 aa, Artificial Sequence
  Synthetic
VIWGQGTQVTVSS

SEQ ID NO: 14504 - protein, 13 aa, Artificial Sequence
  Synthetic
VHWGQGTQVTVSS

SEQ ID NO: 14505 - protein, 13 aa, Artificial Sequence
  Synthetic
DYWGQGTQVTVSS

SEQ ID NO: 14506 - protein, 13 aa, Artificial Sequence
  Synthetic
DNWGQGTQVTVSS

SEQ ID NO: 14507 - protein, 13 aa, Artificial Sequence
  Synthetic
GFFGQGTQVTVSS

SEQ ID NO: 14508 - protein, 13 aa, Artificial Sequence
  Synthetic
HFWGQGTQVTVSS

SEQ ID NO: 14509 - protein, 13 aa, Artificial Sequence
  Synthetic
EYWGQGTQVTVSS

SEQ ID NO: 14510 - protein, 13 aa, Artificial Sequence
  Synthetic
HYWGQGTLVTVSS

SEQ ID NO: 14511 - protein, 13 aa, Artificial Sequence
  Synthetic
DYWGQGTQVTVSS

SEQ ID NO: 14512 - protein, 13 aa, Artificial Sequence
  Synthetic
PYWGQGTQVTVSS

SEQ ID NO: 14513 - protein, 13 aa, Artificial Sequence
  Synthetic
DYWGQGTQVTVSS

SEQ ID NO: 14514 - protein, 13 aa, Artificial Sequence
  Synthetic
DYWGQGTLVTVSS

SEQ ID NO: 14515 - protein, 13 aa, Artificial Sequence
  Synthetic
DYWGQGTQVTVSS

SEQ ID NO: 14516 - protein, 13 aa, Artificial Sequence
  Synthetic
DYWGQGTLVTVSS

SEQ ID NO: 14517 - protein, 13 aa, Artificial Sequence
  Synthetic
DYWGQGTQVTVSS

SEQ ID NO: 14518 - protein, 13 aa, Artificial Sequence
  Synthetic
KDWGQGTLVTVSS

SEQ ID NO: 14519 - protein, 13 aa, Artificial Sequence
  Synthetic
PYWGQGTQVTVSS

SEQ ID NO: 14520 - protein, 13 aa, Artificial Sequence
  Synthetic
GYWGQGTQVTVSS

SEQ ID NO: 14521 - protein, 13 aa, Artificial Sequence
  Synthetic
DYWGQGTQVTVSS

SEQ ID NO: 14522 - protein, 13 aa, Artificial Sequence
  Synthetic
DYWGQGTQVTVSS

SEQ ID NO: 14523 - protein, 13 aa, Artificial Sequence
  Synthetic
GYWGQGTQVTVSS

SEQ ID NO: 14524 - protein, 13 aa, Artificial Sequence
  Synthetic
DYWGQGTQVTVSS

SEQ ID NO: 14525 - protein, 13 aa, Artificial Sequence
  Synthetic
VYWGQGTQVTVSS

SEQ ID NO: 14526 - protein, 13 aa, Artificial Sequence
  Synthetic
NYRGPGTLVTVSS

SEQ ID NO: 14527 - protein, 13 aa, Artificial Sequence
  Synthetic
DYWGQGTQVTVSS

SEQ ID NO: 14528 - protein, 13 aa, Artificial Sequence
  Synthetic
DYWGQGTQVTVSS

SEQ ID NO: 14529 - protein, 13 aa, Artificial Sequence
  Synthetic
NVWGQGTQVTVSS

SEQ ID NO: 14530 - protein, 13 aa, Artificial Sequence
  Synthetic
TYWGQGTQVTVSS

SEQ ID NO: 14531 - protein, 13 aa, Artificial Sequence
  Synthetic
DYWGQGTQVTVSS

SEQ ID NO: 14532 - protein, 13 aa, Artificial Sequence
  Synthetic
STWGQGTQVTVSS

SEQ ID NO: 14533 - protein, 13 aa, Artificial Sequence
  Synthetic
VTWGQGTLVTVSS

SEQ ID NO: 14534 - protein, 13 aa, Artificial Sequence
  Synthetic
GDWGQGTLVTVSS

SEQ ID NO: 14535 - protein, 13 aa, Artificial Sequence
  Synthetic
DYWGQGTLVTVSS

SEQ ID NO: 14536 - protein, 13 aa, Artificial Sequence
  Synthetic
DYWGQGTLVTVSS

SEQ ID NO: 14537 - protein, 13 aa, Artificial Sequence
  Synthetic
DYWGQGTLVTVSS

SEQ ID NO: 14538 - protein, 13 aa, Artificial Sequence
  Synthetic
RYWGQGTLVTVSS

SEQ ID NO: 14539 - protein, 13 aa, Artificial Sequence
  Synthetic
DYWGQGTLVTVSS

SEQ ID NO: 14540 - protein, 13 aa, Artificial Sequence
  Synthetic
NYWGQGTLVTVSS

SEQ ID NO: 14541 - protein, 13 aa, Artificial Sequence
  Synthetic
DYWGQGTLVTVSS

SEQ ID NO: 14542 - protein, 13 aa, Artificial Sequence
  Synthetic
DFWGQGTLVTVSS

SEQ ID NO: 14543 - protein, 13 aa, Artificial Sequence
  Synthetic
EYWGQGTLVTVSS

SEQ ID NO: 14544 - protein, 13 aa, Artificial Sequence
  Synthetic
DYWGQGTLVTVSS

SEQ ID NO: 14545 - protein, 13 aa, Artificial Sequence
  Synthetic
TYWGEGTLVTVSS

SEQ ID NO: 14546 - protein, 13 aa, Artificial Sequence
  Synthetic
DYWGQGTLVTVSS

SEQ ID NO: 14547 - protein, 13 aa, Artificial Sequence
  Synthetic
DYWGQGTLVTVSS

SEQ ID NO: 14548 - protein, 13 aa, Artificial Sequence
  Synthetic
ASWGQGTLVTVSS

SEQ ID NO: 14549 - protein, 13 aa, Artificial Sequence
  Synthetic
GRRGPGTQVTVSS

SEQ ID NO: 14550 - protein, 13 aa, Artificial Sequence
  Synthetic
DYWGQGTQVTVSS

SEQ ID NO: 14551 - protein, 13 aa, Artificial Sequence
  Synthetic
NYYGQGTQVTVSS

SEQ ID NO: 14552 - protein, 13 aa, Artificial Sequence
  Synthetic
PHWGQGTQVTVSS

SEQ ID NO: 14553 - protein, 13 aa, Artificial Sequence
  Synthetic
EYWGQGTQVTVSS

SEQ ID NO: 14554 - protein, 13 aa, Artificial Sequence
  Synthetic
TYWGQGTQVTISA

SEQ ID NO: 14555 - protein, 13 aa, Artificial Sequence
  Synthetic
IYWGQGTQVTVSS

SEQ ID NO: 14556 - protein, 13 aa, Artificial Sequence
  Synthetic
VYWGQGTAVTVSS

SEQ ID NO: 14557 - protein, 13 aa, Artificial Sequence
  Synthetic
VYWGQGTQVTVSS

SEQ ID NO: 14558 - protein, 13 aa, Artificial Sequence
  Synthetic
RYWGQGTQVTVSS

SEQ ID NO: 14559 - protein, 13 aa, Artificial Sequence
  Synthetic
NYWGQGTQVTVSS

SEQ ID NO: 14560 - protein, 10 aa, Artificial Sequence
  Synthetic
DYWGQGTQVT

SEQ ID NO: 14561 - protein, 10 aa, Artificial Sequence
  Synthetic
DYWGQGTQVT

SEQ ID NO: 14562 - protein, 10 aa, Artificial Sequence
  Synthetic
DYWGQGTQVT

SEQ ID NO: 14563 - protein, 10 aa, Artificial Sequence
  Synthetic
GSWGQGTQVT

SEQ ID NO: 14564 - protein, 10 aa, Artificial Sequence
  Synthetic
DYWGQGTQVT

SEQ ID NO: 14565 - protein, 10 aa, Artificial Sequence
  Synthetic
DYWGQGTQVT

SEQ ID NO: 14566 - protein, 10 aa, Artificial Sequence
  Synthetic
DYWGQGTRVT

SEQ ID NO: 14567 - protein, 10 aa, Artificial Sequence
  Synthetic
DYWGQGTQVT

SEQ ID NO: 14568 - protein, 10 aa, Artificial Sequence
  Synthetic
EYWGQGTQVT

SEQ ID NO: 14569 - protein, 10 aa, Artificial Sequence
  Synthetic
DYWGQGTQVT

SEQ ID NO: 14570 - protein, 10 aa, Artificial Sequence
  Synthetic
DYWGQGTQVT

SEQ ID NO: 14571 - protein, 10 aa, Artificial Sequence
  Synthetic
DYWGQGTQVT

SEQ ID NO: 14572 - protein, 10 aa, Artificial Sequence
  Synthetic
GTWGQGTQVT

SEQ ID NO: 14573 - protein, 10 aa, Artificial Sequence
  Synthetic
GSWGQGTQVT

SEQ ID NO: 14574 - protein, 10 aa, Artificial Sequence
  Synthetic
DDWGRGTQVT

SEQ ID NO: 14575 - protein, 10 aa, Artificial Sequence
  Synthetic
YYWGQGTQVT

SEQ ID NO: 14576 - protein, 10 aa, Artificial Sequence
  Synthetic
RYWGQGTQVT

SEQ ID NO: 14577 - protein, 10 aa, Artificial Sequence
  Synthetic
DYWGQGTQVT

SEQ ID NO: 14578 - protein, 10 aa, Artificial Sequence
  Synthetic
EYWGQGTQVT

SEQ ID NO: 14579 - protein, 10 aa, Artificial Sequence
  Synthetic
DYWGQGTQVT

SEQ ID NO: 14580 - protein, 10 aa, Artificial Sequence
  Synthetic
DYWGQGTQVT

SEQ ID NO: 14581 - protein, 10 aa, Artificial Sequence
  Synthetic
DYWGQGTQVT

SEQ ID NO: 14582 - protein, 10 aa, Artificial Sequence
  Synthetic
DYWGQGTQVT

SEQ ID NO: 14583 - protein, 10 aa, Artificial Sequence
  Synthetic
DYWGQGTQVT

SEQ ID NO: 14584 - protein, 10 aa, Artificial Sequence
  Synthetic
EYWGQGTQVT

SEQ ID NO: 14585 - protein, 10 aa, Artificial Sequence
  Synthetic
DYWGQGTQVT

SEQ ID NO: 14586 - protein, 10 aa, Artificial Sequence
  Synthetic
DFWGQGTQVT

SEQ ID NO: 14587 - protein, 10 aa, Artificial Sequence
  Synthetic
NYWGHGTQVT

SEQ ID NO: 14588 - protein, 10 aa, Artificial Sequence
  Synthetic
DDWGQGTQVT

SEQ ID NO: 14589 - protein, 10 aa, Artificial Sequence
  Synthetic
DYWGQGTQVT

SEQ ID NO: 14590 - protein, 10 aa, Artificial Sequence
  Synthetic
DYWGQGTQVT

SEQ ID NO: 14591 - protein, 10 aa, Artificial Sequence
  Synthetic
NYCGQGTQVT

SEQ ID NO: 14592 - protein, 10 aa, Artificial Sequence
  Synthetic
DSWGQGTQVT

SEQ ID NO: 14593 - protein, 10 aa, Artificial Sequence
  Synthetic
NYWGQGTQVT

SEQ ID NO: 14594 - protein, 10 aa, Artificial Sequence
  Synthetic
DYWGQGTQVT

SEQ ID NO: 14595 - protein, 10 aa, Artificial Sequence
  Synthetic
DSWGQGTQVT

SEQ ID NO: 14596 - protein, 10 aa, Artificial Sequence
  Synthetic
KYWGQGTQVT

SEQ ID NO: 14597 - protein, 10 aa, Artificial Sequence
  Synthetic
KWWGQGTQVT

SEQ ID NO: 14598 - protein, 13 aa, Artificial Sequence
  Synthetic
GIWGQGTQVTVSS

SEQ ID NO: 14599 - protein, 13 aa, Artificial Sequence
  Synthetic
GIWGQGTQVTVSS

SEQ ID NO: 14600 - protein, 10 aa, Artificial Sequence
  Synthetic
RYWGQGTQVT

SEQ ID NO: 14601 - protein, 10 aa, Artificial Sequence
  Synthetic
RYWGQGTQVT

SEQ ID NO: 14602 - protein, 10 aa, Artificial Sequence
  Synthetic
RYWGQGTQVT

SEQ ID NO: 14603 - protein, 10 aa, Artificial Sequence
  Synthetic
RYWGQGTQVT

SEQ ID NO: 14604 - protein, 10 aa, Artificial Sequence
  Synthetic
SYWGQGTQVT

SEQ ID NO: 14605 - protein, 10 aa, Artificial Sequence
  Synthetic
RYWGQGTQVT

SEQ ID NO: 14606 - protein, 10 aa, Artificial Sequence
  Synthetic
RYWGQGTQVT

SEQ ID NO: 14607 - protein, 10 aa, Artificial Sequence
  Synthetic
TYWGQGTQVT

SEQ ID NO: 14608 - protein, 10 aa, Artificial Sequence
  Synthetic
GSWGQGTQVT

SEQ ID NO: 14609 - protein, 10 aa, Artificial Sequence
  Synthetic
AYWGQGTQVT

SEQ ID NO: 14610 - protein, 10 aa, Artificial Sequence
  Synthetic
VHWGQGTQVT

SEQ ID NO: 14611 - protein, 10 aa, Artificial Sequence
  Synthetic
DYWGQGTQVT

SEQ ID NO: 14612 - protein, 10 aa, Artificial Sequence
  Synthetic
TYWGQGTQVT

SEQ ID NO: 14613 - protein, 10 aa, Artificial Sequence
  Synthetic
DYWGQGTLVT

SEQ ID NO: 14614 - protein, 10 aa, Artificial Sequence
  Synthetic
DDWGQGTRVT

SEQ ID NO: 14615 - protein, 10 aa, Artificial Sequence
  Synthetic
EYWGQGTQVT

SEQ ID NO: 14616 - protein, 10 aa, Artificial Sequence
  Synthetic
DYWGQGTQVT

SEQ ID NO: 14617 - protein, 10 aa, Artificial Sequence
  Synthetic
DYWGQGTQVT

SEQ ID NO: 14618 - protein, 10 aa, Artificial Sequence
  Synthetic
EYWGQGTQVT

SEQ ID NO: 14619 - protein, 10 aa, Artificial Sequence
  Synthetic
DYWGQGTLVT

SEQ ID NO: 14620 - protein, 10 aa, Artificial Sequence
  Synthetic
HYWGQGTQVT

SEQ ID NO: 14621 - protein, 10 aa, Artificial Sequence
  Synthetic
RYWGQGTQVT

SEQ ID NO: 14622 - protein, 10 aa, Artificial Sequence
  Synthetic
DYWGQGTQVT

SEQ ID NO: 14623 - protein, 10 aa, Artificial Sequence
  Synthetic
NYWGQGTQVT

SEQ ID NO: 14624 - protein, 10 aa, Artificial Sequence
  Synthetic
RSWGQGTQVT

SEQ ID NO: 14625 - protein, 10 aa, Artificial Sequence
  Synthetic
NYWGQGTQVT

SEQ ID NO: 14626 - protein, 10 aa, Artificial Sequence
  Synthetic
NYWGQGTQVT

SEQ ID NO: 14627 - protein, 7 aa, Artificial Sequence
  Synthetic
RYWGQGT

SEQ ID NO: 14628 - protein, 10 aa, Artificial Sequence
  Synthetic
PYWGQGTQVT

SEQ ID NO: 14629 - protein, 10 aa, Artificial Sequence
  Synthetic
GYWGQGTQVT

SEQ ID NO: 14630 - protein, 13 aa, Artificial Sequence
  Synthetic
DYWGQGTQVTVSS

SEQ ID NO: 14631 - protein, 13 aa, Artificial Sequence
  Synthetic
DYWGQGTQVTVSS

SEQ ID NO: 14632 - protein, 13 aa, Artificial Sequence
  Synthetic
DYWGQGTQVTVSS

SEQ ID NO: 14633 - protein, 13 aa, Artificial Sequence
  Synthetic
RYWGQGTQVTVSS

SEQ ID NO: 14634 - protein, 13 aa, Artificial Sequence
  Synthetic
YYWGQGSQVTVSS

SEQ ID NO: 14635 - protein, 13 aa, Artificial Sequence
  Synthetic
VYWGQGTQVTVSS

SEQ ID NO: 14636 - protein, 13 aa, Artificial Sequence
  Synthetic
DYWGQGTQVTVSS

SEQ ID NO: 14637 - protein, 9 aa, Artificial Sequence
  Synthetic
TYWGRGTQV

SEQ ID NO: 14638 - protein, 13 aa, Artificial Sequence
  Synthetic
DYWGQGTQVTVSS

SEQ ID NO: 14639 - protein, 13 aa, Artificial Sequence
  Synthetic
DYWGQGTQVTVSS

SEQ ID NO: 14640 - protein, 13 aa, Artificial Sequence
  Synthetic
ELWGQGTQVTVSS

SEQ ID NO: 14641 - protein, 13 aa, Artificial Sequence
  Synthetic
RYWGQGTQVTVSS

SEQ ID NO: 14642 - protein, 13 aa, Artificial Sequence
  Synthetic
EYWGQGTQVTVSS

SEQ ID NO: 14643 - protein, 13 aa, Artificial Sequence
  Synthetic
DYWGQGTQVTVSS

SEQ ID NO: 14644 - protein, 13 aa, Artificial Sequence
  Synthetic
NYWGQGTQVTVSS

SEQ ID NO: 14645 - protein, 13 aa, Artificial Sequence
  Synthetic
DYWGQGTQVTVSA

SEQ ID NO: 14646 - protein, 13 aa, Artificial Sequence
  Synthetic
HYWGQGTQVTVSS

SEQ ID NO: 14647 - protein, 13 aa, Artificial Sequence
  Synthetic
DYWGQGTQVTVSS

SEQ ID NO: 14648 - protein, 13 aa, Artificial Sequence
  Synthetic
HYWGQGTQVTVSS

SEQ ID NO: 14649 - protein, 13 aa, Artificial Sequence
  Synthetic
GNWGQGAQVTVIS

SEQ ID NO: 14650 - protein, 13 aa, Artificial Sequence
  Synthetic
AYWGRGTQVTVSS

SEQ ID NO: 14651 - protein, 13 aa, Artificial Sequence
  Synthetic
EVWGQGIEVTVSS

SEQ ID NO: 14652 - protein, 13 aa, Artificial Sequence
  Synthetic
NYWGQGTQVTVSS

SEQ ID NO: 14653 - protein, 13 aa, Artificial Sequence
  Synthetic
DYRGQGTQVTVSS

SEQ ID NO: 14654 - protein, 13 aa, Artificial Sequence
  Synthetic
EYWGQGTQVTVSS

SEQ ID NO: 14655 - protein, 13 aa, Artificial Sequence
  Synthetic
GFWGQGTQVTVSS

SEQ ID NO: 14656 - protein, 13 aa, Artificial Sequence
  Synthetic
SHWGQGTWITVSS

SEQ ID NO: 14657 - protein, 13 aa, Artificial Sequence
  Synthetic
DAWGQGTTVTVSS

SEQ ID NO: 14658 - protein, 13 aa, Artificial Sequence
  Synthetic
SDWGQGTQVTVSS

SEQ ID NO: 14659 - protein, 13 aa, Artificial Sequence
  Synthetic
NYWGQGTQVTVSS

SEQ ID NO: 14660 - protein, 13 aa, Artificial Sequence
  Synthetic
SYWGQGTQVTVSS

SEQ ID NO: 14661 - protein, 13 aa, Artificial Sequence
  Synthetic
TYWGQGTRVTVSS

SEQ ID NO: 14662 - protein, 13 aa, Artificial Sequence
  Synthetic
TYWGQGTQVTVSS

SEQ ID NO: 14663 - protein, 13 aa, Artificial Sequence
  Synthetic
SHWGQGTQVTVSS

SEQ ID NO: 14664 - protein, 13 aa, Artificial Sequence
  Synthetic
THWGQGIQVPISS

SEQ ID NO: 14665 - protein, 13 aa, Artificial Sequence
  Synthetic
VSWGQGTPVTVSS

SEQ ID NO: 14666 - protein, 13 aa, Artificial Sequence
  Synthetic
GHWGQGTQVTVSS

SEQ ID NO: 14667 - protein, 13 aa, Artificial Sequence
  Synthetic
DFWGQGTQVTVSS

SEQ ID NO: 14668 - protein, 13 aa, Artificial Sequence
  Synthetic
PIWGQGTQVTVSS

SEQ ID NO: 14669 - protein, 13 aa, Artificial Sequence
  Synthetic
PIWGRGTQVTVSS

SEQ ID NO: 14670 - protein, 13 aa, Artificial Sequence
  Synthetic
PYWGQGTQVTVSS

SEQ ID NO: 14671 - protein, 13 aa, Artificial Sequence
  Synthetic
GYWGQGTQVTVSS

SEQ ID NO: 14672 - protein, 13 aa, Artificial Sequence
  Synthetic
DYWGQGTQVTVSS

SEQ ID NO: 14673 - protein, 13 aa, Artificial Sequence
  Synthetic
NYWGQGTQVTVSS

SEQ ID NO: 14674 - protein, 13 aa, Artificial Sequence
  Synthetic
VYWGKGALVTVSS

SEQ ID NO: 14675 - protein, 13 aa, Artificial Sequence
  Synthetic
NYWGQGTQVTVSS

SEQ ID NO: 14676 - protein, 13 aa, Artificial Sequence
  Synthetic
TIWGQGTQVTVSS

SEQ ID NO: 14677 - protein, 13 aa, Artificial Sequence
  Synthetic
DYWGQGTQVTVSS

SEQ ID NO: 14678 - protein, 13 aa, Artificial Sequence
  Synthetic
DYWGQGTTVTVSS

SEQ ID NO: 14679 - protein, 13 aa, Artificial Sequence
  Synthetic
VYWGQGTQVTVSS

SEQ ID NO: 14680 - protein, 13 aa, Artificial Sequence
  Synthetic
DYWGQGTQVTVSS

SEQ ID NO: 14681 - protein, 13 aa, Artificial Sequence
  Synthetic
HYWGQGTQVTVSS

SEQ ID NO: 14682 - protein, 12 aa, Artificial Sequence
  Synthetic
EFWGQGTQVTVS

SEQ ID NO: 14683 - protein, 13 aa, Artificial Sequence
  Synthetic
EYWGQGTQVTVSS

SEQ ID NO: 14684 - protein, 13 aa, Artificial Sequence
  Synthetic
DYWGQGTQVTVSS

SEQ ID NO: 14685 - protein, 13 aa, Artificial Sequence
  Synthetic
DYWGQGTQVTVSS

SEQ ID NO: 14686 - protein, 12 aa, Artificial Sequence
  Synthetic
DYWGQGTQVTVS

SEQ ID NO: 14687 - protein, 13 aa, Artificial Sequence
  Synthetic
KYWGQGTQVTVSS

SEQ ID NO: 14688 - protein, 13 aa, Artificial Sequence
  Synthetic
DTWGQGTQVTVSS

SEQ ID NO: 14689 - protein, 13 aa, Artificial Sequence
  Synthetic
DYWGQGTQVTVSS

SEQ ID NO: 14690 - protein, 13 aa, Artificial Sequence
  Synthetic
DYWGQGTQVTVSS

SEQ ID NO: 14691 - protein, 13 aa, Artificial Sequence
  Synthetic
DYWGQGTQVTVSS

SEQ ID NO: 14692 - protein, 13 aa, Artificial Sequence
  Synthetic
NYWGQGTQVTVSS

SEQ ID NO: 14693 - protein, 13 aa, Artificial Sequence
  Synthetic
DYRGQGTQVTVSS

SEQ ID NO: 14694 - protein, 13 aa, Artificial Sequence
  Synthetic
NTWGQGIQVTVSS

SEQ ID NO: 14695 - protein, 13 aa, Artificial Sequence
  Synthetic
GSWGQGTQVTVSS

SEQ ID NO: 14696 - protein, 13 aa, Artificial Sequence
  Synthetic
DYWGQGTQVTVSS

SEQ ID NO: 14697 - protein, 13 aa, Artificial Sequence
  Synthetic
DGWGQGTQVTVSS

SEQ ID NO: 14698 - protein, 13 aa, Artificial Sequence
  Synthetic
DYWGQGTQVTVSS

SEQ ID NO: 14699 - protein, 13 aa, Artificial Sequence
  Synthetic
NYWGQGTQVTVSS

SEQ ID NO: 14700 - protein, 13 aa, Artificial Sequence
  Synthetic
RYWGQGTQVTVSS

SEQ ID NO: 14701 - protein, 13 aa, Artificial Sequence
  Synthetic
DYWGQGTQVTVSS

SEQ ID NO: 14702 - protein, 13 aa, Artificial Sequence
  Synthetic
TRWGRGTQVTVSS

SEQ ID NO: 14703 - protein, 13 aa, Artificial Sequence
  Synthetic
DYWGQGTQVTVSS

SEQ ID NO: 14704 - protein, 13 aa, Artificial Sequence
  Synthetic
DYWGRGTQVTVSS

SEQ ID NO: 14705 - protein, 13 aa, Artificial Sequence
  Synthetic
DYWGQGTQVTVSS

SEQ ID NO: 14706 - protein, 13 aa, Artificial Sequence
  Synthetic
DFWGQGTQVTVSS

SEQ ID NO: 14707 - protein, 13 aa, Artificial Sequence
  Synthetic
AYWGQGAQVTVSS

SEQ ID NO: 14708 - protein, 13 aa, Artificial Sequence
  Synthetic
NYWGQGTQVTVSS

SEQ ID NO: 14709 - protein, 13 aa, Artificial Sequence
  Synthetic
DYWGQGTQVTVSS

SEQ ID NO: 14710 - protein, 13 aa, Artificial Sequence
  Synthetic
NYWGPGTQVTVSS

SEQ ID NO: 14711 - protein, 13 aa, Artificial Sequence
  Synthetic
DYWGQGTQVTVSS

SEQ ID NO: 14712 - protein, 13 aa, Artificial Sequence
  Synthetic
EYWGEGTQVTVSS

SEQ ID NO: 14713 - protein, 13 aa, Artificial Sequence
  Synthetic
NYWGQGTQVTVSS

SEQ ID NO: 14714 - protein, 13 aa, Artificial Sequence
  Synthetic
DYWGQGTQVTVSS

SEQ ID NO: 14715 - protein, 13 aa, Artificial Sequence
  Synthetic
NYWGQGTQVTVSS

SEQ ID NO: 14716 - protein, 13 aa, Artificial Sequence
  Synthetic
GYWGRGTQVTVSS

SEQ ID NO: 14717 - protein, 13 aa, Artificial Sequence
  Synthetic
DYWGKGTQVTVSS

SEQ ID NO: 14718 - protein, 13 aa, Artificial Sequence
  Synthetic
GSWGQGTQVTVSS

SEQ ID NO: 14719 - protein, 13 aa, Artificial Sequence
  Synthetic
SYWGQGTQVTVSS

SEQ ID NO: 14720 - protein, 13 aa, Artificial Sequence
  Synthetic
DYWGKGTQVTVSS

SEQ ID NO: 14721 - protein, 13 aa, Artificial Sequence
  Synthetic
AFWGQGTQVTVSS

SEQ ID NO: 14722 - protein, 13 aa, Artificial Sequence
  Synthetic
TFWGQGTQVTVSS

SEQ ID NO: 14723 - protein, 13 aa, Artificial Sequence
  Synthetic
RYWGLGTQVTVSS

SEQ ID NO: 14724 - protein, 13 aa, Artificial Sequence
  Synthetic
GYWGQGTQVTVSS

SEQ ID NO: 14725 - protein, 13 aa, Artificial Sequence
  Synthetic
DYWGQGTQVTVSS

SEQ ID NO: 14726 - protein, 13 aa, Artificial Sequence
  Synthetic
DYWGQGTQVTVSS

SEQ ID NO: 14727 - protein, 13 aa, Artificial Sequence
  Synthetic
GYWGQGTQVTVSS

SEQ ID NO: 14728 - protein, 13 aa, Artificial Sequence
  Synthetic
DYWGKGTQVTVSS

SEQ ID NO: 14729 - protein, 13 aa, Artificial Sequence
  Synthetic
NFWGQGTQVTVSS

SEQ ID NO: 14730 - protein, 10 aa, Artificial Sequence
  Synthetic
NYWGQGTQVT

SEQ ID NO: 14731 - protein, 13 aa, Artificial Sequence
  Synthetic
DYWGQGTQVTVSS

SEQ ID NO: 14732 - protein, 13 aa, Artificial Sequence
  Synthetic
SYWGQGTQVTVSS

SEQ ID NO: 14733 - protein, 13 aa, Artificial Sequence
  Synthetic
AYWGQGTQVTVSS

SEQ ID NO: 14734 - protein, 13 aa, Artificial Sequence
  Synthetic
DYWGQGTQVTVSS

SEQ ID NO: 14735 - protein, 13 aa, Artificial Sequence
  Synthetic
TYWGKGTLVTVSS

SEQ ID NO: 14736 - protein, 13 aa, Artificial Sequence
  Synthetic
VYWGQGTQVTVSS

SEQ ID NO: 14737 - protein, 13 aa, Artificial Sequence
  Synthetic
SYWGQGTQVTVSS

SEQ ID NO: 14738 - protein, 13 aa, Artificial Sequence
  Synthetic
DYWGQGTQVTVSS

SEQ ID NO: 14739 - protein, 10 aa, Artificial Sequence
  Synthetic
SRWGQGTQVT

SEQ ID NO: 14740 - protein, 10 aa, Artificial Sequence
  Synthetic
NYWGQGTQVT

SEQ ID NO: 14741 - protein, 10 aa, Artificial Sequence
  Synthetic
DYWGQGTQVT

SEQ ID NO: 14742 - protein, 10 aa, Artificial Sequence
  Synthetic
DYWGQGTQVT

SEQ ID NO: 14743 - protein, 10 aa, Artificial Sequence
  Synthetic
FAWGQGTQVT

SEQ ID NO: 14744 - protein, 10 aa, Artificial Sequence
  Synthetic
DYWGQGTQVT

SEQ ID NO: 14745 - protein, 10 aa, Artificial Sequence
  Synthetic
DSWGQGTQVT

SEQ ID NO: 14746 - protein, 10 aa, Artificial Sequence
  Synthetic
GSWGQGTQVT

SEQ ID NO: 14747 - protein, 10 aa, Artificial Sequence
  Synthetic
DYWGQGTQVT

SEQ ID NO: 14748 - protein, 10 aa, Artificial Sequence
  Synthetic
NYWGQGTQVT

SEQ ID NO: 14749 - protein, 10 aa, Artificial Sequence
  Synthetic
DFWGQGTQVT

SEQ ID NO: 14750 - protein, 10 aa, Artificial Sequence
  Synthetic
TYWGQGTQVT

SEQ ID NO: 14751 - protein, 10 aa, Artificial Sequence
  Synthetic
NYWGQGTQVT

SEQ ID NO: 14752 - protein, 10 aa, Artificial Sequence
  Synthetic
RYWGQGTQVT

SEQ ID NO: 14753 - protein, 10 aa, Artificial Sequence
  Synthetic
VKVGQGTQVT

SEQ ID NO: 14754 - protein, 10 aa, Artificial Sequence
  Synthetic
NYWGKGTLVT

SEQ ID NO: 14755 - protein, 10 aa, Artificial Sequence
  Synthetic
RNWGQGTQVT

SEQ ID NO: 14756 - protein, 10 aa, Artificial Sequence
  Synthetic
VYWGQGTQVT

SEQ ID NO: 14757 - protein, 10 aa, Artificial Sequence
  Synthetic
DYWGQGTQVT

SEQ ID NO: 14758 - protein, 10 aa, Artificial Sequence
  Synthetic
EYRGKGTLVT

SEQ ID NO: 14759 - protein, 10 aa, Artificial Sequence
  Synthetic
DYWGQGTVVT

SEQ ID NO: 14760 - protein, 10 aa, Artificial Sequence
  Synthetic
DYWGQGTQVT

SEQ ID NO: 14761 - protein, 10 aa, Artificial Sequence
  Synthetic
EFWGQGTQVT

SEQ ID NO: 14762 - protein, 10 aa, Artificial Sequence
  Synthetic
RYWGVGTQVT

SEQ ID NO: 14763 - protein, 10 aa, Artificial Sequence
  Synthetic
ELWGQGTQVT

SEQ ID NO: 14764 - protein, 10 aa, Artificial Sequence
  Synthetic
DLWGQGTPVT

SEQ ID NO: 14765 - protein, 10 aa, Artificial Sequence
  Synthetic
NYWGRGTQVT

SEQ ID NO: 14766 - protein, 10 aa, Artificial Sequence
  Synthetic
DYWGQGTQVT

SEQ ID NO: 14767 - protein, 10 aa, Artificial Sequence
  Synthetic
DFWGRGTQVT

SEQ ID NO: 14768 - protein, 10 aa, Artificial Sequence
  Synthetic
DYWGQGTQVT

SEQ ID NO: 14769 - protein, 10 aa, Artificial Sequence
  Synthetic
DYWGQGTQVT

SEQ ID NO: 14770 - protein, 10 aa, Artificial Sequence
  Synthetic
AYWGQGTQVT

SEQ ID NO: 14771 - protein, 10 aa, Artificial Sequence
  Synthetic
DYWGQGTQVT

SEQ ID NO: 14772 - protein, 10 aa, Artificial Sequence
  Synthetic
NYWGQGTQVT

SEQ ID NO: 14773 - protein, 10 aa, Artificial Sequence
  Synthetic
NYWGPGTQVT

SEQ ID NO: 14774 - protein, 10 aa, Artificial Sequence
  Synthetic
DYWGQGTQVT

SEQ ID NO: 14775 - protein, 10 aa, Artificial Sequence
  Synthetic
AFWGHGTQVT

SEQ ID NO: 14776 - protein, 10 aa, Artificial Sequence
  Synthetic
MNWGQGTQVT

SEQ ID NO: 14777 - protein, 10 aa, Artificial Sequence
  Synthetic
IYWGQGAQVT

SEQ ID NO: 14778 - protein, 10 aa, Artificial Sequence
  Synthetic
TSWGQGTQVT

SEQ ID NO: 14779 - protein, 10 aa, Artificial Sequence
  Synthetic
AYWGQGTQVT

SEQ ID NO: 14780 - protein, 10 aa, Artificial Sequence
  Synthetic
INWGQGTQVT

SEQ ID NO: 14781 - protein, 10 aa, Artificial Sequence
  Synthetic
KYWGQGTQVT

SEQ ID NO: 14782 - protein, 10 aa, Artificial Sequence
  Synthetic
DYWGQGTQVT

SEQ ID NO: 14783 - protein, 10 aa, Artificial Sequence
  Synthetic
NYWGQGTQVT

SEQ ID NO: 14784 - protein, 10 aa, Artificial Sequence
  Synthetic
DYWGQGTQVT

SEQ ID NO: 14785 - protein, 10 aa, Artificial Sequence
  Synthetic
DYWGQGTQVT

SEQ ID NO: 14786 - protein, 10 aa, Artificial Sequence
  Synthetic
VYWGQGTRVT

SEQ ID NO: 14787 - protein, 10 aa, Artificial Sequence
  Synthetic
DYWGQGTQVT

SEQ ID NO: 14788 - protein, 10 aa, Artificial Sequence
  Synthetic
DYWGQGTQVT

SEQ ID NO: 14789 - protein, 10 aa, Artificial Sequence
  Synthetic
DYWGQGTQVT

SEQ ID NO: 14790 - protein, 10 aa, Artificial Sequence
  Synthetic
DYWGQGTLVT

SEQ ID NO: 14791 - protein, 10 aa, Artificial Sequence
  Synthetic
PYWGRGTQVT

SEQ ID NO: 14792 - protein, 10 aa, Artificial Sequence
  Synthetic
DHWGQGTQVT

SEQ ID NO: 14793 - protein, 10 aa, Artificial Sequence
  Synthetic
DSWGKGTLVT

SEQ ID NO: 14794 - protein, 10 aa, Artificial Sequence
  Synthetic
AYWGQGTQVT

SEQ ID NO: 14795 - protein, 10 aa, Artificial Sequence
  Synthetic
NYWGQGTQVT

SEQ ID NO: 14796 - protein, 10 aa, Artificial Sequence
  Synthetic
QSWGQGTQVT

SEQ ID NO: 14797 - protein, 10 aa, Artificial Sequence
  Synthetic
RYWGQGTQVT

SEQ ID NO: 14798 - protein, 10 aa, Artificial Sequence
  Synthetic
DYWGQGTQVT

SEQ ID NO: 14799 - protein, 10 aa, Artificial Sequence
  Synthetic
NYWGQGTQVT

SEQ ID NO: 14800 - protein, 10 aa, Artificial Sequence
  Synthetic
DYWGKGTRVT

SEQ ID NO: 14801 - protein, 10 aa, Artificial Sequence
  Synthetic
IAGGQGTQVT

SEQ ID NO: 14802 - protein, 10 aa, Artificial Sequence
  Synthetic
DYWGQGTQVT

SEQ ID NO: 14803 - protein, 10 aa, Artificial Sequence
  Synthetic
DYWGQGTQVT

SEQ ID NO: 14804 - protein, 10 aa, Artificial Sequence
  Synthetic
DYWGQGTQVT

SEQ ID NO: 14805 - protein, 10 aa, Artificial Sequence
  Synthetic
DTWGQGTQVT

SEQ ID NO: 14806 - protein, 10 aa, Artificial Sequence
  Synthetic
NYWGQGTQVT

SEQ ID NO: 14807 - protein, 10 aa, Artificial Sequence
  Synthetic
GSWGQGTQVT

SEQ ID NO: 14808 - protein, 10 aa, Artificial Sequence
  Synthetic
DYWGQGTQVT

SEQ ID NO: 14809 - protein, 10 aa, Artificial Sequence
  Synthetic
AYWGQGTQVT

SEQ ID NO: 14810 - protein, 10 aa, Artificial Sequence
  Synthetic
EYWGQGTQVT

SEQ ID NO: 14811 - protein, 10 aa, Artificial Sequence
  Synthetic
SYWGQGTQVT

SEQ ID NO: 14812 - protein, 10 aa, Artificial Sequence
  Synthetic
EYWGQGTQVT

SEQ ID NO: 14813 - protein, 10 aa, Artificial Sequence
  Synthetic
EYWGQGTQVT

SEQ ID NO: 14814 - protein, 10 aa, Artificial Sequence
  Synthetic
DYWGQGTQVT

SEQ ID NO: 14815 - protein, 10 aa, Artificial Sequence
  Synthetic
DYWGQGTQVT

SEQ ID NO: 14816 - protein, 10 aa, Artificial Sequence
  Synthetic
DYWGQGTQVT

SEQ ID NO: 14817 - protein, 10 aa, Artificial Sequence
  Synthetic
DYWGKGTQVT

SEQ ID NO: 14818 - protein, 10 aa, Artificial Sequence
  Synthetic
TYWGQGTQVT

SEQ ID NO: 14819 - protein, 10 aa, Artificial Sequence
  Synthetic
GLRGQGTQVT

SEQ ID NO: 14820 - protein, 10 aa, Artificial Sequence
  Synthetic
GYWGQGTQVT

SEQ ID NO: 14821 - protein, 10 aa, Artificial Sequence
  Synthetic
NYWGQGTQVT

SEQ ID NO: 14822 - protein, 10 aa, Artificial Sequence
  Synthetic
DYWGQGTQVT

SEQ ID NO: 14823 - protein, 10 aa, Artificial Sequence
  Synthetic
EYWGQGTQVT

SEQ ID NO: 14824 - protein, 10 aa, Artificial Sequence
  Synthetic
GYWGQGTQVT

SEQ ID NO: 14825 - protein, 10 aa, Artificial Sequence
  Synthetic
DHWGQGTQVT

SEQ ID NO: 14826 - protein, 10 aa, Artificial Sequence
  Synthetic
AYWGQGTRVT

SEQ ID NO: 14827 - protein, 10 aa, Artificial Sequence
  Synthetic
DYWGQGTQVT

SEQ ID NO: 14828 - protein, 13 aa, Artificial Sequence
  Synthetic
DYWGQGTQVTVST

SEQ ID NO: 14829 - protein, 13 aa, Artificial Sequence
  Synthetic
DYWGQGTQVTVSS

SEQ ID NO: 14830 - protein, 13 aa, Artificial Sequence
  Synthetic
IYWGKGTQVTVSA

SEQ ID NO: 14831 - protein, 13 aa, Artificial Sequence
  Synthetic
DYWGRGTQVTVSS

SEQ ID NO: 14832 - protein, 13 aa, Artificial Sequence
  Synthetic
ESWGQGTQVTVSS

SEQ ID NO: 14833 - protein, 13 aa, Artificial Sequence
  Synthetic
DYWGQGTQVTVSS

SEQ ID NO: 14834 - protein, 13 aa, Artificial Sequence
  Synthetic
DYWGQGTEVTVSS

SEQ ID NO: 14835 - protein, 13 aa, Artificial Sequence
  Synthetic
GYWGQGTQVTVSS

SEQ ID NO: 14836 - protein, 13 aa, Artificial Sequence
  Synthetic
DYWGQGTQVTVSS

SEQ ID NO: 14837 - protein, 13 aa, Artificial Sequence
  Synthetic
SYWGQGTQVTVSS

SEQ ID NO: 14838 - protein, 13 aa, Artificial Sequence
  Synthetic
DYWGQGTQVTVSS

SEQ ID NO: 14839 - protein, 13 aa, Artificial Sequence
  Synthetic
QYWGQGTQVTVSS

SEQ ID NO: 14840 - protein, 13 aa, Artificial Sequence
  Synthetic
DYSGQGTQVTVSS

SEQ ID NO: 14841 - protein, 13 aa, Artificial Sequence
  Synthetic
RYWGQGTQVTVSS

SEQ ID NO: 14842 - protein, 13 aa, Artificial Sequence
  Synthetic
NNWGQGTQVTVSS

SEQ ID NO: 14843 - protein, 10 aa, Artificial Sequence
  Synthetic
AYWGLGTQVT

SEQ ID NO: 14844 - protein, 10 aa, Artificial Sequence
  Synthetic
TYWGQGTQVT

SEQ ID NO: 14845 - protein, 10 aa, Artificial Sequence
  Synthetic
NNWGQGTQVT

SEQ ID NO: 14846 - protein, 10 aa, Artificial Sequence
  Synthetic
DYWGQGTQVT

SEQ ID NO: 14847 - protein, 10 aa, Artificial Sequence
  Synthetic
DYWGQGTQVT

SEQ ID NO: 14848 - protein, 10 aa, Artificial Sequence
  Synthetic
IGWGQGTQVT

SEQ ID NO: 14849 - protein, 10 aa, Artificial Sequence
  Synthetic
GYWGQGTQVT

SEQ ID NO: 14850 - protein, 10 aa, Artificial Sequence
  Synthetic
SYWGQGTQVT

SEQ ID NO: 14851 - protein, 10 aa, Artificial Sequence
  Synthetic
RYWGQGTQVT

SEQ ID NO: 14852 - protein, 10 aa, Artificial Sequence
  Synthetic
EFWGAGVQVT

SEQ ID NO: 14853 - protein, 10 aa, Artificial Sequence
  Synthetic
ATWGQGTQVT

SEQ ID NO: 14854 - protein, 10 aa, Artificial Sequence
  Synthetic
DSWGQGTQVT

SEQ ID NO: 14855 - protein, 10 aa, Artificial Sequence
  Synthetic
DYWGQGTQVT

SEQ ID NO: 14856 - protein, 10 aa, Artificial Sequence
  Synthetic
DYWGQGTQVT

SEQ ID NO: 14857 - protein, 10 aa, Artificial Sequence
  Synthetic
ESWGQGTQVT

SEQ ID NO: 14858 - protein, 10 aa, Artificial Sequence
  Synthetic
DYWGQGTQVT

SEQ ID NO: 14859 - protein, 10 aa, Artificial Sequence
  Synthetic
DYWGQGAQVT

SEQ ID NO: 14860 - protein, 10 aa, Artificial Sequence
  Synthetic
EYWGPGTQVT

SEQ ID NO: 14861 - protein, 13 aa, Artificial Sequence
  Synthetic
AIWGQGTQVTVSS

SEQ ID NO: 14862 - protein, 10 aa, Artificial Sequence
  Synthetic
DYWGQGTQVT

SEQ ID NO: 14863 - protein, 10 aa, Artificial Sequence
  Synthetic
DYWGQGTQVT

SEQ ID NO: 14864 - protein, 10 aa, Artificial Sequence
  Synthetic
DYWGQGTQVT

SEQ ID NO: 14865 - protein, 10 aa, Artificial Sequence
  Synthetic
NYWGQGTQVT

SEQ ID NO: 14866 - protein, 10 aa, Artificial Sequence
  Synthetic
EYWGQGTQVT

SEQ ID NO: 14867 - protein, 10 aa, Artificial Sequence
  Synthetic
DFWGQGTQVT

SEQ ID NO: 14868 - protein, 10 aa, Artificial Sequence
  Synthetic
NYWGQGTQVT

SEQ ID NO: 14869 - protein, 10 aa, Artificial Sequence
  Synthetic
VYWGQGTQVT

SEQ ID NO: 14870 - protein, 10 aa, Artificial Sequence
  Synthetic
GYWGQGTQVT

SEQ ID NO: 14871 - protein, 10 aa, Artificial Sequence
  Synthetic
DYWGQGTQVT

SEQ ID NO: 14872 - protein, 10 aa, Artificial Sequence
  Synthetic
DYWGQGTQVT

SEQ ID NO: 14873 - protein, 10 aa, Artificial Sequence
  Synthetic
DFWGQGTQVT

SEQ ID NO: 14874 - protein, 10 aa, Artificial Sequence
  Synthetic
TYWGQGTQVT

SEQ ID NO: 14875 - protein, 10 aa, Artificial Sequence
  Synthetic
TYWGQGTQVT

SEQ ID NO: 14876 - protein, 10 aa, Artificial Sequence
  Synthetic
SYWGQGTQVT

SEQ ID NO: 14877 - protein, 10 aa, Artificial Sequence
  Synthetic
GYWGQGTQVT

SEQ ID NO: 14878 - protein, 10 aa, Artificial Sequence
  Synthetic
DYWGQGTQVT

SEQ ID NO: 14879 - protein, 10 aa, Artificial Sequence
  Synthetic
DFWGQGTQVT

SEQ ID NO: 14880 - protein, 13 aa, Artificial Sequence
  Synthetic
DSWGQGTQVTVSS

SEQ ID NO: 14881 - protein, 13 aa, Artificial Sequence
  Synthetic
DYWGQGTQVTVSS

SEQ ID NO: 14882 - protein, 13 aa, Artificial Sequence
  Synthetic
TWWGQGTQVTVSS

SEQ ID NO: 14883 - protein, 13 aa, Artificial Sequence
  Synthetic
GYWGQGTQVTVSS

SEQ ID NO: 14884 - protein, 13 aa, Artificial Sequence
  Synthetic
DYWGQGTQVTVSS

SEQ ID NO: 14885 - protein, 13 aa, Artificial Sequence
  Synthetic
NYWGQGTQVTVSS

SEQ ID NO: 14886 - protein, 13 aa, Artificial Sequence
  Synthetic
DSWGQGTQVTVSS

SEQ ID NO: 14887 - protein, 13 aa, Artificial Sequence
  Synthetic
DYWGQGTQVTVSS

SEQ ID NO: 14888 - protein, 13 aa, Artificial Sequence
  Synthetic
NYWGQGTQVTVSS

SEQ ID NO: 14889 - protein, 13 aa, Artificial Sequence
  Synthetic
DYWGQGTQVTVSS

SEQ ID NO: 14890 - protein, 13 aa, Artificial Sequence
  Synthetic
DYWGQGTQVTVSS

SEQ ID NO: 14891 - protein, 13 aa, Artificial Sequence
  Synthetic
DSWGQGTQVTVSS

SEQ ID NO: 14892 - protein, 13 aa, Artificial Sequence
  Synthetic
LYWGQGTQVTVSS

SEQ ID NO: 14893 - protein, 13 aa, Artificial Sequence
  Synthetic
DYYDWGQGTQVTV

SEQ ID NO: 14894 - protein, 13 aa, Artificial Sequence
  Synthetic
DSWGQGTQVTVSS

SEQ ID NO: 14895 - protein, 13 aa, Artificial Sequence
  Synthetic
GYWGQGTQVTVSS

SEQ ID NO: 14896 - protein, 13 aa, Artificial Sequence
  Synthetic
ITAGQGTQVTVSS

SEQ ID NO: 14897 - protein, 13 aa, Artificial Sequence
  Synthetic
SFWGRGTQVTVSS

SEQ ID NO: 14898 - protein, 13 aa, Artificial Sequence
  Synthetic
DYWGQGTQVTVSS

SEQ ID NO: 14899 - protein, 13 aa, Artificial Sequence
  Synthetic
AYWGQGTQVTVSS

SEQ ID NO: 14900 - protein, 13 aa, Artificial Sequence
  Synthetic
GSWGQGTQVTVSS

SEQ ID NO: 14901 - protein, 13 aa, Artificial Sequence
  Synthetic
DYWGQGTQVTVSS

SEQ ID NO: 14902 - protein, 13 aa, Artificial Sequence
  Synthetic
VYWGQGTQVTVSS

SEQ ID NO: 14903 - protein, 13 aa, Artificial Sequence
  Synthetic
DYWGQGTQVTVSS

SEQ ID NO: 14904 - protein, 13 aa, Artificial Sequence
  Synthetic
DTWGQGTQVTVSS

SEQ ID NO: 14905 - protein, 13 aa, Artificial Sequence
  Synthetic
DYWGQGTQVTVSS

SEQ ID NO: 14906 - protein, 13 aa, Artificial Sequence
  Synthetic
TLWGRGTQVTVSS

SEQ ID NO: 14907 - protein, 13 aa, Artificial Sequence
  Synthetic
TLWGRGTQVTVSS

SEQ ID NO: 14908 - protein, 13 aa, Artificial Sequence
  Synthetic
ESWGQGTQVTISS

SEQ ID NO: 14909 - protein, 13 aa, Artificial Sequence
  Synthetic
DHWGQGTQVTVSS

SEQ ID NO: 14910 - protein, 13 aa, Artificial Sequence
  Synthetic
DYWGQGTQVTVSS

SEQ ID NO: 14911 - protein, 13 aa, Artificial Sequence
  Synthetic
DYWGQGTQVTVSS

SEQ ID NO: 14912 - protein, 13 aa, Artificial Sequence
  Synthetic
DYWGQGTQVTVSS

SEQ ID NO: 14913 - protein, 13 aa, Artificial Sequence
  Synthetic
DYYGKGTQVTVSS

SEQ ID NO: 14914 - protein, 13 aa, Artificial Sequence
  Synthetic
SFWGQGTQVTVSS

SEQ ID NO: 14915 - protein, 13 aa, Artificial Sequence
  Synthetic
DDWGQGTQVTVSS

SEQ ID NO: 14916 - protein, 13 aa, Artificial Sequence
  Synthetic
AYWGQGTQVTVSS

SEQ ID NO: 14917 - protein, 13 aa, Artificial Sequence
  Synthetic
DYWGQGTQVTVSS

SEQ ID NO: 14918 - protein, 13 aa, Artificial Sequence
  Synthetic
NYWGQGTQVTVSS

SEQ ID NO: 14919 - protein, 13 aa, Artificial Sequence
  Synthetic
DFWGRGTQVTVSS

SEQ ID NO: 14920 - protein, 13 aa, Artificial Sequence
  Synthetic
DLWGQGTQVTVSS

SEQ ID NO: 14921 - protein, 13 aa, Artificial Sequence
  Synthetic
DYWGQGTQVTVSS

SEQ ID NO: 14922 - protein, 13 aa, Artificial Sequence
  Synthetic
DYWGQGTQVTVSS

SEQ ID NO: 14923 - protein, 13 aa, Artificial Sequence
  Synthetic
GHWGQGTQVTVSS

SEQ ID NO: 14924 - protein, 13 aa, Artificial Sequence
  Synthetic
DYWGRGTQVTVSS

SEQ ID NO: 14925 - protein, 13 aa, Artificial Sequence
  Synthetic
TYWGQGTQVTVSS

SEQ ID NO: 14926 - protein, 13 aa, Artificial Sequence
  Synthetic
DYWGQGTQVTVSS

SEQ ID NO: 14927 - protein, 13 aa, Artificial Sequence
  Synthetic
SYWGQGTQVTVSS

SEQ ID NO: 14928 - protein, 13 aa, Artificial Sequence
  Synthetic
DYWGQGTQVTVSS

SEQ ID NO: 14929 - protein, 13 aa, Artificial Sequence
  Synthetic
EYWGQGTQVTVSS

SEQ ID NO: 14930 - protein, 13 aa, Artificial Sequence
  Synthetic
GSRGRGTQVTVSS

SEQ ID NO: 14931 - protein, 13 aa, Artificial Sequence
  Synthetic
AHWGQGTQVTVSS

SEQ ID NO: 14932 - protein, 13 aa, Artificial Sequence
  Synthetic
DFWGQGTQVTVSS

SEQ ID NO: 14933 - protein, 13 aa, Artificial Sequence
  Synthetic
DYWGQGTQVTVSS

SEQ ID NO: 14934 - protein, 13 aa, Artificial Sequence
  Synthetic
MHWGQGTQVTVSS

SEQ ID NO: 14935 - protein, 13 aa, Artificial Sequence
  Synthetic
ADWGQGTQVTVSS

SEQ ID NO: 14936 - protein, 13 aa, Artificial Sequence
  Synthetic
DNWGQGTQVTVSS

SEQ ID NO: 14937 - protein, 13 aa, Artificial Sequence
  Synthetic
RSWGQGTQVTVSS

SEQ ID NO: 14938 - protein, 13 aa, Artificial Sequence
  Synthetic
DYWGQGTQVTVSH

SEQ ID NO: 14939 - protein, 13 aa, Artificial Sequence
  Synthetic
SYWGQGTQVTVSS

SEQ ID NO: 14940 - protein, 12 aa, Artificial Sequence
  Synthetic
DYWGQGTQVTVS

SEQ ID NO: 14941 - protein, 13 aa, Artificial Sequence
  Synthetic
YYWGQGTQVTVSS

SEQ ID NO: 14942 - protein, 13 aa, Artificial Sequence
  Synthetic
DYWGQGTQVTVSS

SEQ ID NO: 14943 - protein, 13 aa, Artificial Sequence
  Synthetic
DSWGQGTQVTVSS

SEQ ID NO: 14944 - protein, 13 aa, Artificial Sequence
  Synthetic
DYWGQGTQVTVSS

SEQ ID NO: 14945 - protein, 13 aa, Artificial Sequence
  Synthetic
TYWGQGTQVTVSS

SEQ ID NO: 14946 - protein, 12 aa, Artificial Sequence
  Synthetic
TYWGQGTQVTVS

SEQ ID NO: 14947 - protein, 13 aa, Artificial Sequence
  Synthetic
NYWGQGTQVTVSS

SEQ ID NO: 14948 - protein, 13 aa, Artificial Sequence
  Synthetic
DYWGQGTQVTVSS

SEQ ID NO: 14949 - protein, 13 aa, Artificial Sequence
  Synthetic
NYWGRGTQVTVSS

SEQ ID NO: 14950 - protein, 13 aa, Artificial Sequence
  Synthetic
NISGPGTQVTVSS

SEQ ID NO: 14951 - protein, 13 aa, Artificial Sequence
  Synthetic
DYWGLGTQVTVSS

SEQ ID NO: 14952 - protein, 13 aa, Artificial Sequence
  Synthetic
AYWGQGTQVTVSS

SEQ ID NO: 14953 - protein, 13 aa, Artificial Sequence
  Synthetic
DYWGQGTQVTVSS

SEQ ID NO: 14954 - protein, 13 aa, Artificial Sequence
  Synthetic
DYWGQGTQVTVSS

SEQ ID NO: 14955 - protein, 13 aa, Artificial Sequence
  Synthetic
SSWGQGTQVTVSS

SEQ ID NO: 14956 - protein, 13 aa, Artificial Sequence
  Synthetic
GPWGQGTQVTVSS

SEQ ID NO: 14957 - protein, 13 aa, Artificial Sequence
  Synthetic
DYWGQGTQVTVSS

SEQ ID NO: 14958 - protein, 13 aa, Artificial Sequence
  Synthetic
DYWGQGTQVTVSS

SEQ ID NO: 14959 - protein, 13 aa, Artificial Sequence
  Synthetic
DHWGQGTQVTVSS

SEQ ID NO: 14960 - protein, 13 aa, Artificial Sequence
  Synthetic
NYWGQGTQVTVSS

SEQ ID NO: 14961 - protein, 13 aa, Artificial Sequence
  Synthetic
DYWGQGTQVTVSS

SEQ ID NO: 14962 - protein, 13 aa, Artificial Sequence
  Synthetic
NPWGQGTQVTVSS

SEQ ID NO: 14963 - protein, 13 aa, Artificial Sequence
  Synthetic
DYWGQGTQVTVSS

SEQ ID NO: 14964 - protein, 13 aa, Artificial Sequence
  Synthetic
DYWGQGTQVTVSS

SEQ ID NO: 14965 - protein, 13 aa, Artificial Sequence
  Synthetic
NYWGQGTQVTVSS

SEQ ID NO: 14966 - protein, 13 aa, Artificial Sequence
  Synthetic
DYWGQGTQVTVSS

SEQ ID NO: 14967 - protein, 13 aa, Artificial Sequence
  Synthetic
DYWGQGTQVTVSS

SEQ ID NO: 14968 - protein, 13 aa, Artificial Sequence
  Synthetic
DYWGQGTQVTVSS

SEQ ID NO: 14969 - protein, 13 aa, Artificial Sequence
  Synthetic
AYWGQGTQVTVSS

SEQ ID NO: 14970 - protein, 13 aa, Artificial Sequence
  Synthetic
DYWGQGTQVTVSS

SEQ ID NO: 14971 - protein, 13 aa, Artificial Sequence
  Synthetic
GVRGQGTQVTVSS

SEQ ID NO: 14972 - protein, 13 aa, Artificial Sequence
  Synthetic
WYWGQGTQVTVSS

SEQ ID NO: 14973 - protein, 13 aa, Artificial Sequence
  Synthetic
DYWGQGTQVTVSS

SEQ ID NO: 14974 - protein, 13 aa, Artificial Sequence
  Synthetic
GYWGQGTQVTVSS

SEQ ID NO: 14975 - protein, 13 aa, Artificial Sequence
  Synthetic
DYWGQGTQVTVSS

SEQ ID NO: 14976 - protein, 13 aa, Artificial Sequence
  Synthetic
DYWGQGTQVTVSS

SEQ ID NO: 14977 - protein, 13 aa, Artificial Sequence
  Synthetic
DYWGQGTQVTVSS

SEQ ID NO: 14978 - protein, 13 aa, Artificial Sequence
  Synthetic
HLWGQGTRVTVSS

SEQ ID NO: 14979 - protein, 13 aa, Artificial Sequence
  Synthetic
HYWGKGTQVTVSS

SEQ ID NO: 14980 - protein, 13 aa, Artificial Sequence
  Synthetic
GSWGQGTQVTVSS

SEQ ID NO: 14981 - protein, 13 aa, Artificial Sequence
  Synthetic
DYWGQGTQVTVSS

SEQ ID NO: 14982 - protein, 13 aa, Artificial Sequence
  Synthetic
DYWGQGTQVTVSS

SEQ ID NO: 14983 - protein, 13 aa, Artificial Sequence
  Synthetic
EYWGQGTQVTVSS

SEQ ID NO: 14984 - protein, 13 aa, Artificial Sequence
  Synthetic
TYWGQGTQVTVSS

SEQ ID NO: 14985 - protein, 13 aa, Artificial Sequence
  Synthetic
NYWGQGTQVTVSS

SEQ ID NO: 14986 - protein, 13 aa, Artificial Sequence
  Synthetic
DFWGQGTQVTVSS

SEQ ID NO: 14987 - protein, 13 aa, Artificial Sequence
  Synthetic
DYWGQGTQVTVSS

SEQ ID NO: 14988 - protein, 13 aa, Artificial Sequence
  Synthetic
DYWGQGTQVTVSS

SEQ ID NO: 14989 - protein, 13 aa, Artificial Sequence
  Synthetic
AYWGQGTQVTVSS

SEQ ID NO: 14990 - protein, 13 aa, Artificial Sequence
  Synthetic
DYWGQGTQVTVSS

SEQ ID NO: 14991 - protein, 13 aa, Artificial Sequence
  Synthetic
GSWGQGTQVTVSS

SEQ ID NO: 14992 - protein, 13 aa, Artificial Sequence
  Synthetic
PVLGQGTQVTVSS

SEQ ID NO: 14993 - protein, 13 aa, Artificial Sequence
  Synthetic
DFLGQGTQVTVSS

SEQ ID NO: 14994 - protein, 13 aa, Artificial Sequence
  Synthetic
STWGQGTQVTVSS

SEQ ID NO: 14995 - protein, 13 aa, Artificial Sequence
  Synthetic
PCAGQGTQVTVSS

SEQ ID NO: 14996 - protein, 13 aa, Artificial Sequence
  Synthetic
NSYGPGTQVTVSS

SEQ ID NO: 14997 - protein, 13 aa, Artificial Sequence
  Synthetic
DWWGQGIQVTVSS

SEQ ID NO: 14998 - protein, 13 aa, Artificial Sequence
  Synthetic
EVMGPGTLVNVSS

SEQ ID NO: 14999 - protein, 13 aa, Artificial Sequence
  Synthetic
GSWGQGTEVSVSS

SEQ ID NO: 15000 - protein, 13 aa, Artificial Sequence
  Synthetic
HIWGQGTQVTVSA

SEQ ID NO: 15001 - protein, 13 aa, Artificial Sequence
  Synthetic
KYWGQGTQVTVSS

SEQ ID NO: 15002 - protein, 13 aa, Artificial Sequence
  Synthetic
DYWGQGTQVTVSS

SEQ ID NO: 15003 - protein, 13 aa, Artificial Sequence
  Synthetic
DYWGQGTQVTVSS

SEQ ID NO: 15004 - protein, 13 aa, Artificial Sequence
  Synthetic
DYWGQGTQVTVSS

SEQ ID NO: 15005 - protein, 13 aa, Artificial Sequence
  Synthetic
DKWDQGTQVTVSS

SEQ ID NO: 15006 - protein, 13 aa, Artificial Sequence
  Synthetic
DYWGQGTQVTVSS

SEQ ID NO: 15007 - protein, 13 aa, Artificial Sequence
  Synthetic
DYWGQGTRVAVSS

SEQ ID NO: 15008 - protein, 13 aa, Artificial Sequence
  Synthetic
DYWDQGTQVTVSS

SEQ ID NO: 15009 - protein, 13 aa, Artificial Sequence
  Synthetic
GVWGQGTQVTVSV

SEQ ID NO: 15010 - protein, 13 aa, Artificial Sequence
  Synthetic
DYWGQGTQVTVSS

SEQ ID NO: 15011 - protein, 13 aa, Artificial Sequence
  Synthetic
DYWGQGTQVTVSS

SEQ ID NO: 15012 - protein, 13 aa, Artificial Sequence
  Synthetic
SSWGQGTQVTVSS

SEQ ID NO: 15013 - protein, 13 aa, Artificial Sequence
  Synthetic
DYWGQGTQVTVSS

SEQ ID NO: 15014 - protein, 13 aa, Artificial Sequence
  Synthetic
EIWGQGTQVTVSS

SEQ ID NO: 15015 - protein, 13 aa, Artificial Sequence
  Synthetic
HYWGKGTLVTVSS

SEQ ID NO: 15016 - protein, 13 aa, Artificial Sequence
  Synthetic
NYWGQGTQVTVSA

SEQ ID NO: 15017 - protein, 13 aa, Artificial Sequence
  Synthetic
DYWGQGTQVTVSS

SEQ ID NO: 15018 - protein, 13 aa, Artificial Sequence
  Synthetic
ESWGQGTQVTVSS

SEQ ID NO: 15019 - protein, 13 aa, Artificial Sequence
  Synthetic
GYWGQGTQVTVSA

SEQ ID NO: 15020 - protein, 13 aa, Artificial Sequence
  Synthetic
DTWGQGTQVTVSS

SEQ ID NO: 15021 - protein, 13 aa, Artificial Sequence
  Synthetic
RDWGQGTQVTVSS

SEQ ID NO: 15022 - protein, 13 aa, Artificial Sequence
  Synthetic
GYWGQGTQVTVSS

SEQ ID NO: 15023 - protein, 13 aa, Artificial Sequence
  Synthetic
DLWGQGTQVTVSS

SEQ ID NO: 15024 - protein, 13 aa, Artificial Sequence
  Synthetic
DYWGQGTQVTVSS

SEQ ID NO: 15025 - protein, 13 aa, Artificial Sequence
  Synthetic
SYWGQGTQVTVSS

SEQ ID NO: 15026 - protein, 13 aa, Artificial Sequence
  Synthetic
QWRGQGTRVTVSS

SEQ ID NO: 15027 - protein, 13 aa, Artificial Sequence
  Synthetic
DYWGQGTQVTVSS

SEQ ID NO: 15028 - protein, 13 aa, Artificial Sequence
  Synthetic
DYWGQGTQVTVSS

SEQ ID NO: 15029 - protein, 13 aa, Artificial Sequence
  Synthetic
DYWGQGTQVSVSS

SEQ ID NO: 15030 - protein, 13 aa, Artificial Sequence
  Synthetic
GSWGQGTQVTVSS

SEQ ID NO: 15031 - protein, 13 aa, Artificial Sequence
  Synthetic
NYWGQGTQVTVSS

SEQ ID NO: 15032 - protein, 13 aa, Artificial Sequence
  Synthetic
DYWGQGTQVTVSS

SEQ ID NO: 15033 - protein, 13 aa, Artificial Sequence
  Synthetic
YYWGQGTQVTVSS

SEQ ID NO: 15034 - protein, 13 aa, Artificial Sequence
  Synthetic
ANWGRGTQVTVSS

SEQ ID NO: 15035 - protein, 13 aa, Artificial Sequence
  Synthetic
LDWGQGTQVTVSS

SEQ ID NO: 15036 - protein, 13 aa, Artificial Sequence
  Synthetic
LGGGQGTQVTVSS

SEQ ID NO: 15037 - protein, 13 aa, Artificial Sequence
  Synthetic
DSWGQGTQVTVSS

SEQ ID NO: 15038 - protein, 13 aa, Artificial Sequence
  Synthetic
DYWGQGTQVTVSS

SEQ ID NO: 15039 - protein, 13 aa, Artificial Sequence
  Synthetic
TYWGQGTQVTVSS

SEQ ID NO: 15040 - protein, 13 aa, Artificial Sequence
  Synthetic
PSWGQGTQVTVSS

SEQ ID NO: 15041 - protein, 13 aa, Artificial Sequence
  Synthetic
DYWGQGTQVTVSS

SEQ ID NO: 15042 - protein, 13 aa, Artificial Sequence
  Synthetic
NYWGQGTQVTVSS

SEQ ID NO: 15043 - protein, 13 aa, Artificial Sequence
  Synthetic
DHWGQGTQVTVSS

SEQ ID NO: 15044 - protein, 13 aa, Artificial Sequence
  Synthetic
PYWGQGTQVTVSS

SEQ ID NO: 15045 - protein, 13 aa, Artificial Sequence
  Synthetic
DYWGQGTQVTVSS

SEQ ID NO: 15046 - protein, 13 aa, Artificial Sequence
  Synthetic
LPYGQGTQVTVSS

SEQ ID NO: 15047 - protein, 13 aa, Artificial Sequence
  Synthetic
FSWGQGTQVTVSS

SEQ ID NO: 15048 - protein, 13 aa, Artificial Sequence
  Synthetic
GYWGQGTQVTVSS

SEQ ID NO: 15049 - protein, 13 aa, Artificial Sequence
  Synthetic
QLWGQGTQVTVSS

SEQ ID NO: 15050 - protein, 13 aa, Artificial Sequence
  Synthetic
AYWGQGTQVTVSS

SEQ ID NO: 15051 - protein, 13 aa, Artificial Sequence
  Synthetic
MYWGQGTQVTVSS

SEQ ID NO: 15052 - protein, 13 aa, Artificial Sequence
  Synthetic
GYWGQGTQVTVSS

SEQ ID NO: 15053 - protein, 13 aa, Artificial Sequence
  Synthetic
IYWGQGTQVTVSS

SEQ ID NO: 15054 - protein, 13 aa, Artificial Sequence
  Synthetic
EYWGQGTQVTVSS

SEQ ID NO: 15055 - protein, 13 aa, Artificial Sequence
  Synthetic
YAWGQGTQVTVSS

SEQ ID NO: 15056 - protein, 13 aa, Artificial Sequence
  Synthetic
EYWGQGTQVTVSS

SEQ ID NO: 15057 - protein, 13 aa, Artificial Sequence
  Synthetic
DYWGQGTQVTVSS

SEQ ID NO: 15058 - protein, 13 aa, Artificial Sequence
  Synthetic
QDWGQGTQVTVSS

SEQ ID NO: 15059 - protein, 13 aa, Artificial Sequence
  Synthetic
DSWGQGTQVTVSS

SEQ ID NO: 15060 - protein, 13 aa, Artificial Sequence
  Synthetic
NYWGQGTQVTVSS

SEQ ID NO: 15061 - protein, 13 aa, Artificial Sequence
  Synthetic
DYWGQGTQVTVSS

SEQ ID NO: 15062 - protein, 13 aa, Artificial Sequence
  Synthetic
DYWGQGTQVTVSS

SEQ ID NO: 15063 - protein, 13 aa, Artificial Sequence
  Synthetic
EYWGKGTLVTVSS

SEQ ID NO: 15064 - protein, 13 aa, Artificial Sequence
  Synthetic
DYWGQGTQVTVSS

SEQ ID NO: 15065 - protein, 13 aa, Artificial Sequence
  Synthetic
DYWGQGTQVTVSS

SEQ ID NO: 15066 - protein, 13 aa, Artificial Sequence
  Synthetic
TLMGQGTQVTVSS

SEQ ID NO: 15067 - protein, 13 aa, Artificial Sequence
  Synthetic
DFWGQGTQVTVSS

SEQ ID NO: 15068 - protein, 13 aa, Artificial Sequence
  Synthetic
PSWGPGTQVTVYS

SEQ ID NO: 15069 - protein, 13 aa, Artificial Sequence
  Synthetic
IYWGQGTQVTVSA

SEQ ID NO: 15070 - protein, 13 aa, Artificial Sequence
  Synthetic
DYWGQGTQVTVSS

SEQ ID NO: 15071 - protein, 13 aa, Artificial Sequence
  Synthetic
EYWGQGTQVTVSS

SEQ ID NO: 15072 - protein, 13 aa, Artificial Sequence
  Synthetic
LPWGQGTQVTVSS

SEQ ID NO: 15073 - protein, 13 aa, Artificial Sequence
  Synthetic
NYWGQGTQVTVSS

SEQ ID NO: 15074 - protein, 13 aa, Artificial Sequence
  Synthetic
DYWGQGTQVTVSS

SEQ ID NO: 15075 - protein, 13 aa, Artificial Sequence
  Synthetic
DYWGQGTQVTVSL

SEQ ID NO: 15076 - protein, 13 aa, Artificial Sequence
  Synthetic
DYWGQGTQVTVSS

SEQ ID NO: 15077 - protein, 13 aa, Artificial Sequence
  Synthetic
ELWGQGTQVTVSS

SEQ ID NO: 15078 - protein, 13 aa, Artificial Sequence
  Synthetic
ENWGQGTQVTVSS

SEQ ID NO: 15079 - protein, 13 aa, Artificial Sequence
  Synthetic
DYWGQGTQVTVSL

SEQ ID NO: 15080 - protein, 13 aa, Artificial Sequence
  Synthetic
EYWGKGTQVTVSS

SEQ ID NO: 15081 - protein, 13 aa, Artificial Sequence
  Synthetic
RYWGRGTQVTVSS

SEQ ID NO: 15082 - protein, 13 aa, Artificial Sequence
  Synthetic
DFWGQGIEVTVSP

SEQ ID NO: 15083 - protein, 13 aa, Artificial Sequence
  Synthetic
DYWGQGTQVTVSP

SEQ ID NO: 15084 - protein, 13 aa, Artificial Sequence
  Synthetic
NYWGQGTQVTASS

SEQ ID NO: 15085 - protein, 13 aa, Artificial Sequence
  Synthetic
DYWGQGTQVTVSS

SEQ ID NO: 15086 - protein, 13 aa, Artificial Sequence
  Synthetic
EVWGRGTLVTVSS

SEQ ID NO: 15087 - protein, 13 aa, Artificial Sequence
  Synthetic
GSWGQGTQVTVSS

SEQ ID NO: 15088 - protein, 13 aa, Artificial Sequence
  Synthetic
NGWGQGTQVTVSS

SEQ ID NO: 15089 - protein, 13 aa, Artificial Sequence
  Synthetic
ENWGQGTQVTVSS

SEQ ID NO: 15090 - protein, 13 aa, Artificial Sequence
  Synthetic
EHWGQGTQVTVSS

SEQ ID NO: 15091 - protein, 13 aa, Artificial Sequence
  Synthetic
EYWGQGTQVTVSS

SEQ ID NO: 15092 - protein, 13 aa, Artificial Sequence
  Synthetic
NYWGQGTQVTVSS

SEQ ID NO: 15093 - protein, 13 aa, Artificial Sequence
  Synthetic
HFWGQGTQVTVSS

SEQ ID NO: 15094 - protein, 13 aa, Artificial Sequence
  Synthetic
DYWGRGTQVTVSS

SEQ ID NO: 15095 - protein, 13 aa, Artificial Sequence
  Synthetic
GSWGQGTQVTVSS

SEQ ID NO: 15096 - protein, 13 aa, Artificial Sequence
  Synthetic
EVWGQGTLVTVSS

SEQ ID NO: 15097 - protein, 13 aa, Artificial Sequence
  Synthetic
DYWGQGTQVTVSS

SEQ ID NO: 15098 - protein, 13 aa, Artificial Sequence
  Synthetic
DYWGQGTQVTVSS

SEQ ID NO: 15099 - protein, 13 aa, Artificial Sequence
  Synthetic
DYWGKGTLVTVSS

SEQ ID NO: 15100 - protein, 13 aa, Artificial Sequence
  Synthetic
GSWGQGTQVTVSS

SEQ ID NO: 15101 - protein, 13 aa, Artificial Sequence
  Synthetic
DYWGQGTQVTVSS

SEQ ID NO: 15102 - DNA, 1357 bp, Artificial Sequence
  Synthetic
gtaacccactcgtgcacccaactgatcttcagcatcttttactttcaccagcgtttctgggtgagcaaaaacaggaaggcaaaatgccgcaaaaaagggaataagggcgacacggaaatgttgaatactcatactcttcctttttcaatattattgaagcatttatcagggttattgtctcatgagcggatacatatttgaatgtatttagaaaaataaacaaataggggttccgcgcacatttccccgaaaagtgccacctgacgtcgacggatcgggagtttaaactaatacgactcactatagggtctagaaataattttgtttaactttaagaaggagatataccatgcaggttcaactggttgaatctggtggcgcattagttcaaccgggtggtagccttcgtctgagctgcgccgcaagcggacgtacattcagcagctatgcaatgggttggtttcgccaggcacctggtaaagaacgtgaatttgtggcagccatttcaagcagtggtggcacctactatgccgattctgttaaaggtcgcttcactatttcacgcgatgatgcgcgtaataccgtgtacttacagatgaactcactgaaacctgaggataccgccgtttattattgtgcggcaggccgtggaggcggtagcgactattggggtcagggcacacaagtcacggtctcaagcggcggaagctctggtgaacagaaactgatttcagaagaggatctggcagaacagaaattaatctcagaggaagacctgggttctggtgagcaaaagttaatttctgaagaagacctggcaggtggctctggtgatggaggtagctctggcgatggtgcggatggcagcggtggtgcatctggttcaagcgcttacagcgatgatgttagtgcaagcggtcgtacctaccgcatcttctcatataactacgccagctatagcgactgggtttaaaccggctgctaacaaagcccgaaaggaagctgagttggctgctgccaccgctgagcaataactagcataaccccttggggcctctaaacgggtcttgaggggttttttgctgaaaggaggaactatatccggtgaaaggttgggcttcggaatcgttttccgggacgccggctggatgatcctccagcgcggggatctcatgctggagttcttcgcccaccccaacttgtttattgcagcttataatggttacaaataaagcaatagcatcacaaatttcacaaataaagcatttttttcactgcattctagttgtggtttgtccaaactcatcaatgtatcttatcatgtctgtataccgtcgacctctagctagagcttggc

SEQ ID NO: 15103 - DNA, 1357 bp, Artificial Sequence
  Synthetic
gtaacccactcgtgcacccaactgatcttcagcatcttttactttcaccagcgtttctgggtgagcaaaaacaggaaggcaaaatgccgcaaaaaagggaataagggcgacacggaaatgttgaatactcatactcttcctttttcaatattattgaagcatttatcagggttattgtctcatgagcggatacatatttgaatgtatttagaaaaataaacaaataggggttccgcgcacatttccccgaaaagtgccacctgacgtcgacggatcgggagtttaaactaatacgactcactatagggtctagaaataattttgtttaactttaagaaggagatataccatggaagttcaactggttgaatctggtggcggtttagttcaagccggtgatagccttcgtctgagctgcgccgcaagcggacgtacattcagcagctatgcaatgggttggtttcgccaggcacctggtaaagaacgtgaatttgtggcagccatttcaagcagtggtggcacctactatgccgattctgttcgtggtcgcttcagcatttcagcagattctgcgaagaataccgtgtacttacagatgaactcactgaaacctgaggataccgccgtttattattgtgcggcaggccgtggaggcggtagcgactattggggtcagggcacacaagtcacggtctcaagcggcggaagctctggtgaacagaaactgatttcagaagaggatctggcagaacagaaattaatctcagaggaagacctgggttctggtgagcaaaagttaatttctgaagaagacctggcaggtggctctggtgatggaggtagctctggcgatggtgcggatggcagcggtggtgcatctggttcaagcgcttacagcgatgatgttagtgcaagcggtcgtacctaccgcatcttctcatataactacgccagctatagcgactgggtttaaaccggctgctaacaaagcccgaaaggaagctgagttggctgctgccaccgctgagcaataactagcataaccccttggggcctctaaacgggtcttgaggggttttttgctgaaaggaggaactatatccggtgaaaggttgggcttcggaatcgttttccgggacgccggctggatgatcctccagcgcggggatctcatgctggagttcttcgcccaccccaacttgtttattgcagcttataatggttacaaataaagcaatagcatcacaaatttcacaaataaagcatttttttcactgcattctagttgtggtttgtccaaactcatcaatgtatcttatcatgtctgtataccgtcgacctctagctagagcttggc

SEQ ID NO: 15104 - DNA, 1357 bp, Artificial Sequence
  Synthetic
gtaacccactcgtgcacccaactgatcttcagcatcttttactttcaccagcgtttctgggtgagcaaaaacaggaaggcaaaatgccgcaaaaaagggaataagggcgacacggaaatgttgaatactcatactcttcctttttcaatattattgaagcatttatcagggttattgtctcatgagcggatacatatttgaatgtatttagaaaaataaacaaataggggttccgcgcacatttccccgaaaagtgccacctgacgtcgacggatcgggagtttaaactaatacgactcactatagggtctagaaataattttgtttaactttaagaaggagatataccatgcaggttcaactgcaagaatctggtggcggtttagttcaagccggtggtagccttcgtctgagctgcgccgcaagcggacgtacattcagcagctatgcaatgggttggtttcgccaggcacctggtaaagaacgtgaatttgtggcagccatttcaagcagtggtggcacctactatgccgattctgttaaaggtcgcttcactatttcacgcgataatgcgaagaataccgtgtacttacagatgaactcactgaaacctgaggataccgccgtttattattgtgcggcaggccgtggaggcggtagcgactattggggtcagggcacacaagtcacggtctcaagcggcggaagctctggtgaacagaaactgatttcagaagaggatctggcagaacagaaattaatctcagaggaagacctgggttctggtgagcaaaagttaatttctgaagaagacctggcaggtggctctggtgatggaggtagctctggcgatggtgcggatggcagcggtggtgcatctggttcaagcgcttacagcgatgatgttagtgcaagcggtcgtacctaccgcatcttctcatataactacgccagctatagcgactgggtttaaaccggctgctaacaaagcccgaaaggaagctgagttggctgctgccaccgctgagcaataactagcataaccccttggggcctctaaacgggtcttgaggggttttttgctgaaaggaggaactatatccggtgaaaggttgggcttcggaatcgttttccgggacgccggctggatgatcctccagcgcggggatctcatgctggagttcttcgcccaccccaacttgtttattgcagcttataatggttacaaataaagcaatagcatcacaaatttcacaaataaagcatttttttcactgcattctagttgtggtttgtccaaactcatcaatgtatcttatcatgtctgtataccgtcgacctctagctagagcttggc

SEQ ID NO: 15105 - DNA, 60 bp, Artificial Sequence
  Synthetic
gcggccgctgggcaccttttggtgcccagcggccgccacctgacgtcgacggatcgggag

SEQ ID NO: 15106 - DNA, 27 bp, Artificial Sequence
  Synthetic
gbtaatgghtgccacaaattcacgttc

SEQ ID NO: 15107 - DNA, 36 bp, Artificial Sequence
  Synthetic
  misc_feature (1)..(2): n is a, c, g, or t
  misc_feature (4)..(5): n is a, c, g, or t
  misc_feature (7)..(8): n is a, c, g, or t
  misc_feature (10)..(11): n is a, c, g, or t
  misc_feature (13)..(14): n is a, c, g, or t
nnbnnbnnbnnbnnbaccdactatgccgattctgtt

SEQ ID NO: 15108 - DNA, 60 bp, Artificial Sequence
  Synthetic
gcggccgctccgcagcttttgctgcggagcggccgcgccaagctctagctagaggtcgac

SEQ ID NO: 15109 - DNA, 60 bp, Artificial Sequence
  Synthetic
gcggccgctgggcaccttttggtgcccagcggccgcgtaacccactcgtgcacccaactg

SEQ ID NO: 15110 - DNA, 28 bp, Artificial Sequence
  Synthetic
tccgcttgcggcgcagctcagacgaagg

SEQ ID NO: 15111 - DNA, 28 bp, Artificial Sequence
  Synthetic
tccgcttgcggtgcagctcagacgaagg

SEQ ID NO: 15112 - DNA, 48 bp, Artificial Sequence
  Synthetic
  misc_feature (1)..(2): n is a, c, g, or t
  misc_feature (4)..(5): n is a, c, g, or t
  misc_feature (7)..(8): n is a, c, g, or t
  misc_feature (10)..(11): n is a, c, g, or t
  misc_feature (13)..(14): n is a, c, g, or t
  misc_feature (16)..(17): n is a, c, g, or t
  misc_feature (19)..(20): n is a, c, g, or t
nnbnnbnnbnnbnnbnnbnnbatgggttggtttcgccaggcacctggt

SEQ ID NO: 15113 - DNA, 48 bp, Artificial Sequence
  Synthetic
  misc_feature (1)..(2): n is a, c, g, or t
  misc_feature (4)..(5): n is a, c, g, or t
  misc_feature (7)..(8): n is a, c, g, or t
  misc_feature (10)..(11): n is a, c, g, or t
  misc_feature (13)..(14): n is a, c, g, or t
  misc_feature (16)..(17): n is a, c, g, or t
  misc_feature (19)..(20): n is a, c, g, or t
nnbnnbnnbnnbnnbnnbnnbatgggttggtatcgccaggcacctggt

SEQ ID NO: 15114 - DNA, 60 bp, Artificial Sequence; identical to SEQ ID NO: 15108
  Synthetic

SEQ ID NO: 15115 - DNA, 60 bp, Artificial Sequence; identical to SEQ ID NO: 15105
  Synthetic

SEQ ID NO: 15116 - DNA, 45 bp, Artificial Sequence
  Synthetic
  misc_feature (2)..(3): n is a, c, g, or t
  misc_feature (5)..(6): n is a, c, g, or t
vnnvnntgccgcacaataataaacggcggtatcctcaggtttcag

SEQ ID NO: 15117 - DNA, 45 bp, Artificial Sequence
  Synthetic
  misc_feature (2)..(3): n is a, c, g, or t
  misc_feature (5)..(6): n is a, c, g, or t
vnnvnnacgcgcacaataataaacggcggtatcctcaggtttcag

SEQ ID NO: 15118 - DNA, 45 bp, Artificial Sequence
  Synthetic
  misc_feature (2)..(3): n is a, c, g, or t
  misc_feature (5)..(6): n is a, c, g, or t
vnnvnntgtcgcacaataataaacggcggtatcctcaggtttcag

SEQ ID NO: 15119 - DNA, 45 bp, Artificial Sequence
  Synthetic
  misc_feature (2)..(3): n is a, c, g, or t
  misc_feature (5)..(6): n is a, c, g, or t
vnnvnnaaccgcacaataataaacggcggtatcctcaggtttcag

SEQ ID NO: 15120 - DNA, 45 bp, Artificial Sequence
  Synthetic
  misc_feature (2)..(3): n is a, c, g, or t
  misc_feature (5)..(6): n is a, c, g, or t
vnnvnntgcattacaataataaacggcggtatcctcaggtttcag

SEQ ID NO: 15121 - DNA, 45 bp, Artificial Sequence
  Synthetic
  misc_feature (2)..(3): n is a, c, g, or t
  misc_feature (5)..(6): n is a, c, g, or t
  misc_feature (8)..(9): n is a, c, g, or t
  misc_feature (11)..(12): n is a, c, g, or t
  misc_feature (14)..(15): n is a, c, g, or t
  misc_feature (17)..(18): n is a, c, g, or t
vnnvnnvnnvnnvnnvnntgccgcacaataataaacggcggtatc

SEQ ID NO: 15122 - DNA, 45 bp, Artificial Sequence
  Synthetic
  misc_feature (2)..(3): n is a, c, g, or t
  misc_feature (5)..(6): n is a, c, g, or t
  misc_feature (8)..(9): n is a, c, g, or t
  misc_feature (11)..(12): n is a, c, g, or t
  misc_feature (14)..(15): n is a, c, g, or t
  misc_feature (17)..(18): n is a, c, g, or t
vnnvnnvnnvnnvnnvnnacgcgcacaataataaacggcggtatc

SEQ ID NO: 15123 - DNA, 45 bp, Artificial Sequence
  Synthetic
  misc_feature (2)..(3): n is a, c, g, or t
  misc_feature (5)..(6): n is a, c, g, or t
  misc_feature (8)..(9): n is a, c, g, or t
  misc_feature (11)..(12): n is a, c, g, or t
  misc_feature (14)..(15): n is a, c, g, or t
  misc_feature (17)..(18): n is a, c, g, or t
vnnvnnvnnvnnvnnvnntgtcgcacaataataaacggcggtatc

SEQ ID NO: 15124 - DNA, 45 bp, Artificial Sequence
  Synthetic
  misc_feature (2)..(3): n is a, c, g, or t
  misc_feature (5)..(6): n is a, c, g, or t
  misc_feature (8)..(9): n is a, c, g, or t
  misc_feature (11)..(12): n is a, c, g, or t
  misc_feature (14)..(15): n is a, c, g, or t
  misc_feature (17)..(18): n is a, c, g, or t
vnnvnnvnnvnnvnnvnnaaccgcacaataataaacggcggtatc

SEQ ID NO: 15125 - DNA, 45 bp, Artificial Sequence
  Synthetic
  misc_feature (2)..(3): n is a, c, g, or t
  misc_feature (5)..(6): n is a, c, g, or t
  misc_feature (8)..(9): n is a, c, g, or t
  misc_feature (11)..(12): n is a, c, g, or t
  misc_feature (14)..(15): n is a, c, g, or t
  misc_feature (17)..(18): n is a, c, g, or t
vnnvnnvnnvnnvnnvnntgcattacaataataaacggcggtatc

SEQ ID NO: 15126 - DNA, 45 bp, Artificial Sequence
  Synthetic
  misc_feature (1)..(2): n is a, c, g, or t
  misc_feature (4)..(5): n is a, c, g, or t
  misc_feature (7)..(8): n is a, c, g, or t
  misc_feature (10)..(11): n is a, c, g, or t
nnbnnbnnbnnbgactattggggtcagggcacacaagtcacggtc

SEQ ID NO: 15127 - DNA, 45 bp, Artificial Sequence
  Synthetic
  misc_feature (1)..(2): n is a, c, g, or t
  misc_feature (4)..(5): n is a, c, g, or t
  misc_feature (7)..(8): n is a, c, g, or t
  misc_feature (10)..(11): n is a, c, g, or t
nnbnnbnnbnnbaactattggggtcagggcacacaagtcacggtc

SEQ ID NO: 15128 - DNA, 45 bp, Artificial Sequence
  Synthetic
  misc_feature (1)..(2): n is a, c, g, or t
  misc_feature (4)..(5): n is a, c, g, or t
  misc_feature (7)..(8): n is a, c, g, or t
  misc_feature (10)..(11): n is a, c, g, or t
nnbnnbnnbnnbggctattggggtcagggcacacaagtcacggtc

SEQ ID NO: 15129 - DNA, 45 bp, Artificial Sequence
  Synthetic
  misc_feature (1)..(2): n is a, c, g, or t
  misc_feature (4)..(5): n is a, c, g, or t
  misc_feature (7)..(8): n is a, c, g, or t
  misc_feature (10)..(11): n is a, c, g, or t
nnbnnbnnbnnbgagtattggggtcagggcacacaagtcacggtc

SEQ ID NO: 15130 - DNA, 45 bp, Artificial Sequence
  Synthetic
  misc_feature (1)..(2): n is a, c, g, or t
  misc_feature (4)..(5): n is a, c, g, or t
  misc_feature (7)..(8): n is a, c, g, or t
  misc_feature (10)..(11): n is a, c, g, or t
nnbnnbnnbnnbgactcttggggtcagggcacacaagtcacggtc

SEQ ID NO: 15131 - DNA, 45 bp, Artificial Sequence
  Synthetic
  misc_feature (1)..(2): n is a, c, g, or t
  misc_feature (4)..(5): n is a, c, g, or t
  misc_feature (7)..(8): n is a, c, g, or t
  misc_feature (10)..(11): n is a, c, g, or t
  misc_feature (13)..(14): n is a, c, g, or t
  misc_feature (16)..(17): n is a, c, g, or t
  misc_feature (19)..(20): n is a, c, g, or t
nnbnnbnnbnnbnnbnnbnnbgactattggggtcagggcacacaa

SEQ ID NO: 15132 - DNA, 45 bp, Artificial Sequence
  Synthetic
  misc_feature (1)..(2): n is a, c, g, or t
  misc_feature (4)..(5): n is a, c, g, or t
  misc_feature (7)..(8): n is a, c, g, or t
  misc_feature (10)..(11): n is a, c, g, or t
  misc_feature (13)..(14): n is a, c, g, or t
  misc_feature (16)..(17): n is a, c, g, or t
  misc_feature (19)..(20): n is a, c, g, or t
nnbnnbnnbnnbnnbnnbnnbaactattggggtcagggcacacaa

SEQ ID NO: 15133 - DNA, 45 bp, Artificial Sequence
  Synthetic
  misc_feature (1)..(2): n is a, c, g, or t
  misc_feature (4)..(5): n is a, c, g, or t
  misc_feature (7)..(8): n is a, c, g, or t
  misc_feature (10)..(11): n is a, c, g, or t
  misc_feature (13)..(14): n is a, c, g, or t
  misc_feature (16)..(17): n is a, c, g, or t
  misc_feature (19)..(20): n is a, c, g, or t
nnbnnbnnbnnbnnbnnbnnbggctattggggtcagggcacacaa

SEQ ID NO: 15134 - DNA, 45 bp, Artificial Sequence
  Synthetic
  misc_feature (1)..(2): n is a, c, g, or t
  misc_feature (4)..(5): n is a, c, g, or t
  misc_feature (7)..(8): n is a, c, g, or t
  misc_feature (10)..(11): n is a, c, g, or t
  misc_feature (13)..(14): n is a, c, g, or t
  misc_feature (16)..(17): n is a, c, g, or t
  misc_feature (19)..(20): n is a, c, g, or t
nnbnnbnnbnnbnnbnnbnnbgagtattggggtcagggcacacaa

SEQ ID NO: 15135 - DNA, 45 bp, Artificial Sequence
  Synthetic
  misc_feature (1)..(2): n is a, c, g, or t
  misc_feature (4)..(5): n is a, c, g, or t
  misc_feature (7)..(8): n is a, c, g, or t
  misc_feature (10)..(11): n is a, c, g, or t
  misc_feature (13)..(14): n is a, c, g, or t
  misc_feature (16)..(17): n is a, c, g, or t
  misc_feature (19)..(20): n is a, c, g, or t
nnbnnbnnbnnbnnbnnbnnbgactcttggggtcagggcacacaa

SEQ ID NO: 15136 - DNA, 60 bp, Artificial Sequence; identical to SEQ ID NO: 15108
  Synthetic

SEQ ID NO: 15137 - DNA, 58 bp, Artificial Sequence
  Synthetic
aaactaatacgactcactatagggtctagaaataattttgtttaactttaagaaggag

SEQ ID NO: 15138 - DNA, 28 bp, Artificial Sequence
  Synthetic
atagctggcgtagttatatgagaagatg

SEQ ID NO: 15139 - DNA, 31 bp, Artificial Sequence
  Synthetic
ccagtcgctatagctggcgtagttatatgag

SEQ ID NO: 15140 - DNA, 45 bp, Artificial Sequence
  Synthetic
  misc_feature (21)..(22): n is a, c, g, or t
acacgacgctcttccgatctnnctttaagaaggagatataccatg

SEQ ID NO: 15141 - DNA, 47 bp, Artificial Sequence
  Synthetic
  misc_feature (21)..(24): n is a, c, g, or t
acacgacgctcttccgatctnnnnctttaagaaggagatataccatg

SEQ ID NO: 15142 - DNA, 49 bp, Artificial Sequence
  Synthetic
  misc_feature (21)..(26): n is a, c, g, or t
acacgacgctcttccgatctnnnnnnctttaagaaggagatataccatg

SEQ ID NO: 15143 - DNA, 51 bp, Artificial Sequence
  Synthetic
  misc_feature (21)..(28): n is a, c, g, or t
acacgacgctcttccgatctnnnnnnnnctttaagaaggagatataccatg

SEQ ID NO: 15144 - DNA, 53 bp, Artificial Sequence
  Synthetic
  misc_feature (21)..(30): n is a, c, g, or t
acacgacgctcttccgatctnnnnnnnnnnctttaagaaggagatataccatg

SEQ ID NO: 15145 - DNA, 54 bp, Artificial Sequence
  Synthetic
  misc_feature (21)..(31): n is a, c, g, or t
acacgacgctcttccgatctnnnnnnnnnnnctttaagaaggagatataccatg

SEQ ID NO: 15146 - DNA, 55 bp, Artificial Sequence
  Synthetic
  misc_feature (21)..(32): n is a, c, g, or t
acacgacgctcttccgatctnnnnnnnnnnnnctttaagaaggagatataccatg

SEQ ID NO: 15147 - DNA, 56 bp, Artificial Sequence
  Synthetic
  misc_feature (21)..(33): n is a, c, g, or t
acacgacgctcttccgatctnnnnnnnnnnnnnctttaagaaggagatataccatg

SEQ ID NO: 15148 - DNA, 45 bp, Artificial Sequence
  Synthetic
cagacgtgtgctcttccgatctgcttctgaaatcagtttctgttc

SEQ ID NO: 15149 - DNA, 46 bp, Artificial Sequence
  Synthetic
cagacgtgtgctcttccgatctaacttctgaaatcagtttctgttc

SEQ ID NO: 15150 - DNA, 47 bp, Artificial Sequence
  Synthetic
cagacgtgtgctcttccgatcttcgcttctgaaatcagtttctgttc

SEQ ID NO: 15151 - DNA, 48 bp, Artificial Sequence
  Synthetic
cagacgtgtgctcttccgatctcgtacttctgaaatcagtttctgttc

SEQ ID NO: 15152 - DNA, 49 bp, Artificial Sequence
  Synthetic
cagacgtgtgctcttccgatctcttggcttctgaaatcagtttctgttc

SEQ ID NO: 15153 - DNA, 51 bp, Artificial Sequence
  Synthetic
cagacgtgtgctcttccgatctaccaacgcttctgaaatcagtttctgttc

SEQ ID NO: 15154 - DNA, 52 bp, Artificial Sequence
  Synthetic
cagacgtgtgctcttccgatctggatctagcttctgaaatcagtttctgttc

SEQ ID NO: 15155 - DNA, 53 bp, Artificial Sequence
  Synthetic
cagacgtgtgctcttccgatcttagctgctccttctgaaatcagtttctgttc

SEQ ID NO: 15156 - DNA, 58 bp, Artificial Sequence
  Synthetic
aatgatacggcgaccaccgagatctacactctttccctacacgacgctcttccgatct

SEQ ID NO: 15157 - DNA, 58 bp, Artificial Sequence
  Synthetic
caagcagaagacggcatacgagatgtgactggagttcagacgtgtgctcttccgatct

SEQ ID NO: 15158 - protein, 26 aa, Artificial Sequence
  Synthetic
EVQLVESGGGLVQAGDSLRLSCTASG

SEQ ID NO: 15159 - protein, 19 aa, Artificial Sequence
  Synthetic
MGWFRQAPGKEREFVAAIS

SEQ ID NO: 15160 - protein, 41 aa, Artificial Sequence
  Synthetic
AFYADSVRGRFSISADSAKNTVYLQMNSLKPEDTAVYYCAA

SEQ ID NO: 15161 - protein, 13 aa, Artificial Sequence
  Synthetic
DYWGQGTQVTVSS

SEQ ID NO: 15162 - protein, 26 aa, Artificial Sequence
  Synthetic
EVQLVESGGGLVQPGGSLRLSCAASG

SEQ ID NO: 15163 - protein, 26 aa, Artificial Sequence
  Synthetic
QVQLVESGGALVQPGGSLRLSCAASG

SEQ ID NO: 15164 - protein, 26 aa, Artificial Sequence
  Synthetic
EVQLVESGGGLVQAGDSLRLSCAASG

SEQ ID NO: 15165 - protein, 26 aa, Artificial Sequence
  Synthetic
QVQLQESGGGLVQAGGSLRLSCAASG

SEQ ID NO: 15166 - protein, 41 aa, Artificial Sequence
  Synthetic
TYYADSVKGRFTISRDNSKNTLYLQMNSLRAEDTAVYYCAK

SEQ ID NO: 15167 - protein, 41 aa, Artificial Sequence
  Synthetic
TYYADSVKGRFTISRDDARNTVYLQMNSLKPEDTAVYYCAA

SEQ ID NO: 15168 - protein, 41 aa, Artificial Sequence
  Synthetic
TYYADSVRGRFSISADSAKNTVYLQMNSLKPEDTAVYYCAA

SEQ ID NO: 15169 - protein, 41 aa, Artificial Sequence; identical to SEQ ID NO: 7111
  Synthetic

SEQ ID NO: 15170 - protein, 19 aa, Artificial Sequence
  Synthetic
MSWVRQAPGKGLEWVSAIS

SEQ ID NO: 15171 - protein, 19 aa, Artificial Sequence
  Synthetic
MGWFRQAPGKEREFVAAIS

SEQ ID NO: 15172 - protein, 13 aa, Artificial Sequence
  Synthetic
DYWGQGTLVTVSS

SEQ ID NO: 15173 - protein, 13 aa, Artificial Sequence
  Synthetic
DYWGQGTQVTVSS

SEQ ID NO: 15174 - protein, 15 aa, Artificial Sequence
  Synthetic
  misc_feature (6)..(10): Xaa can be any naturally occurring amino acid
VAAISXXXXXTNYAD

SEQ ID NO: 15175 - protein, 14 aa, Artificial Sequence
  Synthetic
  misc_feature (6)..(6): Xaa can be any naturally occurring amino acid
VAAIAXGAITNYAD

SEQ ID NO: 15176 - protein, 17 aa, Artificial Sequence
  Synthetic
  misc_feature (6)..(12): Xaa can be any naturally occurring amino acid
VSAISXXXXXXXYYYAD

SEQ ID NO: 15177 - protein, 15 aa, Artificial Sequence
  Synthetic
  misc_feature (5)..(5): Xaa can be any naturally occurring amino acid
  misc_feature (7)..(7): Xaa can be any naturally occurring amino acid
  misc_feature (9)..(10): Xaa can be any naturally occurring amino acid
  misc_feature (12)..(12): Xaa can be any naturally occurring amino acid
VAAIXSXGXXTXYAD
